United States Patent Application Publication US 2023/0087228 A1 - sequence listing, part 2

SEQ ID NO: 123 - DNA, 14033 bp, Artificial Sequence
  Synthetic Oligonucleotide
  misc_feature (1)..(9102): n is a, c, g, or t
nnnnnnnnnnnnnnnnnnnnnnnnnnnnnnnnnnnnnnnnnnnnnnnnnnnnnnnnnnnnnnnnnnnnnnnnnnnnnnnnnnnnnnnnnnnnnnnnnnnnnnnnnnnnnnnnnnnnnnnnnnnnnnnnnnnnnnnnnnnnnnnnnnnnnnnnnnnnnnnnnnnnnnnnnnnnnnnnnnnnnnnnnnnnnnnnnnnnnnnnnnnnnnnnnnnnnnnnnnnnnnnnnnnnnnnnnnnnnnnnnnnnnnnnnnnnnnnnnnnnnnnnnnnnnnnnnnnnnnnnnnnnnnnnnnnnnnnnnnnnnnnnnnnnnnnnnnnnnnnnnnnnnnnnnnnnnnnnnnnnnnnnnnnnnnnnnnnnnnnnnnnnnnnnnnnnnnnnnnnnnnnnnnnnnnnnnnnnnnnnnnnnnnnnnnnnnnnnnnnnnnnnnnnnnnnnnnnnnnnnnnnnnnnnnnnnnnnnnnnnnnnnnnnnnnnnnnnnnnnnnnnnnnnnnnnnnnnnnnnnnnnnnnnnnnnnnnnnnnnnnnnnnnnnnnnnnnnnnnnnnnnnnnnnnnnnnnnnnnnnnnnnnnnnnnnnnnnnnnnnnnnnnnnnnnnnnnnnnnnnnnnnnnnnnnnnnnnnnnnnnnnnnnnnnnnnnnnnnnnnnnnnnnnnnnnnnnnnnnnnnnnnnnnnnnnnnnnnnnnnnnnnnnnnnnnnnnnnnnnnnnnnnnnnnnnnnnnnnnnnnnnnnnnnnnnnnnnnnnnnnnnnnnnnnnnnnnnnnnnnnnnnnnnnnnnnnnnnnnnnnnnnnnnnnnnnnnnnnnnnnnnnnnnnnnnnnnnnnnnnnnnnnnnnnnnnnnnnnnnnnnnnnnnnnnnnnnnnnnnnnnnnnnnnnnnnnnnnnnnnnnnnnnnnnnnnnnnnnnnnnnnnnnnnnnnnnnnnnnnnnnnnnnnnnnnnnnnnnnnnnnnnnnnnnnnnnnnnnnnnnnnnnnnnnnnnnnnnnnnnnnnnnnnnnnnnnnnnnnnnnnnnnnnnnnnnnnnnnnnnnnnnnnnnnnnnnnnnnnnnnnnnnnnnnnnnnnnnnnnnnnnnnnnnnnnnnnnnnnnnnnnnnnnnnnnnnnnnnnnnnnnnnnnnnnnnnnnnnnnnnnnnnnnnnnnnnnnnnnnnnnnnnnnnnnnnnnnnnnnnnnnnnnnnnnnnnnnnnnnnnnnnnnnnnnnnnnnnnnnnnnnnnnnnnnnnnnnnnnnnnnnnnnnnnnnnnnnnnnnnnnnnnnnnnnnnnnnnnnnnnnnnnnnnnnnnnnnnnnnnnnnnnnnnnnnnnnnnnnnnnnnnnnnnnnnnnnnnnnnnnnnnnnnnnnnnnnnnnnnnnnnnnnnnnnnnnnnnnnnnnnnnnnnnnnnnnnnnnnnnnnnnnnnnnnnnnnnnnnnnnnnnnnnnnnnnnnnnnnnnnnnnnnnnnnnnnnnnnnnnnnnnnnnnnnnnnnnnnnnnnnnnnnnnnnnnnnnnnnnnnnnnnnnnnnnnnnnnnnnnnnnnnnnnnnnnnnnnnnnnnnnnnnnnnnnnnnnnnnnnnnnnnnnnnnnnnnnnnnnnnnnnnnnnnnnnnnnnnnnnnnnnnnnnnnnnnnnnnnnnnnnnnnnnnnnnnnnnnnnnnnnnnnnnnnnnnnnnnnnnnnnnnnnnnnnnnnnnnnnnnnnnnnnnnnnnnnnnnnnnnnnnnnnnnnnnnnnnnnnnnnnnnnnnnnnnnnnnnnnnnnnnnnnnnnnnnnnnnnnnnnnnnnnnnnnnnnnnnnnnnnnnnnnnnnnnnnnnnnnnnnnnnnnnnnnnnnnnnnnnnnnnnnnnnnnnnnnnnnnnnnnnnnnnnnnnnnnnnnnnnnnnnnnnnnnnnnnnnnnnnnnnnnnnnnnnnnnnnnnnnnnnnnnnnnnnnnnnnnnnnnnnnnnnnnnnnnnnnnnnnnnnnnnnnnnnnnnnnnnnnnnnnnnnnnnnnnnnnnnnnnnnnnnnnnnnnnnnnnnnnnnnnnnnnnnnnnnnnnnnnnnnnnnnnnnnnnnnnnnnnnnnnnnnnnnnnnnnnnnnnnnnnnnnnnnnnnnnnnnnnnnnnnnnnnnnnnnnnnnnnnnnnnnnnnnnnnnnnnnnnnnnnnnnnnnnnnnnnnnnnnnnnnnnnnnnnnnnnnnnnnnnnnnnnnnnnnnnnnnnnnnnnnnnnnnnnnnnnnnnnnnnnnnnnnnnnnnnnnnnnnnnnnnnnnnnnnnnnnnnnnnnnnnnnnnnnnnnnnnnnnnnnnnnnnnnnnnnnnnnnnnnnnnnnnnnnnnnnnnnnnnnnnnnnnnnnnnnnnnnnnnnnnnnnnnnnnnnnnnnnnnnnnnnnnnnnnnnnnnnnnnnnnnnnnnnnnnnnnnnnnnnnnnnnnnnnnnnnnnnnnnnnnnnnnnnnnnnnnnnnnnnnnnnnnnnnnnnnnnnnnnnnnnnnnnnnnnnnnnnnnnnnnnnnnnnnnnnnnnnnnnnnnnnnnnnnnnnnnnnnnnnnnnnnnnnnnnnnnnnnnnnnnnnnnnnnnnnnnnnnnnnnnnnnnnnnnnnnnnnnnnnnnnnnnnnnnnnnnnnnnnnnnnnnnnnnnnnnnnnnnnnnnnnnnnnnnnnnnnnnnnnnnnnnnnnnnnnnnnnnnnnnnnnnnnnnnnnnnnnnnnnnnnnnnnnnnnnnnnnnnnnnnnnnnnnnnnnnnnnnnnnnnnnnnnnnnnnnnnnnnnnnnnnnnnnnnnnnnnnnnnnnnnnnnnnnnnnnnnnnnnnnnnnnnnnnnnnnnnnnnnnnnnnnnnnnnnnnnnnnnnnnnnnnnnnnnnnnnnnnnnnnnnnnnnnnnnnnnnnnnnnnnnnnnnnnnnnnnnnnnnnnnnnnnnnnnnnnnnnnnnnnnnnnnnnnnnnnnnnnnnnnnnnnnnnnnnnnnnnnnnnnnnnnnnnnnnnnnnnnnnnnnnnnnnnnnnnnnnnnnnnnnnnnnnnnnnnnnnnnnnnnnnnnnnnnnnnnnnnnnnnnnnnnnnnnnnnnnnnnnnnnnnnnnnnnnnnnnnnnnnnnnnnnnnnnnnnnnnnnnnnnnnnnnnnnnnnnnnnnnnnnnnnnnnnnnnnnnnnnnnnnnnnnnnnnnnnnnnnnnnnnnnnnnnnnnnnnnnnnnnnnnnnnnnnnnnnnnnnnnnnnnnnnnnnnnnnnnnnnnnnnnnnnnnnnnnnnnnnnnnnnnnnnnnnnnnnnnnnnnnnnnnnnnnnnnnnnnnnnnnnnnnnnnnnnnnnnnnnnnnnnnnnnnnnnnnnnnnnnnnnnnnnnnnnnnnnnnnnnnnnnnnnnnnnnnnnnnnnnnnnnnnnnnnnnnnnnnnnnnnnnnnnnnnnnnnnnnnnnnnnnnnnnnnnnnnnnnnnnnnnnnnnnnnnnnnnnnnnnnnnnnnnnnnnnnnnnnnnnnnnnnnnnnnnnnnnnnnnnnnnnnnnnnnnnnnnnnnnnnnnnnnnnnnnnnnnnnnnnnnnnnnnnnnnnnnnnnnnnnnnnnnnnnnnnnnnnnnnnnnnnnnnnnnnnnnnnnnnnnnnnnnnnnnnnnnnnnnnnnnnnnnnnnnnnnnnnnnnnnnnnnnnnnnnnnnnnnnnnnnnnnnnnnnnnnnnnnnnnnnnnnnnnnnnnnnnnnnnnnnnnnnnnnnnnnnnnnnnnnnnnnnnnnnnnnnnnnnnnnnnnnnnnnnnnnnnnnnnnnnnnnnnnnnnnnnnnnnnnnnnnnnnnnnnnnnnnnnnnnnnnnnnnnnnnnnnnnnnnnnnnnnnnnnnnnnnnnnnnnnnnnnnnnnnnnnnnnnnnnnnnnnnnnnnnnnnnnnnnnnnnnnnnnnnnnnnnnnnnnnnnnnnnnnnnnnnnnnnnnnnnnnnnnnnnnnnnnnnnnnnnnnnnnnnnnnnnnnnnnnnnnnnnnnnnnnnnnnnnnnnnnnnnnnnnnnnnnnnnnnnnnnnnnnnnnnnnnnnnnnnnnnnnnnnnnnnnnnnnnnnnnnnnnnnnnnnnnnnnnnnnnnnnnnnnnnnnnnnnnnnnnnnnnnnnnnnnnnnnnnnnnnnnnnnnnnnnnnnnnnnnnnnnnnnnnnnnnnnnnnnnnnnnnnnnnnnnnnnnnnnnnnnnnnnnnnnnnnnnnnnnnnnnnnnnnnnnnnnnnnnnnnnnnnnnnnnnnnnnnnnnnnnnnnnnnnnnnnnnnnnnnnnnnnnnnnnnnnnnnnnnnnnnnnnnnnnnnnnnnnnnnnnnnnnnnnnnnnnnnnnnnnnnnnnnnnnnnnnnnnnnnnnnnnnnnnnnnnnnnnnnnnnnnnnnnnnnnnnnnnnnnnnnnnnnnnnnnnnnnnnnnnnnnnnnnnnnnnnnnnnnnnnnnnnnnnnnnnnnnnnnnnnnnnnnnnnnnnnnnnnnnnnnnnnnnnnnnnnnnnnnnnnnnnnnnnnnnnnnnnnnnnnnnnnnnnnnnnnnnnnnnnnnnnnnnnnnnnnnnnnnnnnnnnnnnnnnnnnnnnnnnnnnnnnnnnnnnnnnnnnnnnnnnnnnnnnnnnnnnnnnnnnnnnnnnnnnnnnnnnnnnnnnnnnnnnnnnnnnnnnnnnnnnnnnnnnnnnnnnnnnnnnnnnnnnnnnnnnnnnnnnnnnnnnnnnnnnnnnnnnnnnnnnnnnnnnnnnnnnnnnnnnnnnnnnnnnnnnnnnnnnnnnnnnnnnnnnnnnnnnnnnnnnnnnnnnnnnnnnnnnnnnnnnnnnnnnnnnnnnnnnnnnnnnnnnnnnnnnnnnnnnnnnnnnnnnnnnnnnnnnnnnnnnnnnnnnnnnnnnnnnnnnnnnnnnnnnnnnnnnnnnnnnnnnnnnnnnnnnnnnnnnnnnnnnnnnnnnnnnnnnnnnnnnnnnnnnnnnnnnnnnnnnnnnnnnnnnnnnnnnnnnnnnnnnnnnnnnnnnnnnnnnnnnnnnnnnnnnnnnnnnnnnnnnnnnnnnnnnnnnnnnnnnnnnnnnnnnnnnnnnnnnnnnnnnnnnnnnnnnnnnnnnnnnnnnnnnnnnnnnnnnnnnnnnnnnnnnnnnnnnnnnnnnnnnnnnnnnnnnnnnnnnnnnnnnnnnnnnnnnnnnnnnnnnnnnnnnnnnnnnnnnnnnnnnnnnnnnnnnnnnnnnnnnnnnnnnnnnnnnnnnnnnnnnnnnnnnnnnnnnnnnnnnnnnnnnnnnnnnnnnnnnnnnnnnnnnnnnnnnnnnnnnnnnnnnnnnnnnnnnnnnnnnnnnnnnnnnnnnnnnnnnnnnnnnnnnnnnnnnnnnnnnnnnnnnnnnnnnnnnnnnnnnnnnnnnnnnnnnnnnnnnnnnnnnnnnnnnnnnnnnnnnnnnnnnnnnnnnnnnnnnnnnnnnnnnnnnnnnnnnnnnnnnnnnnnnnnnnnnnnnnnnnnnnnnnnnnnnnnnnnnnnnnnnnnnnnnnnnnnnnnnnnnnnnnnnnnnnnnnnnnnnnnnnnnnnnnnnnnnnnnnnnnnnnnnnnnnnnnnnnnnnnnnnnnnnnnnnnnnnnnnnnnnnnnnnnnnnnnnnnnnnnnnnnnnnnnnnnnnnnnnnnnnnnnnnnnnnnnnnnnnnnnnnnnnnnnnnnnnnnnnnnnnnnnnnnnnnnnnnnnnnnnnnnnnnnnnnnnnnnnnnnnnnnnnnnnnnnnnnnnnnnnnnnnnnnnnnnnnnnnnnnnnnnnnnnnnnnnnnnnnnnnnnnnnnnnnnnnnnnnnnnnnnnnnnnnnnnnnnnnnnnnnnnnnnnnnnnnnnnnnnnnnnnnnnnnnnnnnnnnnnnnnnnnnnnnnnnnnnnnnnnnnnnnnnnnnnnnnnnnnnnnnnnnnnnnnnnnnnnnnnnnnnnnnnnnnnnnnnnnnnnnnnnnnnnnnnnnnnnnnnnnnnnnnnnnnnnnnnnnnnnnnnnnnnnnnnnnnnnnnnnnnnnnnnnnnnnnnnnnnnnnnnnnnnnnnnnnnnnnnnnnnnnnnnnnnnnnnnnnnnnnnnnnnnnnnnnnnnnnnnnnnnnnnnnnnnnnnnnnnnnnnnnnnnnnnnnnnnnnnnnnnnnnnnnnnnnnnnnnnnnnnnnnnnnnnnnnnnnnnnnnnnnnnnnnnnnnnnnnnnnnnnnnnnnnnnnnnnnnnnnnnnnnnnnnnnnnnnnnnnnnnnnnnnnnnnnnnnnnnnnnnnnnnnnnnnnnnnnnnnnnnnnnnnnnnnnnnnnnnnnnnnnnnnnnnnnnnnnnnnnnnnnnnnnnnnnnnnnnnnnnnnnnnnnnnnnnnnnnnnnnnnnnnnnnnnnnnnnnnnnnnnnnnnnnnnnnnnnnnnnnnnnnnnnnnnnnnnnnnnnnnnnnnnnnnnnnnnnnnnnnnnnnnnnnnnnnnnnnnnnnnnnnnnnnnnnnnnnnnnnnnnnnnnnnnnnnnnnnnnnnnnnnnnnnnnnnnnnnnnnnnnnnnnnnnnnnnnnnnnnnnnnnnnnnnnnnnnnnnnnnnnnnnnnnnnnnnnnnnnnnnnnnnnnnnnnnnnnnnnnnnnnnnnnnnnnnnnnnnnnnnnnnnnnnnnnnnnnnnnnnnnnnnnnnnnnnnnnnnnnnnnnnnnnnnnnnnnnnnnnnnnnnnnnnnnnnnnnnnnnnnnnnnnnnnnnnnnnnnnnnnnnnnnnnnnnnnnnnnnnnnnnnnnnnnnnnnnnnnnnnnnnnnnnnnnnnnnnnnnnnnnnnnnnnnnnnnnnnnnnnnnnnnnnnnnnnnnnnnnnnnnnnnnnnnnnnnnnnnnnnnnnnnnnnnnnnnnnnnnnnnnnnnnnnnnnnnnnnnnnnnnnnnnnnnnnnnnnnnnnnnnnnnnnnnnnnnnnnnnnnnnnnnnnnnnnnnnnnnnnnnnnnnnnnnnnnnnnnnnnnnnnnnnnnnnnnnnnnnnnnnnnnnnnnnnnnnnnnnnnnnnnnnnnnnnnnnnnnnnnnnnnnnnnnnnnnnnnnnnnnnnnnnnnnnnnnnnnnnnnnnnnnnnnnnnnnnnnnnnnnnnnnnnnnnnnnnnnnnnnnnnnnnnnnnnnnnnnnnnnnnnnnnnnnnnnnnnnnnnnnnnnnnnnnnnnnnnnnnnnnnnnnnnnnnnnnnnnnnnnnnnnnnnnnnnnnnnnnnnnnnnnnnnnnnnnnnnnnnnnnnnnnnnnnnnnnnnnnnnnnnnnnnnnnnnnnnnnnnnnnnnnnnnnnnnnnnnnnnnnnnnnnnnnnnnnnnnnnnnnnnnnnnnnnnnnnnnnnnnnnnnnnnnnnnnnnnnnnnnnnnnnnnnnnnnnnnnnnnnnnnnnnnnnnnnnnnnnnnnnnnnnnnnnnnnnnnnnnnnnnnnnnnnnnnnnnnnnnnnnnnnnnnnnnnnnnnnnnnnnnnnnnnnnnnnnnnnnnnnnnnnnnnnnnnnnnnnnnnnnnnnnnnnnnnnnnnnnnnnnnnnnnnnnnnnnnnnnnnnnnnnnnnnnnnnnnnnnnnnnnnnnnnnnnnnnnnnnnnnnnnnnnnnnnnnnnnnnnnnnnnnnnnnnnnnnnnnnnnnnnnnnnnnnnnnnnnnnnnnnnnnnnnnnnnnnnnnnnnnnnnnnnnnnnnnnnnnnnnnnnnnnnnnnnnnnnnnnnnnnnnnnnnnnnnnnnnnnnnnnnnnnnnnnnnnnnnnnnnnnnnnnnnnnnnnnnnnnnnnnnnnnnnnnnnnnnnnnnnnnnnnnnnnnnnnnnnnnnnnnnnnnnnnnnnnnnnnnnnnnnnnnnnnnnnnnnnnnnnnnnnnnnnnnnnnnnnnnnnnnnnnnnnnnnnnnnnnnnnnnnnnnnnnnnnnnnnnnnnnnnnnnnnnnnnnnnnnnnnnnnnnnnnnnnnnnnnnnnnnnnnnnnnnnnnnnnnnnnnnnnnnnnnnnnnnnnnnnnnnnnnnnnnnnnnnnnnnnnnnnnnnnnnnnnnnnnnnnnnnnnnnnnnnnnnnnnnnnnnnnnnnnnnnnnnnnnnnnnnnnnnnnnnnnnnnnnnnnnnnnnnnnnnnnnnnnnnnnnnnnnnnnnnnnnnnnnnnnnnnnnnnnnnnnnnnnnnnnnnnnnnnnnnnnnnnnnnnnnnnnnnnnnnnnnnnnnnnnnnnnnnnnnnnnnnnnnnnnnnnnnnnnnnnnnnnnnnnnnnnnnnnnnnnnnnnnnnnnnnnnnnnnnnnnnnnnnnnnnnnnnnnnnnnnnnnnnnnnnnnnnnnnnnnnnnnnnnnnnnnnnnnnnnnnnnnnnnnnnnnnnnnnnnnnnnnnnnnnnnnnnnnnnnnnnnnnnnnnnnnnnnnnnnnnnnnnnnnnnnnnnnnnnnnnnnnnnnnnnnnnnnnnnnnnnnnnnnnnnnnnnnnnnnnnnnnnnnnnnnnnnnnnnnnnnnnnnnnnnnnnnnnnnnnnnnnnnnnnnnnnnnnnnnnnnnnnnnnnnnnnnnnnnnnnnnnnnnnnnnnnnnnnnnnnnnnnnnnnnnnnnnnnnnnnnnnnnnnnnnnnnnnnnnnnnnnnnnnnnnnnnnnnnnnnnnnnnnnnnnnnnnnnnnnnnnnnnnnnnnnnnnnnnnnnnnnnnnnnnnnnnnnnnnnnnnnnnnnnnnnnnnnnnnnnnnnnnnnnnnnnnnnnnnnnnnnnnnnnnnnnnnnnnnnnnnnnnnnnnnnnnnnnnnnnnnnnnnnnnnnnnnnnnnnnnnnnnnnnnnnnnnnnnnnnnnnnnnnnnnnnnnnnnnnnnnnnnnnnnnnnnnnnnnnnnnnnnnnnnnnnnnnnnnnnnnnnnnnnnnnnnnnnnnnnnnnnnnnnnnnnnnnnnnnnnnnnnnnnnnnnnnnnnnnnnnnnnnnnnnnnnnnnnnnnnnnnnnnnnnnnnnnnnnnnnnnnnnnnnnnnnnnnnnnnnnnnnnnnnnnnnnnnnnnnnnnnnnnnnnnnnnnnnnnnnnnnnnnnnnnnnnnnnnnnnnnnnnnnnnnnnnnnnnnnnnnnnnnnnnnnnnnnnnnnnnnnnnnnnnnnnnnnnnnnnnnnnnnnnnnnnnnnnnnnnnnnnnnnnnnnnnnnnnnnnnnnnnnnnnnnnnnnnnnnnnnnnnnnnnnnnnnnnnnnnnnnnnnnnnnnnnnnnnnnnnnnnnnnnnnnnnnnnnnnnnnnnnnnnnnnnnnnnnnnnnnnnnnnnnnnnnnnnnnnnnnnnnnnnnnnnnnnnnnnnnnnnnnnnnnnnnnnnnnnnncccagctggtcaagccaccctgaaattgggtggctactggaacacatactgcgttgaatacatctacaaacctggtcaagccaccctgaaattgggtggctactggaacagcgtccatatgcgcaatgcgttcccagctggtcaagccaccctgaaattgggtggctactggaacaatatacgattgggacacaaaagacatttgggtcaagccaccctgaaattgggtggctactggaacgacggtggctatgtcagaccaactgtttaaggtcaagccaccctgaaattgggtggctactggaacacaaatagacaatgcccgtcggtacccgctaggtcaagccaccctgaaattgggtggctactggaacttggccgatgctttgcactgttgctgggctggtcaagccaccctgaaattgggtggctactggaacagtgcaggcaacatagaggatgcgagttgaggtcaagccaccctgaaattgggtggctactggaacagtgcgtgctgagttagctgatgaatcacgggtcaagccaccctgaaattgggtggctactggaactaaaacacattacgcttctcatcgtactccggtcaagccaccctgaaattgggtggctactggaactagtaactgccctcgatagcagcatgaaaaggtcaagccaccctgaaattgggtggctactggaaccgtggacatctatccgacctgctgcccagcggtcaagccaccctgaaattgggtggctactggaactagtcagtgagatatttataaatgacttttggtcaagccaccctgaaattgggtggctactgcattgtgtgcaacctccccccggttggtgtaacttacttcgttagtgacctcgcaaaaggtattcatgtttcgcagcccagagcagcagcactttagtgccatagtcagtaagcacattgctcaacccgatgccccgttattactagagggtggtacgggcttgggcaagacacgcgcatacctagcttcgattgggcaagcacgtgtggcgatcgttctgccgacccatcaacttatcgatcaaatgctcggatcagcagatcttcgggcggttggtctgacggatgtgaaagcctttcgtcctgctagattttatgaggcccgtgcggaatatgaaaaagctcgtgaacaggcaaaaaacgcgcaagtcatgctttgcacggcagcctcagtcattatcgatcagcgcttagacggggaatacaacggtatcaccacggaccgtgagtacattatcttcgacgaggcagaccagttgcccgacatggcagcgttgcagtcagatttcactatttctcagcatgacctgtccgaacttggtatcaagctaataacagccgatcaggcattggcagacatcgtggctaaaaagccgcgtacagttcaacccgagctccgtgcggcagccaagttaatgcttgaggtgctggcgcaacctgcgtggtaccacgcctgtggtcaagatgatcagggtggccttgttctgacacacaagctcccgggaaggttgttgaagaaaatcagtaataggccccgcacggcttttatcagtgcaacgctatcggtgtctggaaagtttcaaaatttcaaaatgtcgatgggtattgaaaacgaatcgatgctgtcgaccattattgagcctattagacacggttctcttacctttcataccgttgatgccgttgttgatacacccgagtggattgatgctgttgtcgatgccgtcaaccaatctcccaaaccaaccttggttgcgactacttctcatgacctgactcaagttttagctaagcgactgccagacgccacagcgcgtttaaatgatgagaccgctgccatggcttccgaacgggttgatcagggtggcgttcttatagcagcaggagcatgggcagggcttgacacggcggttcgctggcgttcgatcgtagtaccgagagtgccatacagcaagccagtggtcgttgagggtgatgtgacaacaagttaccttgatgcaagaaacactgccatacgacgcctgaggcaagtcatagggcgagggctgagaacgccagacgcagtgtgtgacatctatatcttagacggacgttatgatcgtttggaagcgtttgtgccggagagatttaagactgcttggagagatcgagataaccaatctttcttagaaggtgcgaggaaagaagttgttttgagtaaagccgagcgtgatccgatgctgcgccaaacagcaatacggaaatatggtttggtatgtatggcttgtggctatgttccaaaggtatcaacgcaaatagacgttcatcacaaggatccaattgcggagggtgagcgtaaaacaacggtagccgacgtacttgttttgtgtgcgaattgtcacagatttgcgcatagcgagtcacctccgcttgaacttgaagcaatacgtctttaagttaggttgtaaactaaaaatcaagggcagaagaccggctgcataagtgtccatccgtttattaaaaaataaaatcttatgatcaagttagccctacttacggtatccatagctgctagcgcgatgagtgtggctagttcgtatacacccgagcaggtgcgatctgcagtcaaacaggcagggggtgctgagcgctttattgtcgagattgcacagaacacggcaaagatgtcgggacagatgttagacgatcaaacgcagttaactggttctgttgcctttgaaagaacgatcgtctactacttgcgtatggtgaattacgataagagagatatccagaacatcagtgcttttcgacgaaaagtggctagcctgttggcaccatcagtatgcacagcacccctcgcgtcaattttgataaatgagtatcgtgctgagtacaagtacatggcatattctaagtcgcgtgaatacttatttgaatacggattcaaccgaaacacttgtgcgccaagctaccgttggtagcggatacattacctcgacaattacggaactcgaaagtctgaaagaaggcacacaaccgtggaggtgggctctattcaattttgttttttggtcgtcgcccccggagtttcacttcctctgcaaagagtccaattttgttccctaagttgttgacgccggttgaaaactgaccaggtggtcagtattcaaccggcgccaacagccaagagaccaaaaagtgcatgacacacgtgacctgaagacaaaagggctgagcgtgattagagagtgcaaacttaatcaaaacaagttaagctttataagcgatcaagcgtagctaaggacatacccatatgttgcaaactcgactagcaatgctactcgtctcctgtgtaatcacagccttaactggttgcgccaacatatccgttccaaccggaactagtgaggaaaggtacctaaatacaagctcggtttcgcctgtagccaccgtcatttactcggctaaatacgatccaattggtcaaacaatttatttggaagttagccaatacaaattgcagcagttgtacaccgtacccaaacacttcaacaccgcatcgcgcaccattgaattgagttaccccaatgcgaaaccgaaaaataattacaagtgggaatcccaaaaaattagttggttttccttatatcagatgcggcaggtttcattgacctcgcagggaggggattcgatttccgtacccgtagacctaaaaaatgagcgcgttgaactcgaattaagtggtgtgattgataagcttcaccctaacgtcctttacaaggtagcttgtgcttcttgcactccttgggtttataagaagttaatcccatctgaatatttgccagcccctcctagtaatagcaacgaagtcagcttttctatccttcctcctgaaaaggtctcaatactgaacaaattagaagatctacgaaaagctcaactggcggagaaaagagcgcgggagactgaagcccacgagttggaacagcgaatggctaaagagaaacgtgaattagagctgaaactggcccgtgaaaagcgtgagagggagcagcagttagccgcagaaaagcgtgagcgcgatgctcgaataagaacagcggatgcagaaagaaagcgcgaagccgccagagtcgtgcgagaaggcgatggaagcaccgatgacttagtctgcaaaaaatacgggtttaggccaaatacgcaagcttatgccaattgcagactacaaatcgacgttgcaaaacgggagatgcaacagcaacaggctcagtatatggcccaacagcaacagttcgaagctgctcaagaaactgcaagagaaagacgacagaacgaattcttgttgggaatgggattgcgcatgatgggcggtcagagtcctgctggggcttatgttgatcagtcagtgggagcacctatgtatcagccacccccaccaagcacacgtacttactcatttccaaatggccgaatgatgacctgcacttccaatgggagttttacgaattgttattgaaggttgttttcacctgtgctgtaagtgccaattgctttctaaaagcgtctaaaaaattagggagtacctgacggataactacgataataataaactgcaacatcataattaatttagcgaatccaaaatttaaccggttgagttcaaaagtgaagtgcaacactaaccttgaggtactgtgttgcgatgaaaaccaaatacaagcaacttaattgtgaagagcgaattttgattcagctgagccttgagaaaggaagcaccatacgggccattgcgcttagcttggaccgaagcgcgagctccataagtcgagagctggctcgtaaccagtggtgtagtcctcaggcacaggcttttaggcctggcaggtccgctttggcc

SEQ ID NO: 124 - DNA, 13935 bp, Artificial Sequence; identical to SEQ ID NO: 7
  Synthetic Oligonucleotide
  misc_feature (1)..(5681): n is a, c, g, or t

SEQ ID NO: 125 - DNA, 13932 bp, Artificial Sequence
  Synthetic Oligonucleotide
gcgtacagtccccacagatgggatcccgtcgagtgacactcagaaaacccttgactgattaggcggtgaaaggctttagcgccgccaatttctacatacttcccattcctcaactcgctgatctgtaccaagtcgtcgtccaacgagatcagatgagtgccttcaggatagtagttctgaatccaatttcgctgactcccgatattcttcaccccgactacaatccgcttaccgtaagggttgttcttgagacgctcgcgatacagcgcaggttcccgcttattctctagcgtctcatcagtgtaaatctgtggctttcctcgcttgcccttctcagcccaaagacgcttggtcgcctcatcggctacgaagatcgtgacgcgctttggatcaaccttgtatcgctccaacatcttgagagtgaaatgctcgatcattcctgatcgaccatagctcggaacggcgatttggaagttctcaattgcttcctcacgcgttttttgcgtttcaggaatgacgctgatgctgttggtgggtaggcgttgaatccgcttcagcaacttgccgttgagcggtgcgatagggttttggcgttgtgcgtgtcggaccagggaagggcgcgtgattttcttcttactgcccgctgcggcgtaactgtgaacttcatcggcgccgatatagcccaaggcggaaatggactgaaagagccaaaaggctgagccatcggtcgcagtgatttgccctgttctcgcgtgtgacgaggtcctgtgactccaaacacgaacggctgcgttgggtgttcttgcgccgaagatcaacgcggaaagtgacggcgaacgccaagacctgacagcttggctacaggcgagcgtgtaactcttatcgtcttgttgaatagtaaggctgtgcttattagcagtccacgcccacggctgatgtagtttcggaattggaacgggcttgctcagcgagcggtaagttcctactagctcgtagcgttgttggtaatcctcattgtttagagccttggcgcgacgaacatagtgcgccaaatgctcccgcagataggcgcgttcgctctggtaggtcagttcgatcgcttcgcacttgtgtggttgtccctcattggcgaaagtgccttcacggacttctgcgcgacgccaccctaggtcgtacagctccgcggttctgcttgggatattcggaaagtatcggtcggcgagcgacgaggcggagtcaataaatgcttgccgagtcctcttgagttgacctgcgactgttttcagctttctgtccttcggcgatatcgtggtaaacgccattcgctgaggggcttcaggtatccccgtcggtgcggcaatcagccatacagacctgccttcgtcccaatggcgtttgatccactcgtaagcatcgcgcgacagtttctcaatctcacggggtatggactgaattggtgctacggcttgaacattaaaccgattgttattgaatcgcgccgcaccgctttcgctcgtggtgtgactgatgccccagcgctcgccgtcgatgtctgaaagaaaaagactgtccaccaataccgcaccgtcatcggaagtgggtttctttttccccttctcaggaacttggtcttgtcgagccgtcttgagatgaagggctgagaaaactgcttctaaccccacgcgctctagacgactgggcggagcaagttccgccaagtattggtatctcgtttggtcgaacagggggtcgctttcccacttattcgtcaggtacagaagttcggcgttcagcagtttggcttttcgagcaactacgagcagagactcgccatgctttgctcttaagtttttccttaaatattcgtaccaagccttggactcccatcggcgcgcacgaaccttttcatgttcctccagtctctgttggtgcccgacgaaatcacggcgtaaattctcatacgaggctgtgccgctgaataggaaggactctctgacatagcacactaggctcattcgggtagcgtcacgatcacgatgcgtgatgggcgtgtttgaatgaaggtattcgtcgttttggacaaacagcagatctctcggcttcatcgccacttctgcgccgaactcagggagaatcagatgaccgccctcgtatcgtttgccgttacaaagaacgagtagattggagaagccttggcggaggttcccatcgtcacggtgtagagcggtttgaaagttggcgttaacagtcaccgtagtgaatacggtgtcggcgatgcgaaactctttagggatgcgatttacatactcttgctgaatcgcgtagcgctgcggcagcgctattttaaatgcgcgatcgatgcgctgaagtattgggacaactctgtcgtagtcatacggaaagtcggtgttccaattgcttcgtcgcgcccaagggttatttgcgtctcgcccactgttgccaatgacgctactcttgaccttgttcccataggttcgcttgctgatgttcgatctctcgaaagcggtcaccgcttcgcgccgtcgaatagttggcagtttcgccacccgtttccaccaagtgctccatgcggcttcgcggtatttcttttttccaccctcccaagttcttagccgattggggttctcgtcgcgggcttcggcttgagcctcacgaatcgcagcgagcagctttgacccagccgacgcatcgcttttaaggagttctagcgtggcttcctgatcgcggcgcacataggctttctcgcctttttcggtgtctaccgatccgctcgctttgccgcgattgtcagactttcgtacggcatgcttcagggacctatagagcagcatctcctcttcttggcttatgaattgaggtaggtagatagcagcaggattcgtcttgactgaaaaccatttcatcttgggggttcctagccgaggtgattgattttagacaacgatgggcgcaaagtcggttgaaacatttcaaccgtccttggaactgaaacaatgccgaaaaaggtcgccgttaagcgtgactactcgaggctaatcgctcagtttgcgtctgagggtagccgtcagctcgagaaaatcaaccaaaagcaccaagcctatgcggaagagatcatccgcttcgcggttctagtcaagagttggaatgaccaggctcttgaggaggatgagggcgaagagggtgactgctacaaggcggttggggcgtggtttaaggattgggcagccgagaatatcggcgacaaatatcagctctaccattggaacaagatcgctagtgccgcgacggtgttgagttcgccgaagattctgccccacctcccgcacaccaagatggcgcttgttcatctcgccaagaagacaaaaggcgacaagagtagcgatattgagcgtttcacgaattggatcgccaaggggcagctcagttcggaaacgacagtcagcgaagccaagaaactcggagtcaaggttccgaaacaaaccaacccgtctgagggaaaaacatcgcgattggtcgcagacgctaagaggactacaaccgcttttcggaagaatggtgtcgttcttgatgttcccctgagttcggtgagtcgtcagttccccgatagagatctctttacaaagggtcttacggtagcaatcttgggtagcgagaccgacgaagcgtcgggggttgaaaagttggttttactcactgtggtcaacagcgaaaccgcgctcgccgatgtactcgatagcctcaaggactagggttccaataagggtgggcgagaagaccccgcaagtagttgattcttggtgcgacgcgaaggggtttttcagcgttccacaagtagtagatttggtttaggcaccgtacgataaagaataaaaattttgtcaccaagcgtatctctaggattaggaggttcccgatgttcggaatcacagtgattgagcgcaggcttcgcgatgagcgtgatgacgagtgacgcaatagcaatggcgcgtgttggaggatctatgcgtagttatattctcgtaacaataaactccctaatcctaatatctcttgccgcttgtggcactcaggagtccgtctctccgccgaaacttgaggcggctgaaaacagcgataagccatcgacggaaactactagctcttcgacgaatacttgcgatggcttatcaggcgccaagtacaacgattgcgttgtaaagaattctcccgatactgcggcagcgatcctaacgcctagcgttacgtcaaaatggaatgtggttgagaataaagacgagatgactggggcatcagaggtcgtatccgtttacggcgagggcgatacggagcaaacgcaactagtacttcgatgtaacgataaaaaaatactgcttttcgaggtagtcattggaaatggcgaccttgttgatcaaaccgaacagcaggtgcgctcgactaatatatggaatgacgacgcgccaaaatattgggaagccgtcgtatactcggctgcacgaataaaaatgtctgaaaatgatggcgttgcgaatattatgcttcgtgaaagtaatgagtttagtaatcagtatatttggggattgcaaataacaagcgaaaacaaggcgttgataaatctaagcactttcatgcttgaaatgacgcttagtaatggccaaaaaagattaataaaaggggatgcggtagtcggagactggttcgagaagttctgtactactccagagagcgaacttccttagtgtaaagctccgacggctcaggatcgttttgttaccgctcggtgtgcttcagcttgaggtacatattcctgcgtttgtttcacatgaactcgcggagggacgtcaggtccgtttgctcttctctgccacaatccaagcatggtcgctctgaagcagtgcttttcgctgtcgctcgctgagggtccgagcgtcgtagacctcaaggtcgcgggagtggcgccgaaaggtttccatcaatgccttggtttctgtggaggtgagtggcttgccaggcttcatcaggcaactcttgctctgagcagctcagccgcttgtgggttggtgtagatggcaatttcgagctctttggcggcttcacggcagaactcaccgtcagtcattcccacaaactcagcagctttgcgaatgcggctcttgaggtcgttggtggtgcggaaggcaatttgttcattcttgatcagcgtgtgttgtcttggcatttgtcaggctccatcaggtgcgttgtcgactatttagcgtgtagggcgagggcaaggcggtagaggtgagtgggtctcactcgaacaggtgcgcaaggttgtggcgaacgggttccgcagccgcagaaggcgactgaggagcactggttgaaacagttccaccgcgtggcacctcaatacccacattgatttcattcgtatcagcgtcgcgccaagcgcagaagaacaactcaggctcagcatttccgcggttgaactcgcgagcgatgtgcgccgcaattcgccaatcgagcttttcgacgcctcggtgtttcgcatagtgcgtgggtgatccccgtttgggactgtcagactgcgacggcacgagtgaaataaagtagtgactattgttgtttttgctcattgttgaaagatctcgttttggctaaagcactgcttctatttagcgtttctgtgcttttcgaattttgcgtatctcagccaattgctcaccgcgtcgcctccgcaatcgttgtgagtggtaagttcagagggagtgtttgcgattcgagtcacctcgaaccgtttgactcgagttggtctgatattgcgttcgttgcgtgaccaagagcgcagagtgtttgtgagacgcttgttcagcgacccattcacccacaccttgtgcgcgtaatctttcttgatacaaacgattccgtgaaaatgaatcgttggctcatagtgaagagagtacttagacgcgattaggtaatgccgcttgctcttaggtagaaactgctgaaacgcttggagtagaaacttgctccatagctcgtggaagtcttgggttctagagtattggtttccttggtcatcattcggcactagcgttaccaatgtgacggcgagtaaaagatgaccgttctcagagtggtttgtgaactctctgatgtcagactccagggtgtcattagtgctagaaggtttagatccttcaggtaagtttgtaaggttctcttttgctctgcgtcttggaccaaaaccaagtaatccattggctagttcctctttatgtcgtgactcatacgcttgcttgtcttgggtctctttgactttccaccaaattaagcagtagtagaggaatagtgtttgtagcgttggatctgtcagtctcatcggtcgttctcagtgtttcttgggcaatagttagtcaattgggctcagcaccctcgttgtaaaactgaatacacgctaacgagcttcttgggggtggttgttcttttgccaccaagagtcagttagcctgagcactcccacaggactatttcggtgtacctgtgggttgaaccttcagaggagacgacaccctatctcccatagatatatataaaaaaaagcactgaaaacgccctactgaacgctttttttcgaaaaaagtttcgcttgttcttgccgtcagatagcagagggtcaatttctgacactgcgacctgtcagaggattgtcagggctgcgtaaaagcaatagggtgggcggatatggatcgctttgctgtcacgctgcgtctcgcctcccccttggttacgggtgggggctatatgacgctagacgcactcctggcggcggtactatttgattcaggggaaaccgtcgaggctgctcacgcgaaagtgcctctcaagaatactcaagggctttggcacggaagtgccgctgtttacgaaactcttgaagtgggacgccaagcgttcgttgccaatctgcgtgccactcacgatctgactcctgaccttatcgccaagaacaagcacggagcactccacgcaaaaatcagtttaggacgccgtcgtgacttcggacctgtaatgaatgggtaccaatacttggtggcggagtcgttgacgtggtacggcgagggggactcagccgccgtagaacgcttgctccgcaccgtgagatttattggaaaacgtcgagcgagtggctttggtgaggtgagcggggtcgaaatgtcgccgtctgatgtggatggtgtagtgggaatgcttggcgatcccttgcgtcctgttcccttagagctattcacgggggacaagagcgcgatacgaggtgacgctgcgtggaaacctgcctattggcgtcctgagaatcgtgcgatttgttatttaccgtcacaaaactaaatgaatacttacgaattttttatggagcactttgggcgtcatctcattgacgcagaggggctgaccgcagcacagggaacagagaaagcgctgagtagcaactacactacgctgaagggaactcctagtcgtcttcagtctggttgggcagttgttcgccctggtgtttcttctcttcaattgaagattaccgctaaaggtattgcttacgacaaccgcactgcgatggaagcatttatagacgagctgaccacgtgggacggcgactcgccaaggatattccttcaatttgagaaggcacccgtcccgatatctaatctctttatcacggttgatcgtcggttgattcgtatttgttcgccaaaaggcgtcgcatcgtttgatatgaacgtggaccctgactcctccgccacgattgttcaacgcgcaatttggaagcggttgccaaaatgatttgcgactacaccatttctaaacctgagagcctcggtctgtacgcggtccatcggtttgtcgcgcagctttgtgatggtgtgccgtgcctgtttgtggatcgtggtgatcgcgtggtgattcgtaccgccaagcctttgtgtgatcgcgtgacagaggtttccgtgccttccgtgggcgatgtgattgcgttttccttgcgatctgccgtgtcgaagcgtcaaaaaggcaagaatgtctatgcgccacttaacgattggcgagcgcgtcaccaatggctagagaagcgtgccgtaaagaatggctttgcgcttcttgcgcttcacgcaacaagcaagagcgtgaaagtagagcgcgagggcggtcagtactttcaaatggattcaaccgattttacaggggtgctcaaggtgaccgatgagcagctctttgtggcgtgtctgactcgcggaattgggcgggtgggcaagccttacggaatgggaatgctcgtaatctagcaacggtttggaggctttatggctaacagagtgattgtcaaagtgacgctacggaccaagggaccgttgtcgctcaagatgcctgtggcggaaggtgctcgtgaaaacgagtttgataactttcctgtgatgacgcgaggagtagacgcggagggagccaagcagcgtacaggctatcttcctgcgactactattcgtggatttttgcgaagggcggtcacgctgaagcgaatgcgagatgccgcagcgcaaggcaagccctacaggttgccgcaaatttataatgaaatgatcggtcaagacgccgagagcgagaagaaagcagaggaaatcgatttaatcgaaattcagaaagcacgcgacagcagtcctgtcgtggatctgtttggatcaggactcaatgtgaagtcacggctcttggtgagtcacttttgccctgcgctcaatattcttcctgaggcgttcacaggtgttcgtaaggacattgacgatacagaagacgccttagagttgatggaccctaaagagatggaagggttcgtgcggcgtacagagcgcaatcgtgagcgagctgcggcggctgcgatcgtgaagcagcttgagggaaaaatacggcgcgatgaaagaaaaaacggcgcgtcagaagacgataaaaaagcacttgaggcggcgcggacgaaggagaccgcagcggagggggggatgggtgaaatgaaggtgagcacccgccaactcacaacctactacgcgcttcccgctgagattgagctacacggacgcctcgtgattgaacgggcaaagccacgagacctagagctgttggagtatgcgctgagtgaattgagtcttgcgcctgttcttggtgcgcaatcggcacgaggatgcggcgagattgcgggaacctttgagttcacaaacgaagagggaaagctgatcaagaatgtggtggtaggcggttacagcgcagcaaatatcacgaatttctgagagtgaaaggttgttatttcaaagggaaatcatacggttacagagtatcgatcgcagctcctctgaatttgaggagctactgaaaccgaacaaacctcctatcctgctttcgcagcatcgcagctcctctgaatttgaggagctactgaaacttcgccgagatctggaatgcgggatacggtatcgcagctcctctgaatttgaggagctactgaaacatctcagcagcagcgcggacgatggctcggatcgcagctcctctgaatttgaggagctactgaaagggccagtcgtggcgggcagctatgcgtaccatcgcagctcctctgaatttgaggagctactgaaacaaccttgcgactgaccccgccatctggcatatcgcagctcctctgaatttgaggagctactgaaacagcggttccacggcattagggggagcaagtatcgcagctcctctgaatttgaggagctactgaaactgagcgacaacatcaccctgccccgcgctgagcgcagctcctctgaatttgaggagctactgaaacacaaggtagccgccgacggcggccacgacgatcgcagctcctctgaatttgaggagctattttctatagcgccactttaatgtggcgctttttttctgtaccgatagaatcagactatgtttcgttccgttgagcagtccaatttttctgcgcgccttgctgcgcatattcagcaggctgatgcgcctttactgcttgaaggaacaacggggcttggaaaaacaagagcctatctagctgcgctcaacaccgcgattcagcagggcaagcgtgtcgctatcgtcgttccaacgcacgcgctgatcgagcagcttcttgcttcttctgatctcgcgttgattgttccgtcgacagtcactcgcgcagcgttcaagcccaagtcgttctatccatcagctcaggagtttaaagacgcaaaagccttatcgcttgagtcgtcgctgatgatttgtactagctcttcagtgattgttgatcaacgcgccaagggcaactataacggcgtgactactcgcgactatattttatttgacgaagcggatcagctccctcagtacgctgctctgtctagagaccgagaaattcgtggcgcagaactcagggaactcggtgttcgaggctcgactacgaaagagatcgcggagcaggtgatcgcgcacaaaggtgcggaaacggagacccgcgccgcagcggtgatgatcttggaggctcttgatgagcctgcttggtatcacaacgcaggcaagaccgacgatggcgggattgcgctttttcacaaaatgccaggaaggctgcttaagaaagtcgctaaccgctctaatgtcgccttcatcagcgcaacgctctctattggggggaagttcgatgactttaatcgcgcaatgggcattggagagcagagtgcgctctcatcgatcatcgagcctgcgcatcacgggacgctgaaattctttcacgaaccgcacccagttctatcgcaagaatggctcaccgcgacaaccgaagcgatcaccaaggcgaaaaagccaacgcttgtggttacgccaagcaatgaattgtctcagaccttgggtgcgcttttccctgacgccattgttcgtgcggcagaggaaaagacttcagacgcgattttgcggctgacagacaagcagaacatcctgatcgcgtcagccgcgtgggcgggacttgacacgcccattgagtggaaaagcatcgtcattccgcgcattccgttcctgcgccctcaagtgatagacggcaatattgaaagcagcttctttgattcgcggaatagcgctatccgccgaatgcgtcaggtgattgggcgagggctcaggaaacctgaggcggagtgcgaggtgtacattttggatgaccgtttggcgatgattgagtcgttcattccaacgcgattcagagagttgtgggcgaatagacagcgtcttgtggggtcatcgtatgttgaagggcgtgactatgagaaaggcggaaggggagtagagcgtcatccgctggtcagaaaaaacgccctgaagcattttggtagacggtgtatgtcgtgtgacttcgttcccaaagtggacagtcagttagaggttcaccatttgttcccgcttgctgatggcggtgagcgggttacgaagattcaaaccgatgtggcggtgctttgcgccaactgtcaccgtttggcgcattcggcgtcgccgccgctgcctcttggggtcctgagaggacttcaccaagacggcgggttatcagggtagggtgaatacagcgagagggcggttccataagggttccgcaatcgaccccatacctgcgcttacctcacccctcaagccgccaatagccccttggacttgagcgtatggaaggctgtcccaacgccacaacgaagggtctgactgatcttcttgggtgacatacccttcttgtagagttcgacgatggcggctcgagtgctgtcagtcacgctagagggtcgaccgagtttcttcccttccttacgagcgcgttccacgcctaacttgatccgctcgcggatgaggtcgcgttcgaattcagcgaaggacgagaacacaccgaacatcagcttccctgaagggctcgtggtgtctaaagcctgttggtggaagtagagctgaacgcctgaagcgtgaagatcgttcacagtggtgacaaggtgctgtagagagcgtccaaggcggtcgatgctccaaacggcgatgaggtcgaactcacggcgagtggcggcttttaagagggcatcgagggcagggcgaccatcgcgacccttggctcctgagatcccatcgtcgcggtaagtagcgacgatgttccatcccctagcggcggcgacacgctcaagctcgtggagttggttgtcggcggtttggtgagcggtggagactcgaagatagagtgcggttttcatagcgacctcttgagctgtacaaatgtacagttattttacctgtcgagatcctaaaaactagcaatttactgaataaaaacagtcgtttacgaaggctgaggaccgtcgctatctcccgatttagccgccttggaactcctcttcgctctcttggcgagagggggttctttgccctccacccatgagtggagcttcctgcgggcttgctcggtcgtgaggtgcgcgccgtagaaccgctcgatgaccgcctgtgaggtacgggcattcttggcaagtccgatggagtcgacctcgctattcatcaagcggtacatgatcgcggtatggcgaaggctataaagcgtgaaccgcttgcccgttttcttatcgagtccgctttgctcgacgatgtagccgaagacgcgtcctagcgtgaccatcgcggtttcgcggttctcgaattgcggcatgaatacatagtcatcgggatcaataaacgctgaggatgtcagacctgcggcgagctcctcgcggcgaagttgtcgaagaccatcgtagtactcgaccgccgacggcatggtctgaacctctagggcggtagtcttggtcgcggggtgccgcagggtcagccactcggtctttactcgcgtcttgttattgatctcctcgcgacgcacgacatgcttgtgcttcagaacccgtaggtctgacggacgaataaacgagttgatcatgaagttcgcgaggtacttgaactcaagcgtgatgcgattgcctctgaactcagcgtgctcactggcgagtcgactgatcgtctttgatagcgttgagtattcgcccatcgtgaagtagtcacgcttttgctgcgtgattaacttatcgccaattttcgggaagaggggcagagcgtcgatcacgccgagctcaacgccatgcttgaacacttttcggatgacattgaggtaatgcttcttggtctgcggcgcgcgctttttctcgcggagcttgatgagaatgtcgttcaagtcgtgatgcgtgatttcgcctaggagcttgttaccgaagaactggtaaacgaagttctcgagttgactacggtcttttcggtagagcgatgctttgcccgtcgcttcttcgctagacagtaacgactctgcgaccgccttgaatgtctttggattcagcggacgctcgcccttggggtctgcgagatcctgaatgaagagatcccgtgcgagcgcgaatgcgacccgtttgtctttgctcttcgaagagcggatcacatatttcttggacttcgcgtagaagcggatccaccagaacggggaggcggggaccttataaacgatgacatgggaggggagccttggtacaggggatttcgaggcggggatggggttcgctcgcgtcaccgtaggctcccttaaaacggcgagataacttaagtactagtttagtacttagtgacaaaaaaggctgaaaaatagtgttttaatggtcagaaaaggggctcataatcccttggtccttggttcgaatccaagcgggcccagtcttcgagcgaagaccgattcgcagcgtatccgagatcatcgccacctcggaccaagcgtcaaactgcggatctgacgtccca

SEQ ID NO: 126 - DNA, 13905 bp, Artificial Sequence
  Synthetic Oligonucleotide
gcgtacagtccccacagatgggatcccgtcgagtgacactcagaaaacccttgactgattaggcggtgaaaggctttagcgccgccaatttctacatacttcccattcctcaactcgctgatctgtaccaagtcgtcgtccaacgagatcagatgagtgccttcaggatagtagttctgaatccaatttcgctgactcccgatattcttcaccccgactacaatccgcttaccgtaagggttgttcttgagacgctcgcgatacagcgcaggttcccgcttattctctagcgtctcatcagtgtaaatctgtggctttcctcgcttgcccttctcagcccaaagacgcttggtcgcctcatcggctacgaagatcgtgacgcgctttggatcaaccttgtatcgctccaacatcttgagagtgaaatgctcgatcattcctgatcgaccatagctcggaacggcgatttggaagttctcaattgcttcctcacgcgttttttgcgtttcaggaatgacgctgatgctgttggtgggtaggcgttgaatccgcttcagcaacttgccgttgagcggtgcgatagggttttggcgttgtgcgtgtcggaccagggaagggcgcgtgattttcttcttactgcccgctgcggcgtaactgtgaacttcatcggcgccgatatagcccaaggcggaaatggactgaaagagccaaaaggctgagccatcggtcgcagtgatttgccctgttctcgcgtgtgacgaggtcctgtgactccaaacacgaacggctgcgttgggtgttcttgcgccgaagatcaacgcggaaagtgacggcgaacgccaagacctgacagcttggctacaggcgagcgtgtaactcttatcgtcttgttgaatagtaaggctgtgcttattagcagtccacgcccacggctgatgtagtttcggaattggaacgggcttgctcagcgagcggtaagttcctactagctcgtagcgttgttggtaatcctcattgtttagagccttggcgcgacgaacatagtgcgccaaatgctcccgcagataggcgcgttcgctctggtaggtcagttcgatcgcttcgcacttgtgtggttgtccctcattggcgaaagtgccttcacggacttctgcgcgacgccaccctaggtcgtacagctccgcggttctgcttgggatattcggaaagtatcggtcggcgagcgacgaggcggagtcaataaatgcttgccgagtcctcttgagttgacctgcgactgttttcagctttctgtccttcggcgatatcgtggtaaacgccattcgctgaggggcttcaggtatccccgtcggtgcggcaatcagccatacagacctgccttcgtcccaatggcgtttgatccactcgtaagcatcgcgcgacagtttctcaatctcacggggtatggactgaattggtgctacggcttgaacattaaaccgattgttattgaatcgcgccgcaccgctttcgctcgtggtgtgactgatgccccagcgctcgccgtcgatgtctgaaagaaaaagactgtccaccaataccgcaccgtcatcggaagtgggtttctttttccccttctcaggaacttggtcttgtcgagccgtcttgagatgaagggctgagaaaactgcttctaaccccacgcgctctagacgactgggcggagcaagttccgccaagtattggtatctcgtttggtcgaacagggggtcgctttcccacttattcgtcaggtacagaagttcggcgttcagcagtttggcttttcgagcaactacgagcagagactcgccatgctttgctcttaagtttttccttaaatattcgtaccaagccttggactcccatcggcgcgcacgaaccttttcatgttcctccagtctctgttggtgcccgacgaaatcacggcgtaaattctcatacgaggctgtgccgctgaataggaaggactctctgacatagcacactaggctcattcgggtagcgtcacgatcacgatgcgtgatgggcgtgtttgaatgaaggtattcgtcgttttggacaaacagcagatctctcggcttcatcgccacttctgcgccgaactcagggagaatcagatgaccgccctcgtatcgtttgccgttacaaagaacgagtagattggagaagccttggcggaggttcccatcgtcacggtgtagagcggtttgaaagttggcgttaacagtcaccgtagtgaatacggtgtcggcgatgcgaaactctttagggatgcgatttacatactcttgctgaatcgcgtagcgctgcggcagcgctattttaaatgcgcgatcgatgcgctgaagtattgggacaactctgtcgtagtcatacggaaagtcggtgttccaattgcttcgtcgcgcccaagggttatttgcgtctcgcccactgttgccaatgacgctactcttgaccttgttcccataggttcgcttgctgatgttcgatctctcgaaagcggtcaccgcttcgcgccgtcgaatagttggcagtttcgccacccgtttccaccaagtgctccatgcggcttcgcggtatttcttttttccaccctcccaagttcttagccgattggggttctcgtcgcgggcttcggcttgagcctcacgaatcgcagcgagcagctttgacccagccgacgcatcgcttttaaggagttctagcgtggcttcctgatcgcggcgcacataggctttctcgcctttttcggtgtctaccgatccgctcgctttgccgcgattgtcagactttcgtacggcatgcttcagggacctatagagcagcatctcctcttcttggcttatgaattgaggtaggtagatagcagcaggattcgtcttgactgaaaaccatttcatcttgggggttcctagccgaggtgattgattttagacaacgatgggcgcaaagtcggttgaaacatttcaaccgtccttggaactgaaacaatgccgaaaaaggtcgccgttaagcgtgactactcgaggctaatcgctcagtttgcgtctgagggtagccgtcagctcgagaaaatcaaccaaaagcaccaagcctatgcggaagagatcatccgcttcgcggttctagtcaagagttggaatgaccaggctcttgaggaggatgagggcgaagagggtgactgctacaaggcggttggggcgtggtttaaggattgggcagccgagaatatcggcgacaaatatcagctctaccattggaacaagatcgctagtgccgcgacggtgttgagttcgccgaagattctgccccacctcccgcacaccaagatggcgcttgttcatctcgccaagaagacaaaaggcgacaagagtagcgatattgagcgtttcacgaattggatcgccaaggggcagctcagttcggaaacgacagtcagcgaagccaagaaactcggagtcaaggttccgaaacaaaccaacccgtctgagggaaaaacatcgcgattggtcgcagacgctaagaggactacaaccgcttttcggaagaatggtgtcgttcttgatgttcccctgagttcggtgagtcgtcagttccccgatagagatctctttacaaagggtcttacggtagcaatcttgggtagcgagaccgacgaagcgtcgggggttgaaaagttggttttactcactgtggtcaacagcgaaaccgcgctcgccgatgtactcgatagcctcaaggactagggttccaataagggtgggcgagaagaccccgcaagtagttgattcttggtgcgacgcgaaggggtttttcagcgttccacaagtagtagatttggtttaggcaccgtacgataaagaataaaaattttgtcaccaagcgtatctctaggattaggaggttcccgatgttcggaatcacagtgattgagcgcaggcttcgcgatgagcgtgatgacgagtgacgcaatagcaatggcgcgtgttggaggatctatgcgtagttatattctcgtaacaataaactccctaatcctaatatctcttgccgcttgtggcactcaggagtccgtctctccgccgaaacttgaggcggctgaaaacagcgataagccatcgacggaaactactagctcttcgacgaatacttgcgatggcttatcaggcgccaagtacaacgattgcgttgtaaagaattctcccgatactgcggcagcgatcctaacgcctagcgttacgtcaaaatggaatgtggttgagaataaagacgagatgactggggcatcagaggtcgtatccgtttacggcgagggcgatacggagcaaacgcaactagtacttcgatgtaacgataaaaaaatactgcttttcgaggtagtcattggaaatggcgaccttgttgatcaaaccgaacagcaggtgcgctcgactaatatatggaatgacgacgcgccaaaatattgggaagccgtcgtatactcggctgcacgaataaaaatgtctgaaaatgatggcgttgcgaatattatgcttcgtgaaagtaatgagtttagtaatcagtatatttggggattgcaaataacaagcgaaaacaaggcgttgataaatctaagcactttcatgcttgaaatgacgcttagtaatggccaaaaaagattaataaaaggggatgcggtagtcggagactggttcgagaagttctgtactactccagagagcgaacttccttagtgtaaagctccgacggctcaggatcgttttgttaccgctcggtgtgcttcagcttgaggtacatattcctgcgtttgtttcacatgaactcgcggagggacgtcaggtccgtttgctcttctctgccacaatccaagcatggtcgctctgaagcagtgcttttcgctgtcgctcgctgagggtccgagcgtcgtagacctcaaggtcgcgggagtggcgccgaaaggtttccatcaatgccttggtttctgtggaggtgagtggcttgccaggcttcatcaggcaactcttgctctgagcagctcagccgcttgtgggttggtgtagatggcaatttcgagctctttggcggcttcacggcagaactcaccgtcagtcattcccacaaactcagcagctttgcgaatgcggctcttgaggtcgttggtggtgcggaaggcaatttgttcattcttgatcagcgtgtgttgtcttggcatttgtcaggctccatcaggtgcgttgtcgactatttagcgtgtagggcgagggcaaggcggtagaggtgagtgggtctcactcgaacaggtgcgcaaggttgtggcgaacgggttccgcagccgcagaaggcgactgaggagcactggttgaaacagttccaccgcgtggcacctcaatacccacattgatttcattcgtatcagcgtcgcgccaagcgcagaagaacaactcaggctcagcatttccgcggttgaactcgcgagcgatgtgcgccgcaattcgccaatcgagcttttcgacgcctcggtgtttcgcatagtgcgtgggtgatccccgtttgggactgtcagactgcgacggcacgagtgaaataaagtagtgactattgttgtttttgctcattgttgaaagatctcgttttggctaaagcactgcttctatttagcgtttctgtgcttttcgaattttgcgtatctcagccaattgctcaccgcgtcgcctccgcaatcgttgtgagtggtaagttcagagggagtgtttgcgattcgagtcacctcgaaccgtttgactcgagttggtctgatattgcgttcgttgcgtgaccaagagcgcagagtgtttgtgagacgcttgttcagcgacccattcacccacaccttgtgcgcgtaatctttcttgatacaaacgattccgtgaaaatgaatcgttggctcatagtgaagagagtacttagacgcgattaggtaatgccgcttgctcttaggtagaaactgctgaaacgcttggagtagaaacttgctccatagctcgtggaagtcttgggttctagagtattggtttccttggtcatcattcggcactagcgttaccaatgtgacggcgagtaaaagatgaccgttctcagagtggtttgtgaactctctgatgtcagactccagggtgtcattagtgctagaaggtttagatccttcaggtaagtttgtaaggttctcttttgctctgcgtcttggaccaaaaccaagtaatccattggctagttcctctttatgtcgtgactcatacgcttgcttgtcttgggtctctttgactttccaccaaattaagcagtagtagaggaatagtgtttgtagcgttggatctgtcagtctcatcggtcgttctcagtgtttcttgggcaatagttagtcaattgggctcagcaccctcgttgtaaaactgaatacacgctaacgagcttcttgggggtggttgttcttttgccaccaagagtcagttagcctgagcactcccacaggactatttcggtgtacctgtgggttgaaccttcagaggagacgacaccctatctcccatagatatatataaaaaaaagcactgaaaacgccctactgaacgctttttttcgaaaaaagtttcgcttgttcttgccgtcagatagcagagggtcaatttctgacactgcgacctgtcagaggattgtcagggctgcgtaaaagcaatagggtgggcggatatggatcgctttgctgtcacgctgcgtctcgcctcccccttggttacgggtgggggctatatgacgctagacgcactcctggcggcggtactatttgattcaggggaaaccgtcgaggctgctcacgcgaaagtgcctctcaagaatactcaagggctttggcacggaagtgccgctgtttacgaaactcttgaagtgggacgccaagcgttcgttgccaatctgcgtgccactcacgatctgactcctgaccttatcgccaagaacaagcacggagcactccacgcaaaaatcagtttaggacgccgtcgtgacttcggacctgtaatgaatgggtaccaatacttggtggcggagtcgttgacgtggtacggcgagggggactcagccgccgtagaacgcttgctccgcaccgtgagatttattggaaaacgtcgagcgagtggctttggtgaggtgagcggggtcgaaatgtcgccgtctgatgtggatggtgtagtgggaatgcttggcgatcccttgcgtcctgttcccttagagctattcacgggggacaagagcgcgatacgaggtgacgctgcgtggaaacctgcctattggcgtcctgagaatcgtgcgatttgttatttaccgtcacaaaactaaatgaatacttacgaattttttatggagcactttgggcgtcatctcattgacgcagaggggctgaccgcagcacagggaacagagaaagcgctgagtagcaactacactacgctgaagggaactcctagtcgtcttcagtctggttgggcagttgttcgccctggtgtttcttctcttcaattgaagattaccgctaaaggtattgcttacgacaaccgcactgcgatggaagcatttatagacgagctgaccacgtgggacggcgactcgccaaggatattccttcaatttgagaaggcacccgtcccgatatctaatctctttatcacggttgatcgtcggttgattcgtatttgttcgccaaaaggcgtcgcatcgtttgatatgaacgtggaccctgactcctccgccacgattgttcaacgcgcaatttggaagcggttgccaaaatgatttgcgactacaccatttctaaacctgagagcctcggtctgtacgcggtccatcggtttgtcgcgcagctttgtgatggtgtgccgtgcctgtttgtggatcgtggtgatcgcgtggtgattcgtaccgccaagcctttgtgtgatcgcgtgacagaggtttccgtgccttccgtgggcgatgtgattgcgttttccttgcgatctgccgtgtcgaagcgtcaaaaaggcaagaatgtctatgcgccacttaacgattggcgagcgcgtcaccaatggctagagaagcgtgccgtaaagaatggctttgcgcttcttgcgcttcacgcaacaagcaagagcgtgaaagtagagcgcgagggcggtcagtactttcaaatggattcaaccgattttacaggggtgctcaaggtgaccgatgagcagctctttgtggcgtgtctgactcgcggaattgggcgggtgggcaagccttacggaatgggaatgctcgtaatctagcaacggtttggaggctttatggctaacagagtgattgtcaaagtgacgctacggaccaagggaccgttgtcgctcaagatgcctgtggcggaaggtgctcgtgaaaacgagtttgataactttcctgtgatgacgcgaggagtagacgcggagggagccaagcagcgtacaggctatcttcctgcgactactattcgtggatttttgcgaagggcggtcacgctgaagcgaatgcgagatgccgcagcgcaaggcaagccctacaggttgccgcaaatttataatgaaatgatcggtcaagacgccgagagcgagaagaaagcagaggaaatcgatttaatcgaaattcagaaagcacgcgacagcagtcctgtcgtggatctgtttggatcaggactcaatgtgaagtcacggctcttggtgagtcacttttgccctgcgctcaatattcttcctgaggcgttcacaggtgttcgtaaggacattgacgatacagaagacgccttagagttgatggaccctaaagagatggaagggttcgtgcggcgtacagagcgcaatcgtgagcgagctgcggcggctgcgatcgtgaagcagcttgagggaaaaatacggcgcgatgaaagaaaaaacggcgcgtcagaagacgataaaaaagcacttgaggcggcgcggacgaaggagaccgcagcggagggggggatgggtgaaatgaaggtgagcacccgccaactcacaacctactacgcgcttcccgctgagattgagctacacggacgcctcgtgattgaacgggcaaagccacgagacctagagctgttggagtatgcgctgagtgaattgagtcttgcgcctgttcttggtgcgcaatcggcacgaggatgcggcgagattgcgggaacctttgagttcacaaacgaagagggaaagctgatcaagaatgtggtggtaggcggttacagcgcagcaaatatcacgaatttctgagagtgaaaggttgttatttcaaagggaaatcatacggttacagagtatcgatcgcagctcctctgaatttgaggagctactgaaaccgaacaaacctcctatcctgctttcgcagcatcgcagctcctctgaatttgaggagctactgaaacttcgccgagatctggaatgcgggatacggtatcgcagctcctctgaatttgaggagctactgaaacatctcagcagcagcgcggacgatggctcggatcgcagctcctctgaatttgaggagctactgaaagggccagtcgtggcgggcagctatgcgtaccatcgcagctcctctgaatttgaggagctactgaaacaaccttgcgactgaccccgccatctggcatatcgcagctcctctgaatttgaggagctactgaaacagcggttccacggcattagggggagcaagtatcgcagctcctctgaatttgaggagctactgaaactgagcgacaacatcaccctgccccgcgctgagcgcagctcctctgaatttgaggagctactgaaacacaaggtagccgccgacggcggccacgacgatcgcagctcctctgaatttgaggagctattttctatagcgccactttaatgtggcgctttttttctgtaccgatagaatcagactatgtttcgttccgttgagcagtccaatttttctgcgcgccttgctgcgcatattcagcaggctgatgcgcctttactgcttgaaggaacaacggggcttggaaaaacaagagcctatctagctgcgctcaacaccgcgattcagcagggcaagcgtgtcgctatcgtcgttccaacgcacgcgctgatcgagcagcttcttgcttcttctgatctcgcgttgattgttccgtcgacagtcactcgcgcagcgttcaagcccaagtcgttctatccatcagctcaggagtttaaagacgcaaaagccttatcgcttgagtcgtcgctgatgatttgtactagctcttcagtgattgttgatcaacgcgccaagggcaactataacggcgtgactactcgcgactatattttatttgacgaagcggatcagctccctcagtacgctgctctgtctagagaccgagaaattcgtggcgcagaactcagggaactcggtgttcgaggctcgactacgaaagagatcgcggagcaggtgatcgcgcacaaaggtgcggaaacggagacccgcgccgcagcggtgatgatcttggaggctcttgatgagcctgcttggtatcacaacgcaggcaagaccgacgatggcgggattgcgctttttcacaaaatgccaggaaggctgcttaagaaagtcgctaaccgctctaatgtcgccttcatcagcgcaacgctctctattggggggaagttcgatgactttaatcgcgcaatgggcattggagagcagagtgcgctctcatcgatcatcgagcctgcgcatcacgggacgctgaaattctttcacgaaccgcacccagttctatcgcaagaatggctcaccgcgacaaccgaagcgatcaccaaggcgaaaaagccaacgcttgtggttacgccaagcaatgaattgtctcagaccttgggtgcgcttttccctgacgccattgttcgtgcggcagaggaaaagacttcagacgcgattttgcggctgacagacaagcagaacatcctgatcgcgtcagccgcgtgggcgggacttgacacgcccattgagtggaaaagcatcgtcattccgcgcattccgttcctgcgccctcaagtgatagacggcaatattgaaagcagcttctttgattcgcggaatagcgctatccgccgaatgcgtcaggtgattgggcgagggctcaggaaacctgaggcggagtgcgaggtgtacattttggatgaccgtttggcgatgattgagtcgttcattccaacgcgattcagagagttgtgggcgaatagacagcgtcttgtggggtcatcgtatgttgaagggcgtgactatgagaaaggcggaaggggagtagagcgtcatccgctggtcagaaaaaacgccctgaagcattttggtagacggtgtatgtcgtgtgacttcgttcccaaagtggacagtcagttagaggttcaccatttgttcccgcttgctgatggcggtgagcgggttacgaagattcaaaccgatgtggcggtgctttgcgccaactgtcaccgtttggcgcattcggcgtcgccgccgctgcctcttggggtcctgagaggacttcaccaagacggcgggttatcagggtagggtgaatacagcgagagggcggttccataagggttccgcaatcgaccccatacctgcgcttacctcacccctcaagccgccaatagccccttggacttgagcgtatggaaggctgtcccaacgccacaacgaagggtctgactgatcttcttgggtgacatacccttcttgtagagttcgacgatggcggctcgagtgctgtcagtcacgctagagggtcgaccgagtttcttcccttccttacgagcgcgttccacgcctaacttgatccgctcgcggatgaggtcgcgttcgaattcagcgaaggacgagaacacaccgaacatcagcttccctgaagggctcgtggtgtctaaagcctgttggtggaagtagagctgaacgcctgaagcgtgaagatcgttcacagtggtgacaaggtgctgtagagagcgtccaaggcggtcgatgctccaaacggcgatgaggtcgaactcacggcgagtggcggcttttaagagggcatcgagggcagggcgaccatcgcgacccttggctcctgagatcccatcgtcgcggtaagtagcgacgatgttccatcccctagcggcggcgacacgctcaagctcgtggagttggttgtcggcggtttggtgagcggtggagactcgaagatagagtgcggttttcatagcgacctcttgagctgtacaaatgtacagttattttacctgtcgagatcctaaaaactagcaatttactgaataaaaacagtcgtttacgaaggctgaggaccgtcgctatctcccgatttagccgccttggaactcctcttcgctctcttggcgagagggggttctttgccctccacccatgagtggagcttcctgcgggcttgctcggtcgtgaggtgcgcgccgtagaaccgctcgatgaccgcctgtgaggtacgggcattcttggcaagtccgatggagtcgacctcgctattcatcaagcggtacatgatcgcggtatggcgaaggctataaagcgtgaaccgcttgcccgttttcttatcgagtccgctttgctcgacgatgtagccgaagacgcgtcctagcgtgaccatcgcggtttcgcggttctcgaattgcggcatgaatacatagtcatcgggatcaataaacgctgaggatgtcagacctgcggcgagctcctcgcggcgaagttgtcgaagaccatcgtagtactcgaccgccgacggcatggtctgaacctctagggcggtagtcttggtcgcggggtgccgcagggtcagccactcggtctttactcgcgtcttgttattgatctcctcgcgacgcacgacatgcttgtgcttcagaacccgtaggtctgacggacgaataaacgagttgatcatgaagttcgcgaggtacttgaactcaagcgtgatgcgattgcctctgaactcagcgtgctcactggcgagtcgactgatcgtctttgatagcgttgagtattcgcccatcgtgaagtagtcacgcttttgctgcgtgattaacttatcgccaattttcgggaagaggggcagagcgtcgatcacgccgagctcaacgccatgcttgaacacttttcggatgacattgaggtaatgcttcttggtctgcggcgcgcgctttttctcgcggagcttgatgagaatgtcgttcaagtcgtgatgcgtgatttcgcctaggagcttgttaccgaagaactggtaaacgaagttctcgagttgactacggtcttttcggtagagcgatgctttgcccgtcgcttcttcgctagacagtaacgactctgcgaccgccttgaatgtctttggattcagcggacgctcgcccttggggtctgcgagatcctgtatgaagagatcccgtgcgagcgcgaatgcgacccgtttgtctttgctcttcgaagagcggatcacatatttcttggacttcgcgtagaagcggatccaccagaacggggaggcggggaccttataaacgatgacatgggaggggagccttggtacaggggatttcgaggcggggatggggttcgctcgcgtcaccgtaggctcccttaaaacggcgagataacttaagtactagtttagtacttagtgacaaaaaaggctgaaaaatagtgttttaatggtcagaaaaggggctcataatcccttggtccttggttcgaatccaagcgggcccagtcttcgagcgaagaccgattcgcagcgtatccgagatcatcgccacctcggaccaa

SEQ ID NO: 127 - DNA, 13864 bp, Artificial Sequence
  Synthetic Oligonucleotide
  misc_feature (1)..(9997): n is a, c, g, or t
nnnnnnnnnnnnnnnnnnnnnnnnnnnnnnnnnnnnnnnnnnnnnnnnnnnnnnnnnnnnnnnnnnnnnnnnnnnnnnnnnnnnnnnnnnnnnnnnnnnnnnnnnnnnnnnnnnnnnnnnnnnnnnnnnnnnnnnnnnnnnnnnnnnnnnnnnnnnnnnnnnnnnnnnnnnnnnnnnnnnnnnnnnnnnnnnnnnnnnnnnnnnnnnnnnnnnnnnnnnnnnnnnnnnnnnnnnnnnnnnnnnnnnnnnnnnnnnnnnnnnnnnnnnnnnnnnnnnnnnnnnnnnnnnnnnnnnnnnnnnnnnnnnnnnnnnnnnnnnnnnnnnnnnnnnnnnnnnnnnnnnnnnnnnnnnnnnnnnnnnnnnnnnnnnnnnnnnnnnnnnnnnnnnnnnnnnnnnnnnnnnnnnnnnnnnnnnnnnnnnnnnnnnnnnnnnnnnnnnnnnnnnnnnnnnnnnnnnnnnnnnnnnnnnnnnnnnnnnnnnnnnnnnnnnnnnnnnnnnnnnnnnnnnnnnnnnnnnnnnnnnnnnnnnnnnnnnnnnnnnnnnnnnnnnnnnnnnnnnnnnnnnnnnnnnnnnnnnnnnnnnnnnnnnnnnnnnnnnnnnnnnnnnnnnnnnnnnnnnnnnnnnnnnnnnnnnnnnnnnnnnnnnnnnnnnnnnnnnnnnnnnnnnnnnnnnnnnnnnnnnnnnnnnnnnnnnnnnnnnnnnnnnnnnnnnnnnnnnnnnnnnnnnnnnnnnnnnnnnnnnnnnnnnnnnnnnnnnnnnnnnnnnnnnnnnnnnnnnnnnnnnnnnnnnnnnnnnnnnnnnnnnnnnnnnnnnnnnnnnnnnnnnnnnnnnnnnnnnnnnnnnnnnnnnnnnnnnnnnnnnnnnnnnnnnnnnnnnnnnnnnnnnnnnnnnnnnnnnnnnnnnnnnnnnnnnnnnnnnnnnnnnnnnnnnnnnnnnnnnnnnnnnnnnnnnnnnnnnnnnnnnnnnnnnnnnnnnnnnnnnnnnnnnnnnnnnnnnnnnnnnnnnnnnnnnnnnnnnnnnnnnnnnnnnnnnnnnnnnnnnnnnnnnnnnnnnnnnnnnnnnnnnnnnnnnnnnnnnnnnnnnnnnnnnnnnnnnnnnnnnnnnnnnnnnnnnnnnnnnnnnnnnnnnnnnnnnnnnnnnnnnnnnnnnnnnnnnnnnnnnnnnnnnnnnnnnnnnnnnnnnnnnnnnnnnnnnnnnnnnnnnnnnnnnnnnnnnnnnnnnnnnnnnnnnnnnnnnnnnnnnnnnnnnnnnnnnnnnnnnnnnnnnnnnnnnnnnnnnnnnnnnnnnnnnnnnnnnnnnnnnnnnnnnnnnnnnnnnnnnnnnnnnnnnnnnnnnnnnnnnnnnnnnnnnnnnnnnnnnnnnnnnnnnnnnnnnnnnnnnnnnnnnnnnnnnnnnnnnnnnnnnnnnnnnnnnnnnnnnnnnnnnnnnnnnnnnnnnnnnnnnnnnnnnnnnnnnnnnnnnnnnnnnnnnnnnnnnnnnnnnnnnnnnnnnnnnnnnnnnnnnnnnnnnnnnnnnnnnnnnnnnnnnnnnnnnnnnnnnnnnnnnnnnnnnnnnnnnnnnnnnnnnnnnnnnnnnnnnnnnnnnnnnnnnnnnnnnnnnnnnnnnnnnnnnnnnnnnnnnnnnnnnnnnnnnnnnnnnnnnnnnnnnnnnnnnnnnnnnnnnnnnnnnnnnnnnnnnnnnnnnnnnnnnnnnnnnnnnnnnnnnnnnnnnnnnnnnnnnnnnnnnnnnnnnnnnnnnnnnnnnnnnnnnnnnnnnnnnnnnnnnnnnnnnnnnnnnnnnnnnnnnnnnnnnnnnnnnnnnnnnnnnnnnnnnnnnnnnnnnnnnnnnnnnnnnnnnnnnnnnnnnnnnnnnnnnnnnnnnnnnnnnnnnnnnnnnnnnnnnnnnnnnnnnnnnnnnnnnnnnnnnnnnnnnnnnnnnnnnnnnnnnnnnnnnnnnnnnnnnnnnnnnnnnnnnnnnnnnnnnnnnnnnnnnnnnnnnnnnnnnnnnnnnnnnnnnnnnnnnnnnnnnnnnnnnnnnnnnnnnnnnnnnnnnnnnnnnnnnnnnnnnnnnnnnnnnnnnnnnnnnnnnnnnnnnnnnnnnnnnnnnnnnnnnnnnnnnnnnnnnnnnnnnnnnnnnnnnnnnnnnnnnnnnnnnnnnnnnnnnnnnnnnnnnnnnnnnnnnnnnnnnnnnnnnnnnnnnnnnnnnnnnnnnnnnnnnnnnnnnnnnnnnnnnnnnnnnnnnnnnnnnnnnnnnnnnnnnnnnnnnnnnnnnnnnnnnnnnnnnnnnnnnnnnnnnnnnnnnnnnnnnnnnnnnnnnnnnnnnnnnnnnnnnnnnnnnnnnnnnnnnnnnnnnnnnnnnnnnnnnnnnnnnnnnnnnnnnnnnnnnnnnnnnnnnnnnnnnnnnnnnnnnnnnnnnnnnnnnnnnnnnnnnnnnnnnnnnnnnnnnnnnnnnnnnnnnnnnnnnnnnnnnnnnnnnnnnnnnnnnnnnnnnnnnnnnnnnnnnnnnnnnnnnnnnnnnnnnnnnnnnnnnnnnnnnnnnnnnnnnnnnnnnnnnnnnnnnnnnnnnnnnnnnnnnnnnnnnnnnnnnnnnnnnnnnnnnnnnnnnnnnnnnnnnnnnnnnnnnnnnnnnnnnnnnnnnnnnnnnnnnnnnnnnnnnnnnnnnnnnnnnnnnnnnnnnnnnnnnnnnnnnnnnnnnnnnnnnnnnnnnnnnnnnnnnnnnnnnnnnnnnnnnnnnnnnnnnnnnnnnnnnnnnnnnnnnnnnnnnnnnnnnnnnnnnnnnnnnnnnnnnnnnnnnnnnnnnnnnnnnnnnnnnnnnnnnnnnnnnnnnnnnnnnnnnnnnnnnnnnnnnnnnnnnnnnnnnnnnnnnnnnnnnnnnnnnnnnnnnnnnnnnnnnnnnnnnnnnnnnnnnnnnnnnnnnnnnnnnnnnnnnnnnnnnnnnnnnnnnnnnnnnnnnnnnnnnnnnnnnnnnnnnnnnnnnnnnnnnnnnnnnnnnnnnnnnnnnnnnnnnnnnnnnnnnnnnnnnnnnnnnnnnnnnnnnnnnnnnnnnnnnnnnnnnnnnnnnnnnnnnnnnnnnnnnnnnnnnnnnnnnnnnnnnnnnnnnnnnnnnnnnnnnnnnnnnnnnnnnnnnnnnnnnnnnnnnnnnnnnnnnnnnnnnnnnnnnnnnnnnnnnnnnnnnnnnnnnnnnnnnnnnnnnnnnnnnnnnnnnnnnnnnnnnnnnnnnnnnnnnnnnnnnnnnnnnnnnnnnnnnnnnnnnnnnnnnnnnnnnnnnnnnnnnnnnnnnnnnnnnnnnnnnnnnnnnnnnnnnnnnnnnnnnnnnnnnnnnnnnnnnnnnnnnnnnnnnnnnnnnnnnnnnnnnnnnnnnnnnnnnnnnnnnnnnnnnnnnnnnnnnnnnnnnnnnnnnnnnnnnnnnnnnnnnnnnnnnnnnnnnnnnnnnnnnnnnnnnnnnnnnnnnnnnnnnnnnnnnnnnnnnnnnnnnnnnnnnnnnnnnnnnnnnnnnnnnnnnnnnnnnnnnnnnnnnnnnnnnnnnnnnnnnnnnnnnnnnnnnnnnnnnnnnnnnnnnnnnnnnnnnnnnnnnnnnnnnnnnnnnnnnnnnnnnnnnnnnnnnnnnnnnnnnnnnnnnnnnnnnnnnnnnnnnnnnnnnnnnnnnnnnnnnnnnnnnnnnnnnnnnnnnnnnnnnnnnnnnnnnnnnnnnnnnnnnnnnnnnnnnnnnnnnnnnnnnnnnnnnnnnnnnnnnnnnnnnnnnnnnnnnnnnnnnnnnnnnnnnnnnnnnnnnnnnnnnnnnnnnnnnnnnnnnnnnnnnnnnnnnnnnnnnnnnnnnnnnnnnnnnnnnnnnnnnnnnnnnnnnnnnnnnnnnnnnnnnnnnnnnnnnnnnnnnnnnnnnnnnnnnnnnnnnnnnnnnnnnnnnnnnnnnnnnnnnnnnnnnnnnnnnnnnnnnnnnnnnnnnnnnnnnnnnnnnnnnnnnnnnnnnnnnnnnnnnnnnnnnnnnnnnnnnnnnnnnnnnnnnnnnnnnnnnnnnnnnnnnnnnnnnnnnnnnnnnnnnnnnnnnnnnnnnnnnnnnnnnnnnnnnnnnnnnnnnnnnnnnnnnnnnnnnnnnnnnnnnnnnnnnnnnnnnnnnnnnnnnnnnnnnnnnnnnnnnnnnnnnnnnnnnnnnnnnnnnnnnnnnnnnnnnnnnnnnnnnnnnnnnnnnnnnnnnnnnnnnnnnnnnnnnnnnnnnnnnnnnnnnnnnnnnnnnnnnnnnnnnnnnnnnnnnnnnnnnnnnnnnnnnnnnnnnnnnnnnnnnnnnnnnnnnnnnnnnnnnnnnnnnnnnnnnnnnnnnnnnnnnnnnnnnnnnnnnnnnnnnnnnnnnnnnnnnnnnnnnnnnnnnnnnnnnnnnnnnnnnnnnnnnnnnnnnnnnnnnnnnnnnnnnnnnnnnnnnnnnnnnnnnnnnnnnnnnnnnnnnnnnnnnnnnnnnnnnnnnnnnnnnnnnnnnnnnnnnnnnnnnnnnnnnnnnnnnnnnnnnnnnnnnnnnnnnnnnnnnnnnnnnnnnnnnnnnnnnnnnnnnnnnnnnnnnnnnnnnnnnnnnnnnnnnnnnnnnnnnnnnnnnnnnnnnnnnnnnnnnnnnnnnnnnnnnnnnnnnnnnnnnnnnnnnnnnnnnnnnnnnnnnnnnnnnnnnnnnnnnnnnnnnnnnnnnnnnnnnnnnnnnnnnnnnnnnnnnnnnnnnnnnnnnnnnnnnnnnnnnnnnnnnnnnnnnnnnnnnnnnnnnnnnnnnnnnnnnnnnnnnnnnnnnnnnnnnnnnnnnnnnnnnnnnnnnnnnnnnnnnnnnnnnnnnnnnnnnnnnnnnnnnnnnnnnnnnnnnnnnnnnnnnnnnnnnnnnnnnnnnnnnnnnnnnnnnnnnnnnnnnnnnnnnnnnnnnnnnnnnnnnnnnnnnnnnnnnnnnnnnnnnnnnnnnnnnnnnnnnnnnnnnnnnnnnnnnnnnnnnnnnnnnnnnnnnnnnnnnnnnnnnnnnnnnnnnnnnnnnnnnnnnnnnnnnnnnnnnnnnnnnnnnnnnnnnnnnnnnnnnnnnnnnnnnnnnnnnnnnnnnnnnnnnnnnnnnnnnnnnnnnnnnnnnnnnnnnnnnnnnnnnnnnnnnnnnnnnnnnnnnnnnnnnnnnnnnnnnnnnnnnnnnnnnnnnnnnnnnnnnnnnnnnnnnnnnnnnnnnnnnnnnnnnnnnnnnnnnnnnnnnnnnnnnnnnnnnnnnnnnnnnnnnnnnnnnnnnnnnnnnnnnnnnnnnnnnnnnnnnnnnnnnnnnnnnnnnnnnnnnnnnnnnnnnnnnnnnnnnnnnnnnnnnnnnnnnnnnnnnnnnnnnnnnnnnnnnnnnnnnnnnnnnnnnnnnnnnnnnnnnnnnnnnnnnnnnnnnnnnnnnnnnnnnnnnnnnnnnnnnnnnnnnnnnnnnnnnnnnnnnnnnnnnnnnnnnnnnnnnnnnnnnnnnnnnnnnnnnnnnnnnnnnnnnnnnnnnnnnnnnnnnnnnnnnnnnnnnnnnnnnnnnnnnnnnnnnnnnnnnnnnnnnnnnnnnnnnnnnnnnnnnnnnnnnnnnnnnnnnnnnnnnnnnnnnnnnnnnnnnnnnnnnnnnnnnnnnnnnnnnnnnnnnnnnnnnnnnnnnnnnnnnnnnnnnnnnnnnnnnnnnnnnnnnnnnnnnnnnnnnnnnnnnnnnnnnnnnnnnnnnnnnnnnnnnnnnnnnnnnnnnnnnnnnnnnnnnnnnnnnnnnnnnnnnnnnnnnnnnnnnnnnnnnnnnnnnnnnnnnnnnnnnnnnnnnnnnnnnnnnnnnnnnnnnnnnnnnnnnnnnnnnnnnnnnnnnnnnnnnnnnnnnnnnnnnnnnnnnnnnnnnnnnnnnnnnnnnnnnnnnnnnnnnnnnnnnnnnnnnnnnnnnnnnnnnnnnnnnnnnnnnnnnnnnnnnnnnnnnnnnnnnnnnnnnnnnnnnnnnnnnnnnnnnnnnnnnnnnnnnnnnnnnnnnnnnnnnnnnnnnnnnnnnnnnnnnnnnnnnnnnnnnnnnnnnnnnnnnnnnnnnnnnnnnnnnnnnnnnnnnnnnnnnnnnnnnnnnnnnnnnnnnnnnnnnnnnnnnnnnnnnnnnnnnnnnnnnnnnnnnnnnnnnnnnnnnnnnnnnnnnnnnnnnnnnnnnnnnnnnnnnnnnnnnnnnnnnnnnnnnnnnnnnnnnnnnnnnnnnnnnnnnnnnnnnnnnnnnnnnnnnnnnnnnnnnnnnnnnnnnnnnnnnnnnnnnnnnnnnnnnnnnnnnnnnnnnnnnnnnnnnnnnnnnnnnnnnnnnnnnnnnnnnnnnnnnnnnnnnnnnnnnnnnnnnnnnnnnnnnnnnnnnnnnnnnnnnnnnnnnnnnnnnnnnnnnnnnnnnnnnnnnnnnnnnnnnnnnnnnnnnnnnnnnnnnnnnnnnnnnnnnnnnnnnnnnnnnnnnnnnnnnnnnnnnnnnnnnnnnnnnnnnnnnnnnnnnnnnnnnnnnnnnnnnnnnnnnnnnnnnnnnnnnnnnnnnnnnnnnnnnnnnnnnnnnnnnnnnnnnnnnnnnnnnnnnnnnnnnnnnnnnnnnnnnnnnnnnnnnnnnnnnnnnnnnnnnnnnnnnnnnnnnnnnnnnnnnnnnnnnnnnnnnnnnnnnnnnnnnnnnnnnnnnnnnnnnnnnnnnnnnnnnnnnnnnnnnnnnnnnnnnnnnnnnnnnnnnnnnnnnnnnnnnnnnnnnnnnnnnnnnnnnnnnnnnnnnnnnnnnnnnnnnnnnnnnnnnnnnnnnnnnnnnnnnnnnnnnnnnnnnnnnnnnnnnnnnnnnnnnnnnnnnnnnnnnnnnnnnnnnnnnnnnnnnnnnnnnnnnnnnnnnnnnnnnnnnnnnnnnnnnnnnnnnnnnnnnnnnnnnnnnnnnnnnnnnnnnnnnnnnnnnnnnnnnnnnnnnnnnnnnnnnnnnnnnnnnnnnnnnnnnnnnnnnnnnnnnnnnnnnnnnnnnnnnnnnnnnnnnnnnnnnnnnnnnnnnnnnnnnnnnnnnnnnnnnnnnnnnnnnnnnnnnnnnnnnnnnnnnnnnnnnnnnnnnnnnnnnnnnnnnnnnnnnnnnnnnnnnnnnnnnnnnnnnnnnnnnnnnnnnnnnnnnnnnnnnnnnnnnnnnnnnnnnnnnnnnnnnnnnnnnnnnnnnnnnnnnnnnnnnnnnnnnnnnnnnnnnnnnnnnnnnnnnnnnnnnnnnnnnnnnnnnnnnnnnnnnnnnnnnnnnnnnnnnnnnnnnnnnnnnnnnnnnnnnnnnnnnnnnnnnnnnnnnnnnnnnnnnnnnnnnnnnnnnnnnnnnnnnnnnnnnnnnnnnnnnnnnnnnnnnnnnnnnnnnnnnnnnnnnnnnnnnnnnnnnnnnnnnnnnnnnnnnnnnnnnnnnnnnnnnnnnnnnnnnnnnnnnnnnnnnnnnnnnnnnnnnnnnnnnnnnnnnnnnnnnnnnnnnnnnnnnnnnnnnnnnnnnnnnnnnnnnnnnnnnnnnnnnnnnnnnnnnnnnnnnnnnnnnnnnnnnnnnnnnnnnnnnnnnnnnnnnnnnnnnnnnnnnnnnnnnnnnnnnnnnnnnnnnnnnnnnnnnnnnnnnnnnnnnnnnnnnnnnnnnnnnnnnnnnnnnnnnnnnnnnnnnnnnnnnnnnnnnnnnnnnnnnnnnnnnnnnnnnnnnnnnnnnnnnnnnnnnnnnnnnnnnnnnnnnnnnnnnnnnnnnnnnnnnnnnnnnnnnnnnnnnnnnnnnnnnnnnnnnnnnnnnnnnnnnnnnnnnnnnnnnnnnnnnnnnnnnnnnnnnnnnnnnnnnnnnnnnnnnnnnnnnnnnnnnnnnnnnnnnnnnnnnnnnnnnnnnnnnnnnnnnnnnnnnnnnnnnnnnnnnnnnnnnnnnnnnnnnnnnnnnnnnnnnnnnnnnnnnnnnnnnnnnnnnnnnnnnnnnnnnnnnnnnnnnnnnnnnnnnnnnnnnnnnnnnnnnnnnnnnnnnnnnnnnnnnnnnnnnnnnnnnnnnnnnnnnnnnnnnnnnnnnnnnnnnnnnnnnnnnnnnnnnnnnnnnnnnnnnnnnnnnnnnnnnnnnnnnnnnnnnnnnnnnnnnnnnnnnnnnnnnnnnnnnnnnnnnnnnnnnnnnnnnnnnnnnnnnnnnnnnnnnnnnnnnnnnnnnnnnnnnnnnnnnnnnnnnnnnnnnnnnnnnnnnnnnnnnnnnnnnnnnnnnnnnnnnnnnnnnnnnnnnnnnnnnnnnnnnnnnnnnnnnnnnnnnnnnnnnnnnnnnnnnnnnnnnnnnnnnnnnnnnnnnnnnnnnnnnnnnnnnnnnnnnnnnnnnnnnnnnnnnnnnnnnnnnnnnnnnnnnnnnnnnnnnnnnnnnnnnnnnnnnnnnnnnnnnnnnnnnnnnnnnnnnnnnnnnnnnnnnnnnnnnnnnnnnnnnnnnnnnnnnnnnnnnnnnnnnnnnnnnnnnnnnnnnnnnnnnnnnnnnnnnnnnnnnnnnnnnnnnnnnnnnnnnnnnnnnnnnnnnnnnnnnnnnnnnnnnnnnnnnnnnnnnnnnnnnnnnnnnnnnnnnnnnnnnnnnnnnnnnnnnnnnnnnnnnnnnnnnnnnnnnnnnnnnnnnnnnnnnnnnnnnnnnnnnnnnnnnnnnnnnnnnnnnnnnnnnnnnnnnnnnnnnnnnnnnnnnnnnnnnnnnnnnnnnnnnnnnnnnnnnnnnnnnnnnnnnnnnnnnnnnnnnnnnnnnnnnnnnnnnnnnnnnnnnnnnnnnnnnnnnnnnnnnnnnnnnnnnnnnnnnnnnnnnnnnnnnnnnnnnnnnnnnnnnnnnnnnnnnnnnnnnnnnnnnnnnnnnnnnnnnnnnnnnnnnnnnnnnnnnnnnnnnnnnnnnnnnnnnnnnnnnnnnnnnnnnnnnnnnnnnnnnnnnnnnnnnnnnnnnnnnnnnnnnnnnnnnnnnnnnnnnnnnnnnnnnnnnnnnnnnnnnnnnnnnnnnnnnnnnnnnnnnnnnnnnnnnnnnnnnnnnnnnnnnnnnnnnnnnnnnnnnnnnnnnnnnnnnnnnnnnnnnnnnnnnnnnnnnnnnnnnnnnnnnnnnnnnnnnnnnnnnnnnnnnnnnnnnnnnnnnnnnnnnnnnnnnnnnnnnnnnnnnnnnnnnnnnnnnnnnnnnnnnnnnnnnnnnnnnnnnnnnnnnnnnnnnnnnnnnnnnnnnnnnnnnnnnnnnnnnnnnnnnnnnnnnnnnnnnnnnnnnnnnnnnnnnnnnnnnnnnnnnnnnnnnnnnnnnnnnnnnnnnnnnnnnnnnnnnnnnnnnnnnnnnnnnnnnnnnnnnnnnnnnnnnnnnnnnnnnnnnnnnnnnnnnnnnnnnnnnnnnnnnnnnnnnnnnnnnnnnnnnnnnnnnnnnnnnnnnnnnnnnnnnnnnnnnnnnnnnnnnnnnnnnnnnnnnnnnnnnnnnnnnnnnnnnnnnnnnnnnnnnnnnnnnnnnnnnnnnnnnnnnnnnnnnnnnnnnnnnnnnnnnnnnnnnnnnnnnnnnnnnnnnnnnnnnnnnnnnnnnnnnnnnnnnnnnnnnnnnnnnnnnnnnnnnnnnnnnnnnnnnnnnnnnnnnnnnnnnnnnnnnnnnnnnnnnnnnnnnnnnnnnnnnnnnnnnnnnnnnnnnnnnnnnnnnnnnnnnnnnnnnnnnnnnnnnnnnnnnnnnnnnnnnnnnnnnnnnnnnnnnnnnnnnnnnnnnnnnnnnnnnnnnnnnnnnnnnnnnnnnnnnnnnnnnnnnnnnnnnnnnnnnnnnnnnnnnnnnnnnnnnnnnnnnnnnnnnnnnnnnnnnnnnnnnnnnnnnnnnnnnnnnnnnnnnnnnnnnnnnnnnnnnnnnnnnnnnnnnnnnnnnnnnnnnnnnnnnnnnnnnnnnnnnnnnnnnnnnnnnnnnnnnnnnnnnnnnnnnnnnnnnnnnnnnnnnnnnnnnnnnnnnnnnnnnnnnnnnnnnnnnnnnnnnnnnnnnnnnnnnnnnnnnnnnnnnnnnnnnnnnnnnnnnnnnnnnnnnnnnnnnnnnnnnnnnnnnnnnnnnnnnnnnnnnnnnnnnnnnnnnnnnnnnnnnnnnnnnnnnnnnnnnnnnntcattattcctcgcataccgtatgagagaccagtagtgctagatgggcagcatgagagtagttttttggacacccgaaatactgcactgcgtaggatgcgtcaggtgatcggacgtggcttgcgatctccagaggctagttgcgaaatttacgttctagatggcaggtataaaaacatagaggcctttgtacccaagcgattccgtagtgggtggacaagcaaacagttcttagagggcagtagacgtgaactggtcttgtccaaaatagaacgtgatccatcagtccgtaaagaagcactaaaacgctttggtcatgaatgcatgtgttgtggctttcatccaaaggtgatctctcagttagatgtgcatcacctatcccccttgagtgaaggcggcgaaagactcacagcaattagcgatcttgcagttctctgcgctaactgtcaccgactcgcccactcaacttcaccaccgttaagtattgatgctatgaaggcgttgagatgaggtagtggccttttttcgggtcacgttaccaagttgctactggcaaacacagcgccactcgtatcgtccggttgcctgattgaagacttgcttttgagtgcactggctcgtacctaggggtggcagttgtaacgacggcattggttggattgatggcggagtcattgggcacatcccgatgcatatagcttggtcgaacttattttaattggggggttgactttttaccgcccacgagtaaaagcattactggaagtccaagtgcaacgccacttcgggctagatgtctggcgctaaagatgaagacccccatcctacttacagaaacatagtgacatacaaaataagagtaaataaatgacaaatcgtcctaagggttggttggctgcgctgctttcgctaggttttccgcctatcggctttttatacgtgggccggtggaggtgggcgatattgagtttgctgcctattggcgtatttgccggcactacttacgcgtttcctaaagtgcatttggaggaaatgtggtgggttgttgacatattttcttgggtcttttctggcatatgcgcatggattgcctataaggaggcggcccgatttggtgcagaccggatccgtcctggctatagcaaatggtatggattgcttgcaacagcaatcgtgatacctagttcagtcattggtgttcgcgcttttttattcgagccgttcagaattcccgctcgaagcatgttgccaacactagacataggggccagaataatagttaaaaaatggggatatgggaactacgcaactttcggatttcagctatttcatgctaaacccagtgttgctttgaatcgaggtgatctcattgtctttgaatacccgcccaatcgggatataaactacatcaaacggctagttggcctacctggtgatacggtggcttacctcaataagcgccttacgataaacggtcagtctgtttctataactgacttaccggattactacgatgaacaaagtatgagatatttcaaacagtttgaagaagcattaggtgatacgagatatagattgctaaatgaggtcgatcgacctgcttttgtgcctggtgctgaacaatttttggggcgcgaatggtgtcgctatacgattgatggtttcatctgcaaagtgcccttaggcaactatttcatgcttggtgacaatcgggacaattcgttggactctcgctactggggttttgtaccttcagaccacatcgttgggaaagttgtctatattattcaatagcgtagcaaacataggttttgaaaccactgaaggaaatctctaggcgtcttgtatttagaagggcaaggggtggtgcaccgcgacattgttgccaagcgcatgaccccgcagcaaatcgctgacgcgcaaaaactggcgcgggattgtttggctcggaatttcaagggctgcgactagtgtcggttgccaaggttcaaacaatgggggggtgttcatgcgaaagtccattttggtattcgcggtttacttagcagttagtgtggacgctgcacgctagttgtagctggatgatataacctctgtgagtactgacggcaaagtacacaaataaataattaatattttcactaaagattacacatgaaaaatatcaaaaaatctataattactgctggatttttattactgattaccggctgtggaacaacatcaaatgtcggttacgtttggtttggcactggtatcaatgacgattggggtactggaggtaatatttggagccatttttcctcctactctcagcaaagtgtcaatcaggttgctactgaatactgttcaagaaaaaatttaccacccccaactgtaactaccatctcaagtccatcatttgtggtctccgagtattacatgttcagatttcagtgtgataaaaatgctatgccacgcactacagttccacaatccatacaacaaggtaaattatcattgaacgaagcaaaaaataagtgcattgatttggggtttaaagcaaatactgaggaattgggaaaatgcgtattacaactatcaaaataggactggcactcagtctttgttcattaaatgggtttgctgttgacttaactctttttgaaaaccaatgcgctgagattggttttacaaggaatacgcctgcatttgggagttgtgttttagatttgcattcacgtgaattcaattcaaatccaagtcaaaaactgtatcaacaaccagcttcggagttttctaggcaaaatgaattgtctagggaagcgttagacgaagctaggaaagctcggcaagaggccgcaacagcgcggcgagaggctgatgagtaccgaaaaaggatagaagcacaaaaacgacaagaccaatttgatgaacagagaagacttctctgggatagcaatgaaaaggcaatgcgtgaaagttggcgacgtccctgaaagaattaaaagagggacagtttttacgcctcattaaaaaaaacttcgctattaaggtgcttagtgaattgggtgagtttaaaaatagggtttagtctgtctataaattgagaattaaatgaataaattttcgacgctcctcattcctctgataattgtatcagtcagtacatttgccacaccgttaacggctcaggaaaagctagaatttcaaaaaagcagtgtgccttcttgcatagcaaaaaataatgcttccagagatttaactaccttacaaaaagaaggacttaacaattactgcatatgtcatagtgttgtaatgacaagtcttgttactagagaagaaatgatgagtttaggcaaaggtaagctaccgacaacattccaaggtaaggtctcggaggcacagaagcaatgtatcaaagcattgtctaattaatcaacatgcaatatttaactttatctgttggcgcagttttattgttgcctcttagcgtgtttgctcaaatgggcgctagaatgccaccaattgattatgatgagggagcatttaggaatccctctgattggtggtggactgtcctaattattgcaaactttattattgctccgtatttaataacaagaaaagaccttgactttggtggtgttgcatactttaaatggttcattgcgcttttcattacttttgttatttctcttcttttaattccattgttcgtaaataaaaatgattatatgttctggactattgctattcagttgggagttactagctatggatttataactaacaaaaaatagtttggtaaaattatattccgccagtagtgtgcatgcacaaaatgaacgagtagggcctaatcaagtcccaccctcatcgcgatcta

SEQ ID NO: 128 - DNA, 13864 bp, Artificial Sequence; identical to SEQ ID NO: 127
  Synthetic Oligonucleotide
  misc_feature (1)..(9997): n is a, c, g, or t

SEQ ID NO: 129 - DNA, 13851 bp, Artificial Sequence; identical to SEQ ID NO: 8
  Synthetic Oligonucleotide
  misc_feature (1)..(3521): n is a, c, g, or t

SEQ ID NO: 130 - DNA, 13851 bp, Artificial Sequence
  Synthetic Oligonucleotide
  misc_feature (1)..(9099): n is a, c, g, or t
nnnnnnnnnnnnnnnnnnnnnnnnnnnnnnnnnnnnnnnnnnnnnnnnnnnnnnnnnnnnnnnnnnnnnnnnnnnnnnnnnnnnnnnnnnnnnnnnnnnnnnnnnnnnnnnnnnnnnnnnnnnnnnnnnnnnnnnnnnnnnnnnnnnnnnnnnnnnnnnnnnnnnnnnnnnnnnnnnnnnnnnnnnnnnnnnnnnnnnnnnnnnnnnnnnnnnnnnnnnnnnnnnnnnnnnnnnnnnnnnnnnnnnnnnnnnnnnnnnnnnnnnnnnnnnnnnnnnnnnnnnnnnnnnnnnnnnnnnnnnnnnnnnnnnnnnnnnnnnnnnnnnnnnnnnnnnnnnnnnnnnnnnnnnnnnnnnnnnnnnnnnnnnnnnnnnnnnnnnnnnnnnnnnnnnnnnnnnnnnnnnnnnnnnnnnnnnnnnnnnnnnnnnnnnnnnnnnnnnnnnnnnnnnnnnnnnnnnnnnnnnnnnnnnnnnnnnnnnnnnnnnnnnnnnnnnnnnnnnnnnnnnnnnnnnnnnnnnnnnnnnnnnnnnnnnnnnnnnnnnnnnnnnnnnnnnnnnnnnnnnnnnnnnnnnnnnnnnnnnnnnnnnnnnnnnnnnnnnnnnnnnnnnnnnnnnnnnnnnnnnnnnnnnnnnnnnnnnnnnnnnnnnnnnnnnnnnnnnnnnnnnnnnnnnnnnnnnnnnnnnnnnnnnnnnnnnnnnnnnnnnnnnnnnnnnnnnnnnnnnnnnnnnnnnnnnnnnnnnnnnnnnnnnnnnnnnnnnnnnnnnnnnnnnnnnnnnnnnnnnnnnnnnnnnnnnnnnnnnnnnnnnnnnnnnnnnnnnnnnnnnnnnnnnnnnnnnnnnnnnnnnnnnnnnnnnnnnnnnnnnnnnnnnnnnnnnnnnnnnnnnnnnnnnnnnnnnnnnnnnnnnnnnnnnnnnnnnnnnnnnnnnnnnnnnnnnnnnnnnnnnnnnnnnnnnnnnnnnnnnnnnnnnnnnnnnnnnnnnnnnnnnnnnnnnnnnnnnnnnnnnnnnnnnnnnnnnnnnnnnnnnnnnnnnnnnnnnnnnnnnnnnnnnnnnnnnnnnnnnnnnnnnnnnnnnnnnnnnnnnnnnnnnnnnnnnnnnnnnnnnnnnnnnnnnnnnnnnnnnnnnnnnnnnnnnnnnnnnnnnnnnnnnnnnnnnnnnnnnnnnnnnnnnnnnnnnnnnnnnnnnnnnnnnnnnnnnnnnnnnnnnnnnnnnnnnnnnnnnnnnnnnnnnnnnnnnnnnnnnnnnnnnnnnnnnnnnnnnnnnnnnnnnnnnnnnnnnnnnnnnnnnnnnnnnnnnnnnnnnnnnnnnnnnnnnnnnnnnnnnnnnnnnnnnnnnnnnnnnnnnnnnnnnnnnnnnnnnnnnnnnnnnnnnnnnnnnnnnnnnnnnnnnnnnnnnnnnnnnnnnnnnnnnnnnnnnnnnnnnnnnnnnnnnnnnnnnnnnnnnnnnnnnnnnnnnnnnnnnnnnnnnnnnnnnnnnnnnnnnnnnnnnnnnnnnnnnnnnnnnnnnnnnnnnnnnnnnnnnnnnnnnnnnnnnnnnnnnnnnnnnnnnnnnnnnnnnnnnnnnnnnnnnnnnnnnnnnnnnnnnnnnnnnnnnnnnnnnnnnnnnnnnnnnnnnnnnnnnnnnnnnnnnnnnnnnnnnnnnnnnnnnnnnnnnnnnnnnnnnnnnnnnnnnnnnnnnnnnnnnnnnnnnnnnnnnnnnnnnnnnnnnnnnnnnnnnnnnnnnnnnnnnnnnnnnnnnnnnnnnnnnnnnnnnnnnnnnnnnnnnnnnnnnnnnnnnnnnnnnnnnnnnnnnnnnnnnnnnnnnnnnnnnnnnnnnnnnnnnnnnnnnnnnnnnnnnnnnnnnnnnnnnnnnnnnnnnnnnnnnnnnnnnnnnnnnnnnnnnnnnnnnnnnnnnnnnnnnnnnnnnnnnnnnnnnnnnnnnnnnnnnnnnnnnnnnnnnnnnnnnnnnnnnnnnnnnnnnnnnnnnnnnnnnnnnnnnnnnnnnnnnnnnnnnnnnnnnnnnnnnnnnnnnnnnnnnnnnnnnnnnnnnnnnnnnnnnnnnnnnnnnnnnnnnnnnnnnnnnnnnnnnnnnnnnnnnnnnnnnnnnnnnnnnnnnnnnnnnnnnnnnnnnnnnnnnnnnnnnnnnnnnnnnnnnnnnnnnnnnnnnnnnnnnnnnnnnnnnnnnnnnnnnnnnnnnnnnnnnnnnnnnnnnnnnnnnnnnnnnnnnnnnnnnnnnnnnnnnnnnnnnnnnnnnnnnnnnnnnnnnnnnnnnnnnnnnnnnnnnnnnnnnnnnnnnnnnnnnnnnnnnnnnnnnnnnnnnnnnnnnnnnnnnnnnnnnnnnnnnnnnnnnnnnnnnnnnnnnnnnnnnnnnnnnnnnnnnnnnnnnnnnnnnnnnnnnnnnnnnnnnnnnnnnnnnnnnnnnnnnnnnnnnnnnnnnnnnnnnnnnnnnnnnnnnnnnnnnnnnnnnnnnnnnnnnnnnnnnnnnnnnnnnnnnnnnnnnnnnnnnnnnnnnnnnnnnnnnnnnnnnnnnnnnnnnnnnnnnnnnnnnnnnnnnnnnnnnnnnnnnnnnnnnnnnnnnnnnnnnnnnnnnnnnnnnnnnnnnnnnnnnnnnnnnnnnnnnnnnnnnnnnnnnnnnnnnnnnnnnnnnnnnnnnnnnnnnnnnnnnnnnnnnnnnnnnnnnnnnnnnnnnnnnnnnnnnnnnnnnnnnnnnnnnnnnnnnnnnnnnnnnnnnnnnnnnnnnnnnnnnnnnnnnnnnnnnnnnnnnnnnnnnnnnnnnnnnnnnnnnnnnnnnnnnnnnnnnnnnnnnnnnnnnnnnnnnnnnnnnnnnnnnnnnnnnnnnnnnnnnnnnnnnnnnnnnnnnnnnnnnnnnnnnnnnnnnnnnnnnnnnnnnnnnnnnnnnnnnnnnnnnnnnnnnnnnnnnnnnnnnnnnnnnnnnnnnnnnnnnnnnnnnnnnnnnnnnnnnnnnnnnnnnnnnnnnnnnnnnnnnnnnnnnnnnnnnnnnnnnnnnnnnnnnnnnnnnnnnnnnnnnnnnnnnnnnnnnnnnnnnnnnnnnnnnnnnnnnnnnnnnnnnnnnnnnnnnnnnnnnnnnnnnnnnnnnnnnnnnnnnnnnnnnnnnnnnnnnnnnnnnnnnnnnnnnnnnnnnnnnnnnnnnnnnnnnnnnnnnnnnnnnnnnnnnnnnnnnnnnnnnnnnnnnnnnnnnnnnnnnnnnnnnnnnnnnnnnnnnnnnnnnnnnnnnnnnnnnnnnnnnnnnnnnnnnnnnnnnnnnnnnnnnnnnnnnnnnnnnnnnnnnnnnnnnnnnnnnnnnnnnnnnnnnnnnnnnnnnnnnnnnnnnnnnnnnnnnnnnnnnnnnnnnnnnnnnnnnnnnnnnnnnnnnnnnnnnnnnnnnnnnnnnnnnnnnnnnnnnnnnnnnnnnnnnnnnnnnnnnnnnnnnnnnnnnnnnnnnnnnnnnnnnnnnnnnnnnnnnnnnnnnnnnnnnnnnnnnnnnnnnnnnnnnnnnnnnnnnnnnnnnnnnnnnnnnnnnnnnnnnnnnnnnnnnnnnnnnnnnnnnnnnnnnnnnnnnnnnnnnnnnnnnnnnnnnnnnnnnnnnnnnnnnnnnnnnnnnnnnnnnnnnnnnnnnnnnnnnnnnnnnnnnnnnnnnnnnnnnnnnnnnnnnnnnnnnnnnnnnnnnnnnnnnnnnnnnnnnnnnnnnnnnnnnnnnnnnnnnnnnnnnnnnnnnnnnnnnnnnnnnnnnnnnnnnnnnnnnnnnnnnnnnnnnnnnnnnnnnnnnnnnnnnnnnnnnnnnnnnnnnnnnnnnnnnnnnnnnnnnnnnnnnnnnnnnnnnnnnnnnnnnnnnnnnnnnnnnnnnnnnnnnnnnnnnnnnnnnnnnnnnnnnnnnnnnnnnnnnnnnnnnnnnnnnnnnnnnnnnnnnnnnnnnnnnnnnnnnnnnnnnnnnnnnnnnnnnnnnnnnnnnnnnnnnnnnnnnnnnnnnnnnnnnnnnnnnnnnnnnnnnnnnnnnnnnnnnnnnnnnnnnnnnnnnnnnnnnnnnnnnnnnnnnnnnnnnnnnnnnnnnnnnnnnnnnnnnnnnnnnnnnnnnnnnnnnnnnnnnnnnnnnnnnnnnnnnnnnnnnnnnnnnnnnnnnnnnnnnnnnnnnnnnnnnnnnnnnnnnnnnnnnnnnnnnnnnnnnnnnnnnnnnnnnnnnnnnnnnnnnnnnnnnnnnnnnnnnnnnnnnnnnnnnnnnnnnnnnnnnnnnnnnnnnnnnnnnnnnnnnnnnnnnnnnnnnnnnnnnnnnnnnnnnnnnnnnnnnnnnnnnnnnnnnnnnnnnnnnnnnnnnnnnnnnnnnnnnnnnnnnnnnnnnnnnnnnnnnnnnnnnnnnnnnnnnnnnnnnnnnnnnnnnnnnnnnnnnnnnnnnnnnnnnnnnnnnnnnnnnnnnnnnnnnnnnnnnnnnnnnnnnnnnnnnnnnnnnnnnnnnnnnnnnnnnnnnnnnnnnnnnnnnnnnnnnnnnnnnnnnnnnnnnnnnnnnnnnnnnnnnnnnnnnnnnnnnnnnnnnnnnnnnnnnnnnnnnnnnnnnnnnnnnnnnnnnnnnnnnnnnnnnnnnnnnnnnnnnnnnnnnnnnnnnnnnnnnnnnnnnnnnnnnnnnnnnnnnnnnnnnnnnnnnnnnnnnnnnnnnnnnnnnnnnnnnnnnnnnnnnnnnnnnnnnnnnnnnnnnnnnnnnnnnnnnnnnnnnnnnnnnnnnnnnnnnnnnnnnnnnnnnnnnnnnnnnnnnnnnnnnnnnnnnnnnnnnnnnnnnnnnnnnnnnnnnnnnnnnnnnnnnnnnnnnnnnnnnnnnnnnnnnnnnnnnnnnnnnnnnnnnnnnnnnnnnnnnnnnnnnnnnnnnnnnnnnnnnnnnnnnnnnnnnnnnnnnnnnnnnnnnnnnnnnnnnnnnnnnnnnnnnnnnnnnnnnnnnnnnnnnnnnnnnnnnnnnnnnnnnnnnnnnnnnnnnnnnnnnnnnnnnnnnnnnnnnnnnnnnnnnnnnnnnnnnnnnnnnnnnnnnnnnnnnnnnnnnnnnnnnnnnnnnnnnnnnnnnnnnnnnnnnnnnnnnnnnnnnnnnnnnnnnnnnnnnnnnnnnnnnnnnnnnnnnnnnnnnnnnnnnnnnnnnnnnnnnnnnnnnnnnnnnnnnnnnnnnnnnnnnnnnnnnnnnnnnnnnnnnnnnnnnnnnnnnnnnnnnnnnnnnnnnnnnnnnnnnnnnnnnnnnnnnnnnnnnnnnnnnnnnnnnnnnnnnnnnnnnnnnnnnnnnnnnnnnnnnnnnnnnnnnnnnnnnnnnnnnnnnnnnnnnnnnnnnnnnnnnnnnnnnnnnnnnnnnnnnnnnnnnnnnnnnnnnnnnnnnnnnnnnnnnnnnnnnnnnnnnnnnnnnnnnnnnnnnnnnnnnnnnnnnnnnnnnnnnnnnnnnnnnnnnnnnnnnnnnnnnnnnnnnnnnnnnnnnnnnnnnnnnnnnnnnnnnnnnnnnnnnnnnnnnnnnnnnnnnnnnnnnnnnnnnnnnnnnnnnnnnnnnnnnnnnnnnnnnnnnnnnnnnnnnnnnnnnnnnnnnnnnnnnnnnnnnnnnnnnnnnnnnnnnnnnnnnnnnnnnnnnnnnnnnnnnnnnnnnnnnnnnnnnnnnnnnnnnnnnnnnnnnnnnnnnnnnnnnnnnnnnnnnnnnnnnnnnnnnnnnnnnnnnnnnnnnnnnnnnnnnnnnnnnnnnnnnnnnnnnnnnnnnnnnnnnnnnnnnnnnnnnnnnnnnnnnnnnnnnnnnnnnnnnnnnnnnnnnnnnnnnnnnnnnnnnnnnnnnnnnnnnnnnnnnnnnnnnnnnnnnnnnnnnnnnnnnnnnnnnnnnnnnnnnnnnnnnnnnnnnnnnnnnnnnnnnnnnnnnnnnnnnnnnnnnnnnnnnnnnnnnnnnnnnnnnnnnnnnnnnnnnnnnnnnnnnnnnnnnnnnnnnnnnnnnnnnnnnnnnnnnnnnnnnnnnnnnnnnnnnnnnnnnnnnnnnnnnnnnnnnnnnnnnnnnnnnnnnnnnnnnnnnnnnnnnnnnnnnnnnnnnnnnnnnnnnnnnnnnnnnnnnnnnnnnnnnnnnnnnnnnnnnnnnnnnnnnnnnnnnnnnnnnnnnnnnnnnnnnnnnnnnnnnnnnnnnnnnnnnnnnnnnnnnnnnnnnnnnnnnnnnnnnnnnnnnnnnnnnnnnnnnnnnnnnnnnnnnnnnnnnnnnnnnnnnnnnnnnnnnnnnnnnnnnnnnnnnnnnnnnnnnnnnnnnnnnnnnnnnnnnnnnnnnnnnnnnnnnnnnnnnnnnnnnnnnnnnnnnnnnnnnnnnnnnnnnnnnnnnnnnnnnnnnnnnnnnnnnnnnnnnnnnnnnnnnnnnnnnnnnnnnnnnnnnnnnnnnnnnnnnnnnnnnnnnnnnnnnnnnnnnnnnnnnnnnnnnnnnnnnnnnnnnnnnnnnnnnnnnnnnnnnnnnnnnnnnnnnnnnnnnnnnnnnnnnnnnnnnnnnnnnnnnnnnnnnnnnnnnnnnnnnnnnnnnnnnnnnnnnnnnnnnnnnnnnnnnnnnnnnnnnnnnnnnnnnnnnnnnnnnnnnnnnnnnnnnnnnnnnnnnnnnnnnnnnnnnnnnnnnnnnnnnnnnnnnnnnnnnnnnnnnnnnnnnnnnnnnnnnnnnnnnnnnnnnnnnnnnnnnnnnnnnnnnnnnnnnnnnnnnnnnnnnnnnnnnnnnnnnnnnnnnnnnnnnnnnnnnnnnnnnnnnnnnnnnnnnnnnnnnnnnnnnnnnnnnnnnnnnnnnnnnnnnnnnnnnnnnnnnnnnnnnnnnnnnnnnnnnnnnnnnnnnnnnnnnnnnnnnnnnnnnnnnnnnnnnnnnnnnnnnnnnnnnnnnnnnnnnnnnnnnnnnnnnnnnnnnnnnnnnnnnnnnnnnnnnnnnnnnnnnnnnnnnnnnnnnnnnnnnnnnnnnnnnnnnnnnnnnnnnnnnnnnnnnnnnnnnnnnnnnnnnnnnnnnnnnnnnnnnnnnnnnnnnnnnnnnnnnnnnnnnnnnnnnnnnnnnnnnnnnnnnnnnnnnnnnnnnnnnnnnnnnnnnnnnnnnnnnnnnnnnnnnnnnnnnnnnnnnnnnnnnnnnnnnnnnnnnnnnnnnnnnnnnnnnnnnnnnnnnnnnnnnnnnnnnnnnnnnnnnnnnnnnnnnnnnnnnnnnnnnnnnnnnnnnnnnnnnnnnnnnnnnnnnnnnnnnnnnnnnnnnnnnnnnnnnnnnnnnnnnnnnnnnnnnnnnnnnnnnnnnnnnnnnnnnnnnnnnnnnnnnnnnnnnnnnnnnnnnnnnnnnnnnnnnnnnnnnnnnnnnnnnnnnnnnnnnnnnnnnnnnnnnnnnnnnnnnnnnnnnnnnnnnnnnnnnnnnnnnnnnnnnnnnnnnnnnnnnnnnnnnnnnnnnnnnnnnnnnnnnnnnnnnnnnnnnnnnnnnnnnnnnnnnnnnnnnnnnnnnnnnnnnnnnnnnnnnnnnnnnnnnnnnnnnnnnnnnnnnnnnnnnnnnnnnnnnnnnnnnnnnnnnnnnnnnnnnnnnnnnnnnnnnnnnnnnnnnnnnnnnnnnnnnnnnnnnnnnnnnnnnnnnnnnnnnnnnnnnnnnnnnnnnnnnnnnnnnnnnnnnnnnnnnnnnnnnnnnnnnnnnnnnnnnnnnnnnnnnnnnnnnnnnnnnnnnnnnnnnnnnnnnnnnnnnnnnnnnnnnnnnnnnnnnnnnnnnnnnnnnnnnnnnnnnnnnnnnnnnnnnnnnnnnnnnnnnnnnnnnnnnnnnnnnnnnnnnnnnnnnnnnnnnnnnnnnnnnnnnnnnnnnnnnnnnnnnnnnnnnnnnnnnnnnnnnnnnnnnnnnnnnnnnnnnnnnnnnnnnnnnnnnnnnnnnnnnnnnnnnnnnnnnnnnnnnnnnnnnnnnnnnnnnnnnnnnnnnnnnnnnnnnnnnnnnnnnnnnnnnnnnnnnnnnnnnnnnnnnnnnnnnnnnnnnnnnnnnnnnnnnnnnnnnnnnnnnnnnnnnnnnnnnnnnnnnnnnnnnnnnnnnnnnnnnnnnnnnnnnnnnnnnnnnnnnnnnnnnnnnnnnnnnnnnnnnnnnnnnnnnnnnnnnnnnnnnnnnnnnnnnnnnnnnnnnnnnnnnnnnnnnnnnnnnnnnnnnnnnnnnnnnnnnnnnnnnnnnnnnnnnnnnnnnnnnnnnnnnnnnnnnnnnnnnnnnnnnnnnnnnnnnnnnnnnnnnnnnnnnnnnnnnnnnnnnnnnnnnnnnnnnnnnnnnnnnnnnnnnnnnnnnnnnnnnnnnnnnnnnnnnnnnnnnnnnnnnnnnnnnnnnnnnnnnnnnnnnnnnnnnnnnnnnnnnnnnnnnnnnnnnnnnnnnnnnnnnnnnnnnnnnnnnnnnnnnnnnnnnnnnnnnnnnnnnnnnnnnnnnnnnnnnnnnnnnnnnnnnnnnnnnnnnnnnnnnnnnnnnnnnnnnnnnnnnnnnnnnnnnnnnnnnnnnnnnnnnnnnnnnnnnnnnnnnnnnnnnnnnnnnnnnnnnnnnnnnnnnnnnnnnnnnnnnnnnnnnnnnnnnnnnnnnnnnnnnnnnnnnnnnnnnnnnnnnnnnnnnnnnnnnnnnnnnnnnnnnnnnnnnnnnnnnnnnnnnnnnnnnnnnnnnnnnnnnnnnnnnnnnnnnnnnnnnnnnnnnnnnnnnnnnnnnnnnnnnnnnnnnnnnnnnnnnnnnnnnnnnnnnnnnnnnnnnnnnnnnnnnnnnnnnnnnnnnnnnnnnnnnnnnnnnnnnnnnnnnnnnnnnnnnnnnnnnnnnnnnnnnnnnnnnnnnnnnnnnnnnnnnnnnnnnnnnnnnnnnnnnnnnnnnnnnnnnnnnnnnnnnnnnnnnnnnnnnnnnnnnnnnnnnnnnnnnnnnnnnnnnnnnnnnnnnnnnnnnnnnnnnnnnnnnnnnnnnnnnnnnnnnnnnnnnnnnnnnnnnnnnnnnnnnnnnnnnnnnnnnnnnnnnnnnnnnnnnnnnnnnnnnnnnnnnnnnnnnnnnnnnnnnnnnnnnnnnnnnnnnnnnnnnnnnnnnnnnnnnnnnnnnnnnnnnnnnnnnnnnnnnnnnnnnnnnnnnnnnnnnnnnnnnnnnnnnnnnnnnnnnnnnnnnnnnnnnnnnnnnnnnnnnnnnnnnnnnnnnnnnnnnnnnnnnnnnnnnnnnnnnnnnggtgaagccaccccggaattgggtggctactgaaacctcgactactctgtccatgagttcgagtggggtgaagccaccccggaattgggtggctactgaaacaggaactgtgtctcacccatgctcccgtctggtgaagccaccccggaattgggtggctactgaaacctcgatgccgattacgaggccaagcgcgctggtgaagccaccccggaattgggtggctactgaaacccgccgccgcgctgcgatgattgccccgagggtgaagccaccccggaattgggtggctactgaaacagcatcatgcgttccccatggtcttgatgtggtgaagccaccccggaattgggtggctactgaaacttcgttgttagagagggaagaaccgggcgaggtgaagccaccccggaattgggtggctactgaaaccacgccaagatcgccatggagtcgatcgccggtgaagccaccccggaattgggtggctactgaaacagcacgcgctcgacgcggtcgtaatcggccggtaaagccacccccaaattgggtggctactgaaactcgggtgttcggaaaggatggcgtcgatcatggtgaagccacccccaaattgggtggctactgaaacatcaagtcttgcgcgaggcgcttgtgaaggtgaagccacctccgaattgggtggttactgaaacggcgcttgcgagtgatcccgcggcaccaggggtgaagccacccccaaactgggtggctactgaaacatcacgaggttgttttcgagttgcgccagaggtgaagccacccctcaattgggtggcaaatgaaacgacagatcgcaaagcatgtcgcgcgctctggtgaagccacccctgttttgggtggttactggaaggacgtctgatgttccgatcatccgaacagcaaaacttcgccgcgatggtcgccgcccacatctccaaggccgacggcccgttgctgctcgaaggtggcaccggcatcgggaagacgcgcgcctatctgtcggcgctcatcggctccggcaaacgggtcgcgattgtgttgccgacccaccagctcatcgagcagctgcttgcttccaccgatctcgcagaggccaatgccagaggcatcaccgtcgccgcttttcgaccggcgtcgaagttcgataccagggccgactacttggcgaaccgtgaagtcgcggccagtgcgcaactcatgttgtgcactgccgccagtgtcatcatcgaccgccgtctggacggcaaatacaacggcgcgaccgaacgggattatcttctcttcgatgaggctgaccagttgccggcgatggccgctcttcagtccgacatggaggttaccggcgaggccctcaagacgctggggatcgaaggcgaaacgacccgtaatctggccgacgccgtcgtcgcgtccaagaaggccgagccggaacagcgcgccgccgccaagatgatcctcgaagtcctgggcgagcccgcgtggtttcatgtggcaggcaaggccgacgatggtggcatccgcctctggcatcggctaccggggcggctactgcgcgagatcgccaaccaaccaaacgtcgcctttgtcagcgccaccctgactgtcggaggtctgtttaacgacttcaagtgtgcgctcggcatccagagtgaaagcgagctgtcgggtgtcgtcgaacctgagcgacacggcacggtcgagttccggaccgttgtgtcgcaagccgtggacgccgacggctggctcgaaaaggtggcggcgaccgtcaggcaggcagaggctcccgtgctggtcgtaacgccctcgttcgaccgtgctgagaagattggcgcgctggtggaaggcgcgacggtgcggcagcgcgaggaagccgttggcgacgccatggctcgaatgggcggctcccgaaccctgattggggcagccgcctgggccggcctcgacacgcccatccagtggcggtcaattgtcgtgcctgttgtgcctttcgagcgcctgacggagatcgaagggcaagtcgagagccactacatcgatgcgcgcaacacggccgtgcgacgcctgcgccaggtgatcggtcggggactgcggtcgcccgatgcccgctgcaccgtctacttcctcgatcctcgtgtcttgaagctaccggccttctggcccagccggttttcctcggcctgggtggcccgccctcgcgatccgggtgtcctcgaaggggcgcgaggcgaggtggtcctgtccaaagccgagcgcgacacgtctcttagaaagcgcgcccttgcccactacggtctgcattgtcgggcgtgtggtctggtacccaaggtcgccgcccagatcgaggtacatcacctcgaccccatctcggaaggcatccggcgcacgacgttagcggacctgtgccccctttgtcggaactgtcactcacttgcccactccacgagcccgcctatgccggtcgaggaggttgcgaagatcgtgggggcctagggtccgaatgcaattggacgtaacgcgttgccttcaagcttcggcaatccggcaggcagcactagtctaggccgcctgttcgagcgtcgaggcgacgtcgcgcgtggtcacgcggcgcaggtcgcgcaccttggtcgtgtcgaacggccgcgcacgatgcatggtgcagcgattgtcccagatcacgaggtcgcccttcgcccagcgatggacatgcacgaagcgcggctgggtcgcgtgctcgatcaggtcgaggatgatcaggcgcccgtcggccaccggcaggcccaggatgtgcgaggcgtgcgcggcgagatagagcgtcctgcgatgcgagccgggatgggttcgcaccacccgctgcggcaccggcggcagcgaggcgcgttcctcgtcggtgtactgcacgacgcccagctgctcgcgcgaccgccagatcgaatgttcggcgaccagcccttccagctccttcttcttcgtctccggcagcgcgtcgtacgccgcgcgcaagtcggcgaactcggtgtcgccgccttcctcgggaatgacgtgcgcgtagagcatcgagagaccgccgggcacggcgcggaacgaggcgtcggtgtgccagagccggttggccaggccgtcgagccggcgccgcgcatcgggcttcatgacgttgccgtcgccgtcgaggttggagatgtcggccacctggctcgatgcgatccggtgcttgatgtcgcgatgccgaagcttcagcgccgacgattcgatcgggccgaaattgctggcaaaggccacctgccgctcgtcgtcgagcgtctgcccgcggaacaccacgaccgcgtagcggttgatggcgtcctcgatggcctgccggtcggtgggcttgagcggtcgtgccacgtcgacaccggcaatctcggccacgaattcaggatgagttggcgtaacggtgatgctcacgactgcctcccgcggctatagtgcatttgcaatcattctctcccaggaaacgccatgccgcaaaccatgaagctcgctttgctcgacgattaccagaaggttgccctgcgcatggccgactgggaccgcctcaggaagcgcggcgtcgagatcacggtgttccacgagcccttcgcctcggtcgaggatgcggcgcagaagctggcgccgttcgacatgctgggattgctgcgggagcgcacggcgttcccgcgcgccctgatagagaagctgcccaacctcaagttcatggtgctgaccggcgcccgtgccgccagcctcgacgacaaggcggcggccgagcgcggcatcccgatctccacgacgcccggcggcacctcgaacgcgccgacggcggaactgggctgggcgctgctgatgatgtgcgcccgcgatctcgccaaggccgagcggctggcgcgtcagggcaagtggcatgacggcatcgagcagatggtcgtgctcgagggcaagcggctgggcattctcggtctcggcaagctgggcagccgcgcggcccactacgccaaggccttcggcatggaggtcgtggcctggagccagaacctcacacccgagaaggcggaagcgggcggcgcgaagtacgtcaccaaggacgagttgctggcgacctcggacttcgtgtcgatccatcttgcgttgtcggatcgcacgcgcggcctgatcggtgcggccgagctggcgaagatgaagaagaccgcgatcctggtgaacacctcgcgcgggccgatcgtcgacgaagcggccctgatcgaggcgctgaagaaccgcaccatcctgcacgccggtctcgacgtctacgacagggagccgatgtcggccgaccatcccttcaccaggctcgacaacatcacgctcattcctcacctgggctacgtcgtcgaggagagctaccggcacttctacgagggcacgatcaaggacatcgaggcctggctcgatggcagtccgatcaacgtcctcaatccggacgcgctcaagaaggcctagcgtccttccgtcctctgttgacggacccacctcatcctgaggagcgccgcccctcgagtacctcgggataaactccacggcgcgtctcgaaggatgggcaacggacggggtgcgcgtgcccacccttcgagacgctcactgcgttcgctcctcagggtgaggtcggtatgtggatgcccggctggattctttctcgtccggaaaggctcctgcaggctgctgaaaagtcggagctggggc

SEQ ID NO: 131 - DNA, 13850 bp, Artificial Sequence
  Synthetic Oligonucleotide
  misc_feature (1)..(9099): n is a, c, g, or t
nnnnnnnnnnnnnnnnnnnnnnnnnnnnnnnnnnnnnnnnnnnnnnnnnnnnnnnnnnnnnnnnnnnnnnnnnnnnnnnnnnnnnnnnnnnnnnnnnnnnnnnnnnnnnnnnnnnnnnnnnnnnnnnnnnnnnnnnnnnnnnnnnnnnnnnnnnnnnnnnnnnnnnnnnnnnnnnnnnnnnnnnnnnnnnnnnnnnnnnnnnnnnnnnnnnnnnnnnnnnnnnnnnnnnnnnnnnnnnnnnnnnnnnnnnnnnnnnnnnnnnnnnnnnnnnnnnnnnnnnnnnnnnnnnnnnnnnnnnnnnnnnnnnnnnnnnnnnnnnnnnnnnnnnnnnnnnnnnnnnnnnnnnnnnnnnnnnnnnnnnnnnnnnnnnnnnnnnnnnnnnnnnnnnnnnnnnnnnnnnnnnnnnnnnnnnnnnnnnnnnnnnnnnnnnnnnnnnnnnnnnnnnnnnnnnnnnnnnnnnnnnnnnnnnnnnnnnnnnnnnnnnnnnnnnnnnnnnnnnnnnnnnnnnnnnnnnnnnnnnnnnnnnnnnnnnnnnnnnnnnnnnnnnnnnnnnnnnnnnnnnnnnnnnnnnnnnnnnnnnnnnnnnnnnnnnnnnnnnnnnnnnnnnnnnnnnnnnnnnnnnnnnnnnnnnnnnnnnnnnnnnnnnnnnnnnnnnnnnnnnnnnnnnnnnnnnnnnnnnnnnnnnnnnnnnnnnnnnnnnnnnnnnnnnnnnnnnnnnnnnnnnnnnnnnnnnnnnnnnnnnnnnnnnnnnnnnnnnnnnnnnnnnnnnnnnnnnnnnnnnnnnnnnnnnnnnnnnnnnnnnnnnnnnnnnnnnnnnnnnnnnnnnnnnnnnnnnnnnnnnnnnnnnnnnnnnnnnnnnnnnnnnnnnnnnnnnnnnnnnnnnnnnnnnnnnnnnnnnnnnnnnnnnnnnnnnnnnnnnnnnnnnnnnnnnnnnnnnnnnnnnnnnnnnnnnnnnnnnnnnnnnnnnnnnnnnnnnnnnnnnnnnnnnnnnnnnnnnnnnnnnnnnnnnnnnnnnnnnnnnnnnnnnnnnnnnnnnnnnnnnnnnnnnnnnnnnnnnnnnnnnnnnnnnnnnnnnnnnnnnnnnnnnnnnnnnnnnnnnnnnnnnnnnnnnnnnnnnnnnnnnnnnnnnnnnnnnnnnnnnnnnnnnnnnnnnnnnnnnnnnnnnnnnnnnnnnnnnnnnnnnnnnnnnnnnnnnnnnnnnnnnnnnnnnnnnnnnnnnnnnnnnnnnnnnnnnnnnnnnnnnnnnnnnnnnnnnnnnnnnnnnnnnnnnnnnnnnnnnnnnnnnnnnnnnnnnnnnnnnnnnnnnnnnnnnnnnnnnnnnnnnnnnnnnnnnnnnnnnnnnnnnnnnnnnnnnnnnnnnnnnnnnnnnnnnnnnnnnnnnnnnnnnnnnnnnnnnnnnnnnnnnnnnnnnnnnnnnnnnnnnnnnnnnnnnnnnnnnnnnnnnnnnnnnnnnnnnnnnnnnnnnnnnnnnnnnnnnnnnnnnnnnnnnnnnnnnnnnnnnnnnnnnnnnnnnnnnnnnnnnnnnnnnnnnnnnnnnnnnnnnnnnnnnnnnnnnnnnnnnnnnnnnnnnnnnnnnnnnnnnnnnnnnnnnnnnnnnnnnnnnnnnnnnnnnnnnnnnnnnnnnnnnnnnnnnnnnnnnnnnnnnnnnnnnnnnnnnnnnnnnnnnnnnnnnnnnnnnnnnnnnnnnnnnnnnnnnnnnnnnnnnnnnnnnnnnnnnnnnnnnnnnnnnnnnnnnnnnnnnnnnnnnnnnnnnnnnnnnnnnnnnnnnnnnnnnnnnnnnnnnnnnnnnnnnnnnnnnnnnnnnnnnnnnnnnnnnnnnnnnnnnnnnnnnnnnnnnnnnnnnnnnnnnnnnnnnnnnnnnnnnnnnnnnnnnnnnnnnnnnnnnnnnnnnnnnnnnnnnnnnnnnnnnnnnnnnnnnnnnnnnnnnnnnnnnnnnnnnnnnnnnnnnnnnnnnnnnnnnnnnnnnnnnnnnnnnnnnnnnnnnnnnnnnnnnnnnnnnnnnnnnnnnnnnnnnnnnnnnnnnnnnnnnnnnnnnnnnnnnnnnnnnnnnnnnnnnnnnnnnnnnnnnnnnnnnnnnnnnnnnnnnnnnnnnnnnnnnnnnnnnnnnnnnnnnnnnnnnnnnnnnnnnnnnnnnnnnnnnnnnnnnnnnnnnnnnnnnnnnnnnnnnnnnnnnnnnnnnnnnnnnnnnnnnnnnnnnnnnnnnnnnnnnnnnnnnnnnnnnnnnnnnnnnnnnnnnnnnnnnnnnnnnnnnnnnnnnnnnnnnnnnnnnnnnnnnnnnnnnnnnnnnnnnnnnnnnnnnnnnnnnnnnnnnnnnnnnnnnnnnnnnnnnnnnnnnnnnnnnnnnnnnnnnnnnnnnnnnnnnnnnnnnnnnnnnnnnnnnnnnnnnnnnnnnnnnnnnnnnnnnnnnnnnnnnnnnnnnnnnnnnnnnnnnnnnnnnnnnnnnnnnnnnnnnnnnnnnnnnnnnnnnnnnnnnnnnnnnnnnnnnnnnnnnnnnnnnnnnnnnnnnnnnnnnnnnnnnnnnnnnnnnnnnnnnnnnnnnnnnnnnnnnnnnnnnnnnnnnnnnnnnnnnnnnnnnnnnnnnnnnnnnnnnnnnnnnnnnnnnnnnnnnnnnnnnnnnnnnnnnnnnnnnnnnnnnnnnnnnnnnnnnnnnnnnnnnnnnnnnnnnnnnnnnnnnnnnnnnnnnnnnnnnnnnnnnnnnnnnnnnnnnnnnnnnnnnnnnnnnnnnnnnnnnnnnnnnnnnnnnnnnnnnnnnnnnnnnnnnnnnnnnnnnnnnnnnnnnnnnnnnnnnnnnnnnnnnnnnnnnnnnnnnnnnnnnnnnnnnnnnnnnnnnnnnnnnnnnnnnnnnnnnnnnnnnnnnnnnnnnnnnnnnnnnnnnnnnnnnnnnnnnnnnnnnnnnnnnnnnnnnnnnnnnnnnnnnnnnnnnnnnnnnnnnnnnnnnnnnnnnnnnnnnnnnnnnnnnnnnnnnnnnnnnnnnnnnnnnnnnnnnnnnnnnnnnnnnnnnnnnnnnnnnnnnnnnnnnnnnnnnnnnnnnnnnnnnnnnnnnnnnnnnnnnnnnnnnnnnnnnnnnnnnnnnnnnnnnnnnnnnnnnnnnnnnnnnnnnnnnnnnnnnnnnnnnnnnnnnnnnnnnnnnnnnnnnnnnnnnnnnnnnnnnnnnnnnnnnnnnnnnnnnnnnnnnnnnnnnnnnnnnnnnnnnnnnnnnnnnnnnnnnnnnnnnnnnnnnnnnnnnnnnnnnnnnnnnnnnnnnnnnnnnnnnnnnnnnnnnnnnnnnnnnnnnnnnnnnnnnnnnnnnnnnnnnnnnnnnnnnnnnnnnnnnnnnnnnnnnnnnnnnnnnnnnnnnnnnnnnnnnnnnnnnnnnnnnnnnnnnnnnnnnnnnnnnnnnnnnnnnnnnnnnnnnnnnnnnnnnnnnnnnnnnnnnnnnnnnnnnnnnnnnnnnnnnnnnnnnnnnnnnnnnnnnnnnnnnnnnnnnnnnnnnnnnnnnnnnnnnnnnnnnnnnnnnnnnnnnnnnnnnnnnnnnnnnnnnnnnnnnnnnnnnnnnnnnnnnnnnnnnnnnnnnnnnnnnnnnnnnnnnnnnnnnnnnnnnnnnnnnnnnnnnnnnnnnnnnnnnnnnnnnnnnnnnnnnnnnnnnnnnnnnnnnnnnnnnnnnnnnnnnnnnnnnnnnnnnnnnnnnnnnnnnnnnnnnnnnnnnnnnnnnnnnnnnnnnnnnnnnnnnnnnnnnnnnnnnnnnnnnnnnnnnnnnnnnnnnnnnnnnnnnnnnnnnnnnnnnnnnnnnnnnnnnnnnnnnnnnnnnnnnnnnnnnnnnnnnnnnnnnnnnnnnnnnnnnnnnnnnnnnnnnnnnnnnnnnnnnnnnnnnnnnnnnnnnnnnnnnnnnnnnnnnnnnnnnnnnnnnnnnnnnnnnnnnnnnnnnnnnnnnnnnnnnnnnnnnnnnnnnnnnnnnnnnnnnnnnnnnnnnnnnnnnnnnnnnnnnnnnnnnnnnnnnnnnnnnnnnnnnnnnnnnnnnnnnnnnnnnnnnnnnnnnnnnnnnnnnnnnnnnnnnnnnnnnnnnnnnnnnnnnnnnnnnnnnnnnnnnnnnnnnnnnnnnnnnnnnnnnnnnnnnnnnnnnnnnnnnnnnnnnnnnnnnnnnnnnnnnnnnnnnnnnnnnnnnnnnnnnnnnnnnnnnnnnnnnnnnnnnnnnnnnnnnnnnnnnnnnnnnnnnnnnnnnnnnnnnnnnnnnnnnnnnnnnnnnnnnnnnnnnnnnnnnnnnnnnnnnnnnnnnnnnnnnnnnnnnnnnnnnnnnnnnnnnnnnnnnnnnnnnnnnnnnnnnnnnnnnnnnnnnnnnnnnnnnnnnnnnnnnnnnnnnnnnnnnnnnnnnnnnnnnnnnnnnnnnnnnnnnnnnnnnnnnnnnnnnnnnnnnnnnnnnnnnnnnnnnnnnnnnnnnnnnnnnnnnnnnnnnnnnnnnnnnnnnnnnnnnnnnnnnnnnnnnnnnnnnnnnnnnnnnnnnnnnnnnnnnnnnnnnnnnnnnnnnnnnnnnnnnnnnnnnnnnnnnnnnnnnnnnnnnnnnnnnnnnnnnnnnnnnnnnnnnnnnnnnnnnnnnnnnnnnnnnnnnnnnnnnnnnnnnnnnnnnnnnnnnnnnnnnnnnnnnnnnnnnnnnnnnnnnnnnnnnnnnnnnnnnnnnnnnnnnnnnnnnnnnnnnnnnnnnnnnnnnnnnnnnnnnnnnnnnnnnnnnnnnnnnnnnnnnnnnnnnnnnnnnnnnnnnnnnnnnnnnnnnnnnnnnnnnnnnnnnnnnnnnnnnnnnnnnnnnnnnnnnnnnnnnnnnnnnnnnnnnnnnnnnnnnnnnnnnnnnnnnnnnnnnnnnnnnnnnnnnnnnnnnnnnnnnnnnnnnnnnnnnnnnnnnnnnnnnnnnnnnnnnnnnnnnnnnnnnnnnnnnnnnnnnnnnnnnnnnnnnnnnnnnnnnnnnnnnnnnnnnnnnnnnnnnnnnnnnnnnnnnnnnnnnnnnnnnnnnnnnnnnnnnnnnnnnnnnnnnnnnnnnnnnnnnnnnnnnnnnnnnnnnnnnnnnnnnnnnnnnnnnnnnnnnnnnnnnnnnnnnnnnnnnnnnnnnnnnnnnnnnnnnnnnnnnnnnnnnnnnnnnnnnnnnnnnnnnnnnnnnnnnnnnnnnnnnnnnnnnnnnnnnnnnnnnnnnnnnnnnnnnnnnnnnnnnnnnnnnnnnnnnnnnnnnnnnnnnnnnnnnnnnnnnnnnnnnnnnnnnnnnnnnnnnnnnnnnnnnnnnnnnnnnnnnnnnnnnnnnnnnnnnnnnnnnnnnnnnnnnnnnnnnnnnnnnnnnnnnnnnnnnnnnnnnnnnnnnnnnnnnnnnnnnnnnnnnnnnnnnnnnnnnnnnnnnnnnnnnnnnnnnnnnnnnnnnnnnnnnnnnnnnnnnnnnnnnnnnnnnnnnnnnnnnnnnnnnnnnnnnnnnnnnnnnnnnnnnnnnnnnnnnnnnnnnnnnnnnnnnnnnnnnnnnnnnnnnnnnnnnnnnnnnnnnnnnnnnnnnnnnnnnnnnnnnnnnnnnnnnnnnnnnnnnnnnnnnnnnnnnnnnnnnnnnnnnnnnnnnnnnnnnnnnnnnnnnnnnnnnnnnnnnnnnnnnnnnnnnnnnnnnnnnnnnnnnnnnnnnnnnnnnnnnnnnnnnnnnnnnnnnnnnnnnnnnnnnnnnnnnnnnnnnnnnnnnnnnnnnnnnnnnnnnnnnnnnnnnnnnnnnnnnnnnnnnnnnnnnnnnnnnnnnnnnnnnnnnnnnnnnnnnnnnnnnnnnnnnnnnnnnnnnnnnnnnnnnnnnnnnnnnnnnnnnnnnnnnnnnnnnnnnnnnnnnnnnnnnnnnnnnnnnnnnnnnnnnnnnnnnnnnnnnnnnnnnnnnnnnnnnnnnnnnnnnnnnnnnnnnnnnnnnnnnnnnnnnnnnnnnnnnnnnnnnnnnnnnnnnnnnnnnnnnnnnnnnnnnnnnnnnnnnnnnnnnnnnnnnnnnnnnnnnnnnnnnnnnnnnnnnnnnnnnnnnnnnnnnnnnnnnnnnnnnnnnnnnnnnnnnnnnnnnnnnnnnnnnnnnnnnnnnnnnnnnnnnnnnnnnnnnnnnnnnnnnnnnnnnnnnnnnnnnnnnnnnnnnnnnnnnnnnnnnnnnnnnnnnnnnnnnnnnnnnnnnnnnnnnnnnnnnnnnnnnnnnnnnnnnnnnnnnnnnnnnnnnnnnnnnnnnnnnnnnnnnnnnnnnnnnnnnnnnnnnnnnnnnnnnnnnnnnnnnnnnnnnnnnnnnnnnnnnnnnnnnnnnnnnnnnnnnnnnnnnnnnnnnnnnnnnnnnnnnnnnnnnnnnnnnnnnnnnnnnnnnnnnnnnnnnnnnnnnnnnnnnnnnnnnnnnnnnnnnnnnnnnnnnnnnnnnnnnnnnnnnnnnnnnnnnnnnnnnnnnnnnnnnnnnnnnnnnnnnnnnnnnnnnnnnnnnnnnnnnnnnnnnnnnnnnnnnnnnnnnnnnnnnnnnnnnnnnnnnnnnnnnnnnnnnnnnnnnnnnnnnnnnnnnnnnnnnnnnnnnnnnnnnnnnnnnnnnnnnnnnnnnnnnnnnnnnnnnnnnnnnnnnnnnnnnnnnnnnnnnnnnnnnnnnnnnnnnnnnnnnnnnnnnnnnnnnnnnnnnnnnnnnnnnnnnnnnnnnnnnnnnnnnnnnnnnnnnnnnnnnnnnnnnnnnnnnnnnnnnnnnnnnnnnnnnnnnnnnnnnnnnnnnnnnnnnnnnnnnnnnnnnnnnnnnnnnnnnnnnnnnnnnnnnnnnnnnnnnnnnnnnnnnnnnnnnnnnnnnnnnnnnnnnnnnnnnnnnnnnnnnnnnnnnnnnnnnnnnnnnnnnnnnnnnnnnnnnnnnnnnnnnnnnnnnnnnnnnnnnnnnnnnnnnnnnnnnnnnnnnnnnnnnnnnnnnnnnnnnnnnnnnnnnnnnnnnnnnnnnnnnnnnnnnnnnnnnnnnnnnnnnnnnnnnnnnnnnnnnnnnnnnnnnnnnnnnnnnnnnnnnnnnnnnnnnnnnnnnnnnnnnnnnnnnnnnnnnnnnnnnnnnnnnnnnnnnnnnnnnnnnnnnnnnnnnnnnnnnnnnnnnnnnnnnnnnnnnnnnnnnnnnnnnnnnnnnnnnnnnnnnnnnnnnnnnnnnnnnnnnnnnnnnnnnnnnnnnnnnnnnnnnnnnnnnnnnnnnnnnnnnnnnnnnnnnnnnnnnnnnnnnnnnnnnnnnnnnnnnnnnnnnnnnnnnnnnnnnnnnnnnnnnnnnnnnnnnnnnnnnnnnnnnnnnnnnnnnnnnnnnnnnnnnnnnnnnnnnnnnnnnnnnnnnnnnnnnnnnnnnnnnnnnnnnnnnnnnnnnnnnnnnnnnnnnnnnnnnnnnnnnnnnnnnnnnnnnnnnnnnnnnnnnnnnnnnnnnnnnnnnnnnnnnnnnnnnnnnnnnnnnnnnnnnnnnnnnnnnnnnnnnnnnnnnnnnnnnnnnnnnnnnnnnnnnnnnnnnnnnnnnnnnnnnnnnnnnnnnnnnnnnnnnnnnnnnnnnnnnnnnnnnnnnnnnnnnnnnnnnnnnnnnnnnnnnnnnnnnnnnnnnnnnnnnnnnnnnnnnnnnnnnnnnnnnnnnnnnnnnnnnnnnnnnnnnnnnnnnnnnnnnnnnnnnnnnnnnnnnnnnnnnnnnnnnnnnnnnnnnnnnnnnnnnnnnnnnnnnnnnnnnnnnnnnnnnnnnnnnnnnnnnnnnnnnnnnnnnnnnnnnnnnnnnnnnnnnnnnnnnnnnnnnnnnnnnnnnnnnnnnnnnnnnnnnnnnnnnnnnnnnnnnnnnnnnnnnnnnnnnnnnnnnnnnnnnnnnnnnnnnnnnnnnnnnnnnnnnnnnnnnnnnnnnnnnnnnnnnnnnnnnnnnnnnnnnnnnnnnnnnnnnnnnnnnnnnnnnnnnnnnnnnnnnnnnnnnnnnnnnnnnnnnnnnnnnnnnnnnnnnnnnnnnnnnnnnnnnnnnnnnnnnnnnnnnnnnnnnnnnnnnnnnnnnnnnnnnnnnnnnnnnnnnnnnnnnnnnnnnnnnnnnnnnnnnnnnnnnnnnnnnnnnnnnnnnnnnnnnnnnnnnnnnnnnnnnnnnnnnnnnnnnnnnnnnnnnnnnnnnnnnnnnnnnnnnnnnnnnnnnnnnnnnnnnnnnnnnnnnnnnnnnnnnnnnnnnnnnnnnnnnnnnnnnnnnnnnnnnnnnnnnnnnnnnnnnnnnnnnnnnnnnnnnnnnnnnnnnnnnnnnnnnnnnnnnnnnnnnnnnnnnnnnnnnnnnnnnnnnnnnnnnnnnnnnnnnnnnnnnnnnnnnnnnnnnnnnnnnnnnnnnnnnnnnnnnnnnnnnnnnnnnnnnnnnnnnnnnnnnnnnnnnnnnnnnnnnnnnnnnnnnnnnnnnnnnnnnnnnnnnnnnnnnnnnnnnnnnnnnnnnnnnnnnnnnnnnnnnnnnnnnnnnnnnnnnnnnnnnnnnnnnnnnnnnnnnnnnnnnnnnnnnnnnnnnnnnnnnnnnnnnnnnnnnnnnnnnnnnnnnnnnnnnnnnnnnnnnnnnnnnnnnnnnnnnnnnnnnnnnnnnnnnnnnnnnnnnnnnnnnnnnnnnnnnnnnnnnnnnnnnnnnnnnnnnnnnnnnnnnnnnnnnnnnnnnnnnnnnnnnnnnnnnnnnnnnnnnnnnnnnnnnnnnnnnnnnnnnnnnnnnnnnnnnnnnnnnnnnnnnnnnnnnnnnnnnnnnnnnnnnnnnnnnnnnnnnnnnnnnnnnnnnnnnnnnnnnnnnnnnnnnnnnnnnnnnnnnnnnnnnnnnnnnnnnnnnnnnnnnnnnnnnnnnnnnnnnnnnnnnnnnnnnnnnnnnnnnnnnnnnnnnnnnnnnnnnnnnnnnnnnnnnnnnnnnnnnnnnnnnnnnnnnnnnnnnnnnnnnnnnnnnnnnnnnnnnnnnnnnnnnnnnnnnnnnnnnnnnnnnnnnnnnnnnnnnnnnnnnnnnnnnnnnnnnnnnnnnnnnnnnnnnnnnnnnnnnnnnnnnnnnnnnnnnnnnnnnnnnnnnnnnnnnnnnnnnnnnnnnnnnnnnnnnnnnnnnnnnnnnnnnnnnnnnnnnnnnnnnnnnnnnnnnnnnnnnnnnnnnnnnnnnnnnnnnnnnnnnnnnnnnnnnnnnnnnnnnnnnnnnnnnnnggtgaagccaccccggaattgggtggctactgaaacctcgactactctgtccatgagttcgagtggggtgaagccaccccggaattgggtggctactgaaacaggaactgtgtctcacccatgctcccgtctggtgaagccaccccggaattgggtggctactgaaacctcgatgccgattacgaggccaagcgcgctggtgaagccaccccggaattgggtggctactgaaacccgccgccgcgctgcgatgattgccccgagggtgaagccaccccggaattgggtggctactgaaacagcatcatgcgttccccatggtcttgatgtggtgaagccaccccggaattgggtggctactgaaacttcgttgttagagagggaagaaccgggcgaggtgaagccaccccggaattgggtggctactgaaaccacgccaagatcgccatggagtcgatcgccggtgaagccaccccggaattgggtggctactgaaacagcacgcgctcgacgcggtcgtaatcggccggtaaagccacccccaaattgggtggctactgaaactcgggtgttcggaaaggatggcgtcgatcatggtgaagccacccccaaattgggtggctactgaaacatcaagtcttgcgcgaggcgcttgtgaaggtgaagccacctccgaattgggtggttactgaaacggcgcttgcgagtgatcccgcggcaccaggggtgaagccacccccaaactgggtggctactgaaacatcacgaggttgttttcgagttgcgccagaggtgaagccacccctcaattgggtggcaaatgaaacgacagatcgcaaagcatgtcgcgcgctctggtgaagccacccctgttttgggtggttactggaaggacgtctgatgttccgatcatccgaacagcaaaacttcgccgcgatggtcgccgcccacatctccaaggccgacggcccgttgctgctcgaaggtggcaccggcatcgggaagacgcgcgcctatctgtcggcgctcatcggctccggcaaacgggtcgcgattgtgttgccgacccaccagctcatcgagcagctgcttgcttccaccgatctcgcagaggccaatgccagaggcatcaccgtcgccgcttttcgaccggcgtcgaagttcgataccagggccgactacttggcgaaccgtgaagtcgcggccagtgcgcaactcatgttgtgcactgccgccagtgtcatcatcgaccgccgtctggacggcaaatacaacggcgcgaccgaacgggattatcttctcttcgatgaggctgaccagttgccggcgatggccgctcttcagtccgacatggaggttaccggcgaggccctcaagacgctggggatcgaaggcgaaacgacccgtaatctggccgacgccgtcgtcgcgtccaagaaggccgagccggaacagcgcgccgccgccaagatgatcctcgaagtcctgggcgagcccgcgtggtttcatgtggcaggcaaggccgacgatggtggcatccgcctctggcatcggctaccggggcggctactgcgcgagatcgccaaccaaccaaacgtcgcctttgtcagcgccaccctgactgtcggaggtctgtttaacgacttcaagtgtgcgctcggcatccagagtgaaagcgagctgtcgggtgtcgtcgaacctgagcgacacggcacggtcgagttccggaccgttgtgtcgcaagccgtggacgccgacggctggctcgaaaaggtggcggcgaccgtcaggcaggcagaggctcccgtgctggtcgtaacgccctcgttcgaccgtgctgagaagattggcgcgctggtggaaggcgcgacggtgcggcagcgcgaggaagccgttggcgacgccatggctcgaatgggcggctcccgaaccctgattggggcagccgcctgggccggcctcgacacgcccatccagtggcggtcaattgtcgtgcctgttgtgcctttcgagcgcctgacggagatcgaagggcaagtcgagagccactacatcgatgcgcgcaacacggccgtgcgacgcctgcgccaggtgatcggtcggggactgcggtcgcccgatgcccgctgcaccgtctacttcctcgatcctcgtgtcttgaagctaccggccttctggcccagccggttttcctcggcctgggtggcccgccctcgcgatccgggtgtcctcgaaggggcgcgaggcgaggtggtcctgtccaaagccgagcgcgacacgtctcttagaaagcgcgcccttgcccactacggtctgcattgtcgggcgtgtggtctggtacccaaggtcgccgcccagatcgaggtacatcacctcgaccccatctcggaaggcatccggcgcacgacgttagcggacctgtgccccctttgtcggaactgtcactcacttgcccactccacgagcccgcctatgccggtcgaggaggttgcgaagatcgtgggggcctagggtccgaatgcaattggacgtaacgcgttgccttcaagcttcggcaatccggcaggcagcactagtctaggccgcctgttcgagcgtcgaggcgacgtcgcgcgtggtcacgcggcgcaggtcgcgcaccttggtcgtgtcgaacggccgcgcacgatgcatggtgcagcgattgtcccagatcacgaggtcgcccttcgcccagcgatggacatgcacgaagcgcggctgggtcgcgtgctcgatcaggtcgaggatgatcaggcgcccgtcggccaccggcaggcccaggatgtgcgaggcgtgcgcggcgagatagagcgtcctgcgatgcgagccgggatgggttcgcaccacccgctgcggcaccggcggcagcgaggcgcgttcctcgtcggtgtactgcacgacgcccagctgctcgcgcgaccgccagatcgaatgttcggcgaccagcccttccagctccttcttcttcgtctccggcagcgcgtcgtacgccgcgcgcaagtcggcgaactcggtgtcgccgccttcctcgggaatgacgtgcgcgtagagcatcgagagaccgccgggcacggcgcggaacgaggcgtcggtgtgccagagccggttggccaggccgtcgagccggcgccgcgcgtcgggcttcatgacgttgccgtcgccgtcgaggttggagatgtcggcgacctggctcgatgcgatccggtgcttgatgtcgcgatgccgaagcttcagcgccgacgattcgatcgggccgaaattgctggcgaaggcgacctgccgctcgtcgtcgagcgtctgcccgcggaacaccacgaccgcgtagcggttgatggcgtcctcgatggcctgccggtcggtgggcttgagcggtcgtgccacgtcgacaccggcaatctcggccacgaattcaggatgagttggcgtaacggtgatgctcacgactgcctcccgcggctatagtgcatttgcaatcattctctcccaggaaacgccatgccgcaaaccatgaagctcgctttgctcgacgattaccagaaggttgccctgcgcatggccgactgggaccgcctcaggaagcgcggcgtcgagatcacggtgttccacgagcccttcgcctcggtcgaggatgcggcgcagaagctggcgccgttcgacatgctgggattgctgcgggagcgcacggcgttcccgcgcgccctgatagagaagctgcccaacctcaagttcatggtgctgaccggcgcccgtgccgccagcctcgacgacaaggcggcggccgagcgcggcatcccgatctccacgacgcccggcggcacctcgaacgcgccgacggcggaactgggctgggcgctgctgatgatgtgcgcccgcgatctcgccaaggccgagcggctggcgcgtcagggcaagtggcatgacggcatcgagcagatggtcgtgctcgagggcaagcggctgggcattctcggtctcggcaagctgggcagccgcgcggcccactacgccaaggccttcggcatggaggtcgtggcctggagccagaacctcacacccgagaaggcggaagcgggcggcgcgaagtacgtcaccaaggacgagttgctggcgacctcggacttcgtgtcgatccatcttgcgttgtcggatcgcacgcgcggcctgatcggtgcggccgagctggcgaagatgaagaagaccgcgatcctggtgaacacctcgcgcgggccgatcgtcgacgaagcggccctgatcgaggcgctgaagaaccgcaccatcctgcatgccggtctcgacgtctacgacagggagccgatgtcggccgaccatcccttcaccaggctcgacaacatcacgctcattcctcacctgggctacgtcgtcgaggagagctaccggcacttctacgagggcacgatcagggacatcgaggcctggctcgatggcagtccgatcaacgtcctcaatccggacgcgctcaagaagccctagcgtccttctgtcctctgttgacggacccacctcatcctgggagcgccgcccctcgagtacctcgggataaactccacggcgcgtctcgaaggatgggcaacggacggggtgcgcgtgcccacccttcgagacgctcactgcgttcgctcctcagggtgaggtcggtatgtggatgcccggctggattctttctcgtccggaaaggctcctgcaggctgctgaaaagtcggagctggggc

SEQ ID NO: 132 - DNA, 13831 bp, Artificial Sequence
  Synthetic Oligonucleotide
  misc_feature (1)..(9224): n is a, c, g, or t
nnnnnnnnnnnnnnnnnnnnnnnnnnnnnnnnnnnnnnnnnnnnnnnnnnnnnnnnnnnnnnnnnnnnnnnnnnnnnnnnnnnnnnnnnnnnnnnnnnnnnnnnnnnnnnnnnnnnnnnnnnnnnnnnnnnnnnnnnnnnnnnnnnnnnnnnnnnnnnnnnnnnnnnnnnnnnnnnnnnnnnnnnnnnnnnnnnnnnnnnnnnnnnnnnnnnnnnnnnnnnnnnnnnnnnnnnnnnnnnnnnnnnnnnnnnnnnnnnnnnnnnnnnnnnnnnnnnnnnnnnnnnnnnnnnnnnnnnnnnnnnnnnnnnnnnnnnnnnnnnnnnnnnnnnnnnnnnnnnnnnnnnnnnnnnnnnnnnnnnnnnnnnnnnnnnnnnnnnnnnnnnnnnnnnnnnnnnnnnnnnnnnnnnnnnnnnnnnnnnnnnnnnnnnnnnnnnnnnnnnnnnnnnnnnnnnnnnnnnnnnnnnnnnnnnnnnnnnnnnnnnnnnnnnnnnnnnnnnnnnnnnnnnnnnnnnnnnnnnnnnnnnnnnnnnnnnnnnnnnnnnnnnnnnnnnnnnnnnnnnnnnnnnnnnnnnnnnnnnnnnnnnnnnnnnnnnnnnnnnnnnnnnnnnnnnnnnnnnnnnnnnnnnnnnnnnnnnnnnnnnnnnnnnnnnnnnnnnnnnnnnnnnnnnnnnnnnnnnnnnnnnnnnnnnnnnnnnnnnnnnnnnnnnnnnnnnnnnnnnnnnnnnnnnnnnnnnnnnnnnnnnnnnnnnnnnnnnnnnnnnnnnnnnnnnnnnnnnnnnnnnnnnnnnnnnnnnnnnnnnnnnnnnnnnnnnnnnnnnnnnnnnnnnnnnnnnnnnnnnnnnnnnnnnnnnnnnnnnnnnnnnnnnnnnnnnnnnnnnnnnnnnnnnnnnnnnnnnnnnnnnnnnnnnnnnnnnnnnnnnnnnnnnnnnnnnnnnnnnnnnnnnnnnnnnnnnnnnnnnnnnnnnnnnnnnnnnnnnnnnnnnnnnnnnnnnnnnnnnnnnnnnnnnnnnnnnnnnnnnnnnnnnnnnnnnnnnnnnnnnnnnnnnnnnnnnnnnnnnnnnnnnnnnnnnnnnnnnnnnnnnnnnnnnnnnnnnnnnnnnnnnnnnnnnnnnnnnnnnnnnnnnnnnnnnnnnnnnnnnnnnnnnnnnnnnnnnnnnnnnnnnnnnnnnnnnnnnnnnnnnnnnnnnnnnnnnnnnnnnnnnnnnnnnnnnnnnnnnnnnnnnnnnnnnnnnnnnnnnnnnnnnnnnnnnnnnnnnnnnnnnnnnnnnnnnnnnnnnnnnnnnnnnnnnnnnnnnnnnnnnnnnnnnnnnnnnnnnnnnnnnnnnnnnnnnnnnnnnnnnnnnnnnnnnnnnnnnnnnnnnnnnnnnnnnnnnnnnnnnnnnnnnnnnnnnnnnnnnnnnnnnnnnnnnnnnnnnnnnnnnnnnnnnnnnnnnnnnnnnnnnnnnnnnnnnnnnnnnnnnnnnnnnnnnnnnnnnnnnnnnnnnnnnnnnnnnnnnnnnnnnnnnnnnnnnnnnnnnnnnnnnnnnnnnnnnnnnnnnnnnnnnnnnnnnnnnnnnnnnnnnnnnnnnnnnnnnnnnnnnnnnnnnnnnnnnnnnnnnnnnnnnnnnnnnnnnnnnnnnnnnnnnnnnnnnnnnnnnnnnnnnnnnnnnnnnnnnnnnnnnnnnnnnnnnnnnnnnnnnnnnnnnnnnnnnnnnnnnnnnnnnnnnnnnnnnnnnnnnnnnnnnnnnnnnnnnnnnnnnnnnnnnnnnnnnnnnnnnnnnnnnnnnnnnnnnnnnnnnnnnnnnnnnnnnnnnnnnnnnnnnnnnnnnnnnnnnnnnnnnnnnnnnnnnnnnnnnnnnnnnnnnnnnnnnnnnnnnnnnnnnnnnnnnnnnnnnnnnnnnnnnnnnnnnnnnnnnnnnnnnnnnnnnnnnnnnnnnnnnnnnnnnnnnnnnnnnnnnnnnnnnnnnnnnnnnnnnnnnnnnnnnnnnnnnnnnnnnnnnnnnnnnnnnnnnnnnnnnnnnnnnnnnnnnnnnnnnnnnnnnnnnnnnnnnnnnnnnnnnnnnnnnnnnnnnnnnnnnnnnnnnnnnnnnnnnnnnnnnnnnnnnnnnnnnnnnnnnnnnnnnnnnnnnnnnnnnnnnnnnnnnnnnnnnnnnnnnnnnnnnnnnnnnnnnnnnnnnnnnnnnnnnnnnnnnnnnnnnnnnnnnnnnnnnnnnnnnnnnnnnnnnnnnnnnnnnnnnnnnnnnnnnnnnnnnnnnnnnnnnnnnnnnnnnnnnnnnnnnnnnnnnnnnnnnnnnnnnnnnnnnnnnnnnnnnnnnnnnnnnnnnnnnnnnnnnnnnnnnnnnnnnnnnnnnnnnnnnnnnnnnnnnnnnnnnnnnnnnnnnnnnnnnnnnnnnnnnnnnnnnnnnnnnnnnnnnnnnnnnnnnnnnnnnnnnnnnnnnnnnnnnnnnnnnnnnnnnnnnnnnnnnnnnnnnnnnnnnnnnnnnnnnnnnnnnnnnnnnnnnnnnnnnnnnnnnnnnnnnnnnnnnnnnnnnnnnnnnnnnnnnnnnnnnnnnnnnnnnnnnnnnnnnnnnnnnnnnnnnnnnnnnnnnnnnnnnnnnnnnnnnnnnnnnnnnnnnnnnnnnnnnnnnnnnnnnnnnnnnnnnnnnnnnnnnnnnnnnnnnnnnnnnnnnnnnnnnnnnnnnnnnnnnnnnnnnnnnnnnnnnnnnnnnnnnnnnnnnnnnnnnnnnnnnnnnnnnnnnnnnnnnnnnnnnnnnnnnnnnnnnnnnnnnnnnnnnnnnnnnnnnnnnnnnnnnnnnnnnnnnnnnnnnnnnnnnnnnnnnnnnnnnnnnnnnnnnnnnnnnnnnnnnnnnnnnnnnnnnnnnnnnnnnnnnnnnnnnnnnnnnnnnnnnnnnnnnnnnnnnnnnnnnnnnnnnnnnnnnnnnnnnnnnnnnnnnnnnnnnnnnnnnnnnnnnnnnnnnnnnnnnnnnnnnnnnnnnnnnnnnnnnnnnnnnnnnnnnnnnnnnnnnnnnnnnnnnnnnnnnnnnnnnnnnnnnnnnnnnnnnnnnnnnnnnnnnnnnnnnnnnnnnnnnnnnnnnnnnnnnnnnnnnnnnnnnnnnnnnnnnnnnnnnnnnnnnnnnnnnnnnnnnnnnnnnnnnnnnnnnnnnnnnnnnnnnnnnnnnnnnnnnnnnnnnnnnnnnnnnnnnnnnnnnnnnnnnnnnnnnnnnnnnnnnnnnnnnnnnnnnnnnnnnnnnnnnnnnnnnnnnnnnnnnnnnnnnnnnnnnnnnnnnnnnnnnnnnnnnnnnnnnnnnnnnnnnnnnnnnnnnnnnnnnnnnnnnnnnnnnnnnnnnnnnnnnnnnnnnnnnnnnnnnnnnnnnnnnnnnnnnnnnnnnnnnnnnnnnnnnnnnnnnnnnnnnnnnnnnnnnnnnnnnnnnnnnnnnnnnnnnnnnnnnnnnnnnnnnnnnnnnnnnnnnnnnnnnnnnnnnnnnnnnnnnnnnnnnnnnnnnnnnnnnnnnnnnnnnnnnnnnnnnnnnnnnnnnnnnnnnnnnnnnnnnnnnnnnnnnnnnnnnnnnnnnnnnnnnnnnnnnnnnnnnnnnnnnnnnnnnnnnnnnnnnnnnnnnnnnnnnnnnnnnnnnnnnnnnnnnnnnnnnnnnnnnnnnnnnnnnnnnnnnnnnnnnnnnnnnnnnnnnnnnnnnnnnnnnnnnnnnnnnnnnnnnnnnnnnnnnnnnnnnnnnnnnnnnnnnnnnnnnnnnnnnnnnnnnnnnnnnnnnnnnnnnnnnnnnnnnnnnnnnnnnnnnnnnnnnnnnnnnnnnnnnnnnnnnnnnnnnnnnnnnnnnnnnnnnnnnnnnnnnnnnnnnnnnnnnnnnnnnnnnnnnnnnnnnnnnnnnnnnnnnnnnnnnnnnnnnnnnnnnnnnnnnnnnnnnnnnnnnnnnnnnnnnnnnnnnnnnnnnnnnnnnnnnnnnnnnnnnnnnnnnnnnnnnnnnnnnnnnnnnnnnnnnnnnnnnnnnnnnnnnnnnnnnnnnnnnnnnnnnnnnnnnnnnnnnnnnnnnnnnnnnnnnnnnnnnnnnnnnnnnnnnnnnnnnnnnnnnnnnnnnnnnnnnnnnnnnnnnnnnnnnnnnnnnnnnnnnnnnnnnnnnnnnnnnnnnnnnnnnnnnnnnnnnnnnnnnnnnnnnnnnnnnnnnnnnnnnnnnnnnnnnnnnnnnnnnnnnnnnnnnnnnnnnnnnnnnnnnnnnnnnnnnnnnnnnnnnnnnnnnnnnnnnnnnnnnnnnnnnnnnnnnnnnnnnnnnnnnnnnnnnnnnnnnnnnnnnnnnnnnnnnnnnnnnnnnnnnnnnnnnnnnnnnnnnnnnnnnnnnnnnnnnnnnnnnnnnnnnnnnnnnnnnnnnnnnnnnnnnnnnnnnnnnnnnnnnnnnnnnnnnnnnnnnnnnnnnnnnnnnnnnnnnnnnnnnnnnnnnnnnnnnnnnnnnnnnnnnnnnnnnnnnnnnnnnnnnnnnnnnnnnnnnnnnnnnnnnnnnnnnnnnnnnnnnnnnnnnnnnnnnnnnnnnnnnnnnnnnnnnnnnnnnnnnnnnnnnnnnnnnnnnnnnnnnnnnnnnnnnnnnnnnnnnnnnnnnnnnnnnnnnnnnnnnnnnnnnnnnnnnnnnnnnnnnnnnnnnnnnnnnnnnnnnnnnnnnnnnnnnnnnnnnnnnnnnnnnnnnnnnnnnnnnnnnnnnnnnnnnnnnnnnnnnnnnnnnnnnnnnnnnnnnnnnnnnnnnnnnnnnnnnnnnnnnnnnnnnnnnnnnnnnnnnnnnnnnnnnnnnnnnnnnnnnnnnnnnnnnnnnnnnnnnnnnnnnnnnnnnnnnnnnnnnnnnnnnnnnnnnnnnnnnnnnnnnnnnnnnnnnnnnnnnnnnnnnnnnnnnnnnnnnnnnnnnnnnnnnnnnnnnnnnnnnnnnnnnnnnnnnnnnnnnnnnnnnnnnnnnnnnnnnnnnnnnnnnnnnnnnnnnnnnnnnnnnnnnnnnnnnnnnnnnnnnnnnnnnnnnnnnnnnnnnnnnnnnnnnnnnnnnnnnnnnnnnnnnnnnnnnnnnnnnnnnnnnnnnnnnnnnnnnnnnnnnnnnnnnnnnnnnnnnnnnnnnnnnnnnnnnnnnnnnnnnnnnnnnnnnnnnnnnnnnnnnnnnnnnnnnnnnnnnnnnnnnnnnnnnnnnnnnnnnnnnnnnnnnnnnnnnnnnnnnnnnnnnnnnnnnnnnnnnnnnnnnnnnnnnnnnnnnnnnnnnnnnnnnnnnnnnnnnnnnnnnnnnnnnnnnnnnnnnnnnnnnnnnnnnnnnnnnnnnnnnnnnnnnnnnnnnnnnnnnnnnnnnnnnnnnnnnnnnnnnnnnnnnnnnnnnnnnnnnnnnnnnnnnnnnnnnnnnnnnnnnnnnnnnnnnnnnnnnnnnnnnnnnnnnnnnnnnnnnnnnnnnnnnnnnnnnnnnnnnnnnnnnnnnnnnnnnnnnnnnnnnnnnnnnnnnnnnnnnnnnnnnnnnnnnnnnnnnnnnnnnnnnnnnnnnnnnnnnnnnnnnnnnnnnnnnnnnnnnnnnnnnnnnnnnnnnnnnnnnnnnnnnnnnnnnnnnnnnnnnnnnnnnnnnnnnnnnnnnnnnnnnnnnnnnnnnnnnnnnnnnnnnnnnnnnnnnnnnnnnnnnnnnnnnnnnnnnnnnnnnnnnnnnnnnnnnnnnnnnnnnnnnnnnnnnnnnnnnnnnnnnnnnnnnnnnnnnnnnnnnnnnnnnnnnnnnnnnnnnnnnnnnnnnnnnnnnnnnnnnnnnnnnnnnnnnnnnnnnnnnnnnnnnnnnnnnnnnnnnnnnnnnnnnnnnnnnnnnnnnnnnnnnnnnnnnnnnnnnnnnnnnnnnnnnnnnnnnnnnnnnnnnnnnnnnnnnnnnnnnnnnnnnnnnnnnnnnnnnnnnnnnnnnnnnnnnnnnnnnnnnnnnnnnnnnnnnnnnnnnnnnnnnnnnnnnnnnnnnnnnnnnnnnnnnnnnnnnnnnnnnnnnnnnnnnnnnnnnnnnnnnnnnnnnnnnnnnnnnnnnnnnnnnnnnnnnnnnnnnnnnnnnnnnnnnnnnnnnnnnnnnnnnnnnnnnnnnnnnnnnnnnnnnnnnnnnnnnnnnnnnnnnnnnnnnnnnnnnnnnnnnnnnnnnnnnnnnnnnnnnnnnnnnnnnnnnnnnnnnnnnnnnnnnnnnnnnnnnnnnnnnnnnnnnnnnnnnnnnnnnnnnnnnnnnnnnnnnnnnnnnnnnnnnnnnnnnnnnnnnnnnnnnnnnnnnnnnnnnnnnnnnnnnnnnnnnnnnnnnnnnnnnnnnnnnnnnnnnnnnnnnnnnnnnnnnnnnnnnnnnnnnnnnnnnnnnnnnnnnnnnnnnnnnnnnnnnnnnnnnnnnnnnnnnnnnnnnnnnnnnnnnnnnnnnnnnnnnnnnnnnnnnnnnnnnnnnnnnnnnnnnnnnnnnnnnnnnnnnnnnnnnnnnnnnnnnnnnnnnnnnnnnnnnnnnnnnnnnnnnnnnnnnnnnnnnnnnnnnnnnnnnnnnnnnnnnnnnnnnnnnnnnnnnnnnnnnnnnnnnnnnnnnnnnnnnnnnnnnnnnnnnnnnnnnnnnnnnnnnnnnnnnnnnnnnnnnnnnnnnnnnnnnnnnnnnnnnnnnnnnnnnnnnnnnnnnnnnnnnnnnnnnnnnnnnnnnnnnnnnnnnnnnnnnnnnnnnnnnnnnnnnnnnnnnnnnnnnnnnnnnnnnnnnnnnnnnnnnnnnnnnnnnnnnnnnnnnnnnnnnnnnnnnnnnnnnnnnnnnnnnnnnnnnnnnnnnnnnnnnnnnnnnnnnnnnnnnnnnnnnnnnnnnnnnnnnnnnnnnnnnnnnnnnnnnnnnnnnnnnnnnnnnnnnnnnnnnnnnnnnnnnnnnnnnnnnnnnnnnnnnnnnnnnnnnnnnnnnnnnnnnnnnnnnnnnnnnnnnnnnnnnnnnnnnnnnnnnnnnnnnnnnnnnnnnnnnnnnnnnnnnnnnnnnnnnnnnnnnnnnnnnnnnnnnnnnnnnnnnnnnnnnnnnnnnnnnnnnnnnnnnnnnnnnnnnnnnnnnnnnnnnnnnnnnnnnnnnnnnnnnnnnnnnnnnnnnnnnnnnnnnnnnnnnnnnnnnnnnnnnnnnnnnnnnnnnnnnnnnnnnnnnnnnnnnnnnnnnnnnnnnnnnnnnnnnnnnnnnnnnnnnnnnnnnnnnnnnnnnnnnnnnnnnnnnnnnnnnnnnnnnnnnnnnnnnnnnnnnnnnnnnnnnnnnnnnnnnnnnnnnnnnnnnnnnnnnnnnnnnnnnnnnnnnnnnnnnnnnnnnnnnnnnnnnnnnnnnnnnnnnnnnnnnnnnnnnnnnnnnnnnnnnnnnnnnnnnnnnnnnnnnnnnnnnnnnnnnnnnnnnnnnnnnnnnnnnnnnnnnnnnnnnnnnnnnnnnnnnnnnnnnnnnnnnnnnnnnnnnnnnnnnnnnnnnnnnnnnnnnnnnnnnnnnnnnnnnnnnnnnnnnnnnnnnnnnnnnnnnnnnnnnnnnnnnnnnnnnnnnnnnnnnnnnnnnnnnnnnnnnnnnnnnnnnnnnnnnnnnnnnnnnnnnnnnnnnnnnnnnnnnnnnnnnnnnnnnnnnnnnnnnnnnnnnnnnnnnnnnnnnnnnnnnnnnnnnnnnnnnnnnnnnnnnnnnnnnnnnnnnnnnnnnnnnnnnnnnnnnnnnnnnnnnnnnnnnnnnnnnnnnnnnnnnnnnnnnnnnnnnnnnnnnnnnnnnnnnnnnnnnnnnnnnnnnnnnnnnnnnnnnnnnnnnnnnnnnnnnnnnnnnnnnnnnnnnnnnnnnnnnnnnnnnnnnnnnnnnnnnnnnnnnnnnnnnnnnnnnnnnnnnnnnnnnnnnnnnnnnnnnnnnnnnnnnnnnnnnnnnnnnnnnnnnnnnnnnnnnnnnnnnnnnnnnnnnnnnnnnnnnnnnnnnnnnnnnnnnnnnnnnnnnnnnnnnnnnnnnnnnnnnnnnnnnnnnnnnnnnnnnnnnnnnnnnnnnnnnnnnnnnnnnnnnnnnnnnnnnnnnnnnnnnnnnnnnnnnnnnnnnnnnnnnnnnnnnnnnnnnnnnnnnnnnnnnnnnnnnnnnnnnnnnnnnnnnnnnnnnnnnnnnnnnnnnnnnnnnnnnnnnnnnnnnnnnnnnnnnnnnnnnnnnnnnnnnnnnnnnnnnnnnnnnnnnnnnnnnnnnnnnnnnnnnnnnnnnnnnnnnnnnnnnnnnnnnnnnnnnnnnnnnnnnnnnnnnnnnnnnnnnnnnnnnnnnnnnnnnnnnnnnnnnnnnnnnnnnnnnnnnnnnnnnnnnnnnnnnnnnnnnnnnnnnnnnnnnnnnnnnnnnnnnnnnnnnnnnnnnnnnnnnnnnnnnnnnnnnnnnnnnnnnnnnnnnnnnnnnnnnnnnnnnnnnnnnnnnnnnnnnnnnnnnnnnnnnnnnnnnnnnnnnnnnnnnnnnnnnnnnnnnnnnnnnnnnnnnnnnnnnnnnnnnnnnnnnnnnnnnnnnnnnnnnnnnnnnnnnnnnnnnnnnnnnnnnnnnnnnnnnnnnnnnnnnnnnnnnnnnnnnnnnnnnnnnnnnnnnnnnnnnnnnnnnnnnnnnnnnnnnnnnnnnnnnnnnnnnnnnnnnnnnnnnnnnnnnnnnnnnnnnnnnnnnnnnnnnnnnnnnnnnnnnnnnnnnnnnnnnnnnnnnnnnnnnnnnnnnnnnnnnnnnnnnnnnnnnnnnnnnnnnnnnnnnnnnnnnnnnnnnnnnnnnnnnnnnnnnnnnnnnnnnnnnnnnnnnnnnnnnnnnnnnnnnnnnnnnnnnnnnnnnnnnnnnnnnnnnnnnnnnnnnnnnnnnnnnnnnnnnnnnnnnnnnnnnnnnnnnnnnnnnnnnnnnnnnnnnnnnnnnnnnnnnnnnnnnnnnnnnnnnnnnnnnnnnnnnnnnnnnnnnnnnnnnnnnnnnnnnnnnnnnnnnnnnnnnnnnnnnnnnnnnnnnnnnnnnnnnnnnnnnnnnnnnnnnnnnnnnnnnnnnnnnnnnnnnnnnnnnnnnnnnnnnnnnnnnnnnnnnnnnnnnnnnnnnnnnnnnnnnnnnnnnnnnnnnnnnnnnnnnnnnnnnnnnnnnnnnnnnnnnnnnnnnnnnnnnnnnnnnnnnnnnnnnnnnnnnnnnnnnnnnnnnnnnnnnnnnnnnnnnnnnnnnnnnnnnnnnnnnnnnnnnnnnnnnnnnnnnnnnnnnnnnnnnnnnnnnnnnnnnnnnnnnnnnnnnnnnnnnnnnnnnnnnnnnnnnnnnnnnnnnnnnnnnnnnnnnnnnnnnnnnnnnnnnnnnnnnnnnnnngaactcaagcaagacgcctggcattagttatcacgctcttcccgcctcactcgagctaaatggtcgcatcgtcattctaaatgcaaaagatcgggacttagagatgttggaatatgcgctagaccaactaagtctcaacccggtcttcggtgctcaatcagcaagaggctgcggtgaaatcagtgggaccttcgacattaatatcgaaggaaaattcgcaaaaaaaatgacaattggtggctatgaagcagccaaagtcacagttttttgaaggtagaaacacctatttcagcaatttcttcaatgcattatgcgatatctactgaagccactcccgattcgagtggttactgaaacaatcgactatcaagaaaagaactatagcggactgaagccactcccgattcgagtggttactgaaaccgagccttcgatgctttcagtgctgcctttactgaagccactcccgattcgagtggttactgaaacccaaaaggctcaacagagatcggctggggtactgaagccactcccgattcgagtggttactgaaacgtggcacctgtgtcgccgcgaggaactgtgactgaagccactcccgattcgagtggttactgaaacgtgtagagcatgtagagctggtgctgcgcactgaagccactcccgattcgagtggttactgcaacttacttccgggaaataaagaacccggtcgatctaaagccacactaattcgtgtgtggttcctttgtgtaaatagtgcaagaattattttatgttccgttcccacgaacaagaaaatttttataaaatcatcgcggcgcacctcgaggtctgcgatgcgccactgctgctcgaagggggaaccggcctcggtaaaaccagggcctacctagcggcagtcgcgaagaccgataaaaccgtcgcaatcattttaccgacgcatctattgatcaatcagcttgtcgcctcaaaggaccttgaaaacgttgggcttgaggtcacggctttcagaccatcgcgtgattttgagactagggctgactatgtggctcatagaacggcctctatggccggacgcgtgatgctttgcacagcagccagcgtaatcatcgatcagcgcctcgctgggaactacaacggtgttatcaatcgagagctgttggtctttgatgaggctgacgagcttcccgccgccgccgcgctgcagcaagaccaagaagtcacggctagtgcccttcgcgatgccaacgtgaaactgtcgactgcagaagacaccttacgaaaactccttaaaaaaaagaggctcgaaccagaaacccgagcggccgccttgatggctctcgaggccatcgaagagcctgcttggttttatcaaaccgggataaataaagatggcggcatatccctttgtcaccgattacctggcaggctccttaaacgaatagccaacaaaggaaactccatattcattagcgcgaccctatcggtcgctggaagcttcaaaaattttcaaggaagcatggggatagacgcaatcagtagcctgtcgtcgatgatagagcctgaacaccacgggactatcgaactccatacgccacttgacgaagagcctgcggaggtcgtccgtagagccgcgaagccctgtctcgttgtaacccccagcttcaagttggcggaaacaatcggcaaacagatacccaacgccactgtaagattacaaactgagaccactactgaggcggcgcaacgaataggccctgatggtgtgttgattgcggcaggggcttgggctggtttggatactccgacagtttgggcatcaatcgtcgttccgaaaattccgttttccgccccaactgtgctcgacgggaaaatcgaaagccaatacctcgatagtcggaacgttgcgatcaggcggatgcgtcaggtgataggcagaggcctgaggacaccggatgcgaaatgccaggtgtacattcttgatggtcgttacaaggccttaggcgctttcgtacctgaacgctttcaggagtcctggatcgagggtgacattcaagtctatttacaggctgaagcaaaacggatgcgagggtatcggaagaaggctctagagcattacgggagcagttgcttcgtgtgttcttttgagccgaaagtactccgccaaatacacatacatcacttggaaccaattgctgagggtgtcaggacgacgactctagaggatctgcggccactttgtgccaattgtcatgagcttgcgcatagcgagagccccccaatcacaatcgaacgcctaaaggggatggagggcccataagacaaatgccacccgtgcctaaattctgccgcatctaacgattattaagaataagaagatgggtagggagaatatgagatggcgagtagtggcattatgtggatcgattacacattcaatttagcagtgcagcttttgtatgtttgcgcagaaattctcggcataacctacgaagaaattaacgtctggctttttgtcataggctggccgctgcaaactataatcatgggtgccgtaataatatgcctctggctcaaattaaatcgtcaagaagatcatcaggttcaaaaatagccacagatttacggctagtcatttggaaccacaaagccgctattccccccgctacccccggttaacgaggagccagtctgactaatctattggcacaatcctggcacaatcagggcacattagaggccgattttcgcttgtgctagaattcgatctcgactagggcaatctctaagttgttgttttcgttgtctttttgtcttaacccgtagctcagctggatagagcgctgccctccgaaggcagaggtcagaggttcgaatcctctcgggtgcgccacttttctccataaaaacaatgacttgggtttttctcaactcgttgtttgaccccaaaactgcatgcacatatcatacacatgatacacatgcgtattggggtaatctccatgacagacgttaacaacaaggttgatgtgcggggtgatggttcagtcatcctctatcaacgtctgaagtttggtagcaaaaccgagattagtgacattttccatatgaggatccggatccccctgtctgcatcgaagggatatttccggggaagcacgggtgagagcaaccaaggcagggcaacccaggtcgcactgaacaagttcgatgaactctataacaaggtgaagggtggcgggactttgctgggtaaatccttcaaggatttgttcaacgagtggaaagtccattaccccaaggtgagcaacgagagtcttccccagtatatcgagtggtcaatcaatcgtatcgggaactacccctataagttctttgtcgatgaaaaggggaaccccaaggtggataggatcaccccgcaggattttgaggaatactttatttacaggaagaataattctgtgaagaagggtgttccctacgcaccatcgaacaataccattcgtaaggaatgcacccttctggggcagatgttctcttacgcattcgagaagggttatcttccgaaggaactcaaagtcagcagaccctccccagaaaaggattcgagaagaccctcattcaccaaagatgaatggagaaaactcaccactgggatgaggagacgggtcaaagacggttggggtgctcacaaacgtgatcggttcatcctcaatcaatatgttctcattctggcaaattgtggtgtccgtctgggtgagttgagaaacatcaagtggagtgatgtccgaagagagacttacgaggatgatggagacacagtccgtctcatcattctggtcaaaggtaaaactggtatcagagaggtcgtctgcaacaaggggactgaggtcttcttcgagcggttatatgacaaccgcaaagaggaactgaacgcacatccctcacccgacaccttcgtgttctgtcatcaagatggaacccccatcaaaacgatgcgtaaggcattcgacagtctgttggatgacctcggtctcaagaagaactcaatgggtaagaaccgcaccctttattcacttcgacacatgtatgcgaccttccgtctgagtgaagaggtgtcaccgtatctccttgcaaaacaaatggggacatcggttgagatgctggagaagcattacggtcaggtggtcaatcgtctggtcgcaacccagatcaccaaaaccagaagtcgtcagacggtcagagtgacggagaaggtttatcctttttagacggaaccaccgatgaagaagaaacgaaacctaagtccctgtgtatccgtctgtcgtattgatgctgacaacgtgtgcgaaggttgtggaagaacaatcaaagaaatacgagattggtcaatttatggtgacaaaaagaaagtcgccatcatgaagaggttaaaggtcgggtaactaactaaattgaatcttcaataatattacttctcgacccttcacttaatcgaaccaaattgaccttgcccccttcattcccccgtttatgagtagaatctgctctgattatggccctgtctggaccgggttgtaaactccttcggtgtgagcccgtcg

SEQ ID NO: 133 - DNA, 13831 bp, Artificial Sequence; identical to SEQ ID NO: 132
  Synthetic Oligonucleotide
  misc_feature (1)..(9224): n is a, c, g, or t

SEQ ID NO: 134 - DNA, 13830 bp, Artificial Sequence
  Synthetic Oligonucleotide
  misc_feature (1)..(9049): n is a, c, g, or t
nnnnnnnnnnnnnnnnnnnnnnnnnnnnnnnnnnnnnnnnnnnnnnnnnnnnnnnnnnnnnnnnnnnnnnnnnnnnnnnnnnnnnnnnnnnnnnnnnnnnnnnnnnnnnnnnnnnnnnnnnnnnnnnnnnnnnnnnnnnnnnnnnnnnnnnnnnnnnnnnnnnnnnnnnnnnnnnnnnnnnnnnnnnnnnnnnnnnnnnnnnnnnnnnnnnnnnnnnnnnnnnnnnnnnnnnnnnnnnnnnnnnnnnnnnnnnnnnnnnnnnnnnnnnnnnnnnnnnnnnnnnnnnnnnnnnnnnnnnnnnnnnnnnnnnnnnnnnnnnnnnnnnnnnnnnnnnnnnnnnnnnnnnnnnnnnnnnnnnnnnnnnnnnnnnnnnnnnnnnnnnnnnnnnnnnnnnnnnnnnnnnnnnnnnnnnnnnnnnnnnnnnnnnnnnnnnnnnnnnnnnnnnnnnnnnnnnnnnnnnnnnnnnnnnnnnnnnnnnnnnnnnnnnnnnnnnnnnnnnnnnnnnnnnnnnnnnnnnnnnnnnnnnnnnnnnnnnnnnnnnnnnnnnnnnnnnnnnnnnnnnnnnnnnnnnnnnnnnnnnnnnnnnnnnnnnnnnnnnnnnnnnnnnnnnnnnnnnnnnnnnnnnnnnnnnnnnnnnnnnnnnnnnnnnnnnnnnnnnnnnnnnnnnnnnnnnnnnnnnnnnnnnnnnnnnnnnnnnnnnnnnnnnnnnnnnnnnnnnnnnnnnnnnnnnnnnnnnnnnnnnnnnnnnnnnnnnnnnnnnnnnnnnnnnnnnnnnnnnnnnnnnnnnnnnnnnnnnnnnnnnnnnnnnnnnnnnnnnnnnnnnnnnnnnnnnnnnnnnnnnnnnnnnnnnnnnnnnnnnnnnnnnnnnnnnnnnnnnnnnnnnnnnnnnnnnnnnnnnnnnnnnnnnnnnnnnnnnnnnnnnnnnnnnnnnnnnnnnnnnnnnnnnnnnnnnnnnnnnnnnnnnnnnnnnnnnnnnnnnnnnnnnnnnnnnnnnnnnnnnnnnnnnnnnnnnnnnnnnnnnnnnnnnnnnnnnnnnnnnnnnnnnnnnnnnnnnnnnnnnnnnnnnnnnnnnnnnnnnnnnnnnnnnnnnnnnnnnnnnnnnnnnnnnnnnnnnnnnnnnnnnnnnnnnnnnnnnnnnnnnnnnnnnnnnnnnnnnnnnnnnnnnnnnnnnnnnnnnnnnnnnnnnnnnnnnnnnnnnnnnnnnnnnnnnnnnnnnnnnnnnnnnnnnnnnnnnnnnnnnnnnnnnnnnnnnnnnnnnnnnnnnnnnnnnnnnnnnnnnnnnnnnnnnnnnnnnnnnnnnnnnnnnnnnnnnnnnnnnnnnnnnnnnnnnnnnnnnnnnnnnnnnnnnnnnnnnnnnnnnnnnnnnnnnnnnnnnnnnnnnnnnnnnnnnnnnnnnnnnnnnnnnnnnnnnnnnnnnnnnnnnnnnnnnnnnnnnnnnnnnnnnnnnnnnnnnnnnnnnnnnnnnnnnnnnnnnnnnnnnnnnnnnnnnnnnnnnnnnnnnnnnnnnnnnnnnnnnnnnnnnnnnnnnnnnnnnnnnnnnnnnnnnnnnnnnnnnnnnnnnnnnnnnnnnnnnnnnnnnnnnnnnnnnnnnnnnnnnnnnnnnnnnnnnnnnnnnnnnnnnnnnnnnnnnnnnnnnnnnnnnnnnnnnnnnnnnnnnnnnnnnnnnnnnnnnnnnnnnnnnnnnnnnnnnnnnnnnnnnnnnnnnnnnnnnnnnnnnnnnnnnnnnnnnnnnnnnnnnnnnnnnnnnnnnnnnnnnnnnnnnnnnnnnnnnnnnnnnnnnnnnnnnnnnnnnnnnnnnnnnnnnnnnnnnnnnnnnnnnnnnnnnnnnnnnnnnnnnnnnnnnnnnnnnnnnnnnnnnnnnnnnnnnnnnnnnnnnnnnnnnnnnnnnnnnnnnnnnnnnnnnnnnnnnnnnnnnnnnnnnnnnnnnnnnnnnnnnnnnnnnnnnnnnnnnnnnnnnnnnnnnnnnnnnnnnnnnnnnnnnnnnnnnnnnnnnnnnnnnnnnnnnnnnnnnnnnnnnnnnnnnnnnnnnnnnnnnnnnnnnnnnnnnnnnnnnnnnnnnnnnnnnnnnnnnnnnnnnnnnnnnnnnnnnnnnnnnnnnnnnnnnnnnnnnnnnnnnnnnnnnnnnnnnnnnnnnnnnnnnnnnnnnnnnnnnnnnnnnnnnnnnnnnnnnnnnnnnnnnnnnnnnnnnnnnnnnnnnnnnnnnnnnnnnnnnnnnnnnnnnnnnnnnnnnnnnnnnnnnnnnnnnnnnnnnnnnnnnnnnnnnnnnnnnnnnnnnnnnnnnnnnnnnnnnnnnnnnnnnnnnnnnnnnnnnnnnnnnnnnnnnnnnnnnnnnnnnnnnnnnnnnnnnnnnnnnnnnnnnnnnnnnnnnnnnnnnnnnnnnnnnnnnnnnnnnnnnnnnnnnnnnnnnnnnnnnnnnnnnnnnnnnnnnnnnnnnnnnnnnnnnnnnnnnnnnnnnnnnnnnnnnnnnnnnnnnnnnnnnnnnnnnnnnnnnnnnnnnnnnnnnnnnnnnnnnnnnnnnnnnnnnnnnnnnnnnnnnnnnnnnnnnnnnnnnnnnnnnnnnnnnnnnnnnnnnnnnnnnnnnnnnnnnnnnnnnnnnnnnnnnnnnnnnnnnnnnnnnnnnnnnnnnnnnnnnnnnnnnnnnnnnnnnnnnnnnnnnnnnnnnnnnnnnnnnnnnnnnnnnnnnnnnnnnnnnnnnnnnnnnnnnnnnnnnnnnnnnnnnnnnnnnnnnnnnnnnnnnnnnnnnnnnnnnnnnnnnnnnnnnnnnnnnnnnnnnnnnnnnnnnnnnnnnnnnnnnnnnnnnnnnnnnnnnnnnnnnnnnnnnnnnnnnnnnnnnnnnnnnnnnnnnnnnnnnnnnnnnnnnnnnnnnnnnnnnnnnnnnnnnnnnnnnnnnnnnnnnnnnnnnnnnnnnnnnnnnnnnnnnnnnnnnnnnnnnnnnnnnnnnnnnnnnnnnnnnnnnnnnnnnnnnnnnnnnnnnnnnnnnnnnnnnnnnnnnnnnnnnnnnnnnnnnnnnnnnnnnnnnnnnnnnnnnnnnnnnnnnnnnnnnnnnnnnnnnnnnnnnnnnnnnnnnnnnnnnnnnnnnnnnnnnnnnnnnnnnnnnnnnnnnnnnnnnnnnnnnnnnnnnnnnnnnnnnnnnnnnnnnnnnnnnnnnnnnnnnnnnnnnnnnnnnnnnnnnnnnnnnnnnnnnnnnnnnnnnnnnnnnnnnnnnnnnnnnnnnnnnnnnnnnnnnnnnnnnnnnnnnnnnnnnnnnnnnnnnnnnnnnnnnnnnnnnnnnnnnnnnnnnnnnnnnnnnnnnnnnnnnnnnnnnnnnnnnnnnnnnnnnnnnnnnnnnnnnnnnnnnnnnnnnnnnnnnnnnnnnnnnnnnnnnnnnnnnnnnnnnnnnnnnnnnnnnnnnnnnnnnnnnnnnnnnnnnnnnnnnnnnnnnnnnnnnnnnnnnnnnnnnnnnnnnnnnnnnnnnnnnnnnnnnnnnnnnnnnnnnnnnnnnnnnnnnnnnnnnnnnnnnnnnnnnnnnnnnnnnnnnnnnnnnnnnnnnnnnnnnnnnnnnnnnnnnnnnnnnnnnnnnnnnnnnnnnnnnnnnnnnnnnnnnnnnnnnnnnnnnnnnnnnnnnnnnnnnnnnnnnnnnnnnnnnnnnnnnnnnnnnnnnnnnnnnnnnnnnnnnnnnnnnnnnnnnnnnnnnnnnnnnnnnnnnnnnnnnnnnnnnnnnnnnnnnnnnnnnnnnnnnnnnnnnnnnnnnnnnnnnnnnnnnnnnnnnnnnnnnnnnnnnnnnnnnnnnnnnnnnnnnnnnnnnnnnnnnnnnnnnnnnnnnnnnnnnnnnnnnnnnnnnnnnnnnnnnnnnnnnnnnnnnnnnnnnnnnnnnnnnnnnnnnnnnnnnnnnnnnnnnnnnnnnnnnnnnnnnnnnnnnnnnnnnnnnnnnnnnnnnnnnnnnnnnnnnnnnnnnnnnnnnnnnnnnnnnnnnnnnnnnnnnnnnnnnnnnnnnnnnnnnnnnnnnnnnnnnnnnnnnnnnnnnnnnnnnnnnnnnnnnnnnnnnnnnnnnnnnnnnnnnnnnnnnnnnnnnnnnnnnnnnnnnnnnnnnnnnnnnnnnnnnnnnnnnnnnnnnnnnnnnnnnnnnnnnnnnnnnnnnnnnnnnnnnnnnnnnnnnnnnnnnnnnnnnnnnnnnnnnnnnnnnnnnnnnnnnnnnnnnnnnnnnnnnnnnnnnnnnnnnnnnnnnnnnnnnnnnnnnnnnnnnnnnnnnnnnnnnnnnnnnnnnnnnnnnnnnnnnnnnnnnnnnnnnnnnnnnnnnnnnnnnnnnnnnnnnnnnnnnnnnnnnnnnnnnnnnnnnnnnnnnnnnnnnnnnnnnnnnnnnnnnnnnnnnnnnnnnnnnnnnnnnnnnnnnnnnnnnnnnnnnnnnnnnnnnnnnnnnnnnnnnnnnnnnnnnnnnnnnnnnnnnnnnnnnnnnnnnnnnnnnnnnnnnnnnnnnnnnnnnnnnnnnnnnnnnnnnnnnnnnnnnnnnnnnnnnnnnnnnnnnnnnnnnnnnnnnnnnnnnnnnnnnnnnnnnnnnnnnnnnnnnnnnnnnnnnnnnnnnnnnnnnnnnnnnnnnnnnnnnnnnnnnnnnnnnnnnnnnnnnnnnnnnnnnnnnnnnnnnnnnnnnnnnnnnnnnnnnnnnnnnnnnnnnnnnnnnnnnnnnnnnnnnnnnnnnnnnnnnnnnnnnnnnnnnnnnnnnnnnnnnnnnnnnnnnnnnnnnnnnnnnnnnnnnnnnnnnnnnnnnnnnnnnnnnnnnnnnnnnnnnnnnnnnnnnnnnnnnnnnnnnnnnnnnnnnnnnnnnnnnnnnnnnnnnnnnnnnnnnnnnnnnnnnnnnnnnnnnnnnnnnnnnnnnnnnnnnnnnnnnnnnnnnnnnnnnnnnnnnnnnnnnnnnnnnnnnnnnnnnnnnnnnnnnnnnnnnnnnnnnnnnnnnnnnnnnnnnnnnnnnnnnnnnnnnnnnnnnnnnnnnnnnnnnnnnnnnnnnnnnnnnnnnnnnnnnnnnnnnnnnnnnnnnnnnnnnnnnnnnnnnnnnnnnnnnnnnnnnnnnnnnnnnnnnnnnnnnnnnnnnnnnnnnnnnnnnnnnnnnnnnnnnnnnnnnnnnnnnnnnnnnnnnnnnnnnnnnnnnnnnnnnnnnnnnnnnnnnnnnnnnnnnnnnnnnnnnnnnnnnnnnnnnnnnnnnnnnnnnnnnnnnnnnnnnnnnnnnnnnnnnnnnnnnnnnnnnnnnnnnnnnnnnnnnnnnnnnnnnnnnnnnnnnnnnnnnnnnnnnnnnnnnnnnnnnnnnnnnnnnnnnnnnnnnnnnnnnnnnnnnnnnnnnnnnnnnnnnnnnnnnnnnnnnnnnnnnnnnnnnnnnnnnnnnnnnnnnnnnnnnnnnnnnnnnnnnnnnnnnnnnnnnnnnnnnnnnnnnnnnnnnnnnnnnnnnnnnnnnnnnnnnnnnnnnnnnnnnnnnnnnnnnnnnnnnnnnnnnnnnnnnnnnnnnnnnnnnnnnnnnnnnnnnnnnnnnnnnnnnnnnnnnnnnnnnnnnnnnnnnnnnnnnnnnnnnnnnnnnnnnnnnnnnnnnnnnnnnnnnnnnnnnnnnnnnnnnnnnnnnnnnnnnnnnnnnnnnnnnnnnnnnnnnnnnnnnnnnnnnnnnnnnnnnnnnnnnnnnnnnnnnnnnnnnnnnnnnnnnnnnnnnnnnnnnnnnnnnnnnnnnnnnnnnnnnnnnnnnnnnnnnnnnnnnnnnnnnnnnnnnnnnnnnnnnnnnnnnnnnnnnnnnnnnnnnnnnnnnnnnnnnnnnnnnnnnnnnnnnnnnnnnnnnnnnnnnnnnnnnnnnnnnnnnnnnnnnnnnnnnnnnnnnnnnnnnnnnnnnnnnnnnnnnnnnnnnnnnnnnnnnnnnnnnnnnnnnnnnnnnnnnnnnnnnnnnnnnnnnnnnnnnnnnnnnnnnnnnnnnnnnnnnnnnnnnnnnnnnnnnnnnnnnnnnnnnnnnnnnnnnnnnnnnnnnnnnnnnnnnnnnnnnnnnnnnnnnnnnnnnnnnnnnnnnnnnnnnnnnnnnnnnnnnnnnnnnnnnnnnnnnnnnnnnnnnnnnnnnnnnnnnnnnnnnnnnnnnnnnnnnnnnnnnnnnnnnnnnnnnnnnnnnnnnnnnnnnnnnnnnnnnnnnnnnnnnnnnnnnnnnnnnnnnnnnnnnnnnnnnnnnnnnnnnnnnnnnnnnnnnnnnnnnnnnnnnnnnnnnnnnnnnnnnnnnnnnnnnnnnnnnnnnnnnnnnnnnnnnnnnnnnnnnnnnnnnnnnnnnnnnnnnnnnnnnnnnnnnnnnnnnnnnnnnnnnnnnnnnnnnnnnnnnnnnnnnnnnnnnnnnnnnnnnnnnnnnnnnnnnnnnnnnnnnnnnnnnnnnnnnnnnnnnnnnnnnnnnnnnnnnnnnnnnnnnnnnnnnnnnnnnnnnnnnnnnnnnnnnnnnnnnnnnnnnnnnnnnnnnnnnnnnnnnnnnnnnnnnnnnnnnnnnnnnnnnnnnnnnnnnnnnnnnnnnnnnnnnnnnnnnnnnnnnnnnnnnnnnnnnnnnnnnnnnnnnnnnnnnnnnnnnnnnnnnnnnnnnnnnnnnnnnnnnnnnnnnnnnnnnnnnnnnnnnnnnnnnnnnnnnnnnnnnnnnnnnnnnnnnnnnnnnnnnnnnnnnnnnnnnnnnnnnnnnnnnnnnnnnnnnnnnnnnnnnnnnnnnnnnnnnnnnnnnnnnnnnnnnnnnnnnnnnnnnnnnnnnnnnnnnnnnnnnnnnnnnnnnnnnnnnnnnnnnnnnnnnnnnnnnnnnnnnnnnnnnnnnnnnnnnnnnnnnnnnnnnnnnnnnnnnnnnnnnnnnnnnnnnnnnnnnnnnnnnnnnnnnnnnnnnnnnnnnnnnnnnnnnnnnnnnnnnnnnnnnnnnnnnnnnnnnnnnnnnnnnnnnnnnnnnnnnnnnnnnnnnnnnnnnnnnnnnnnnnnnnnnnnnnnnnnnnnnnnnnnnnnnnnnnnnnnnnnnnnnnnnnnnnnnnnnnnnnnnnnnnnnnnnnnnnnnnnnnnnnnnnnnnnnnnnnnnnnnnnnnnnnnnnnnnnnnnnnnnnnnnnnnnnnnnnnnnnnnnnnnnnnnnnnnnnnnnnnnnnnnnnnnnnnnnnnnnnnnnnnnnnnnnnnnnnnnnnnnnnnnnnnnnnnnnnnnnnnnnnnnnnnnnnnnnnnnnnnnnnnnnnnnnnnnnnnnnnnnnnnnnnnnnnnnnnnnnnnnnnnnnnnnnnnnnnnnnnnnnnnnnnnnnnnnnnnnnnnnnnnnnnnnnnnnnnnnnnnnnnnnnnnnnnnnnnnnnnnnnnnnnnnnnnnnnnnnnnnnnnnnnnnnnnnnnnnnnnnnnnnnnnnnnnnnnnnnnnnnnnnnnnnnnnnnnnnnnnnnnnnnnnnnnnnnnnnnnnnnnnnnnnnnnnnnnnnnnnnnnnnnnnnnnnnnnnnnnnnnnnnnnnnnnnnnnnnnnnnnnnnnnnnnnnnnnnnnnnnnnnnnnnnnnnnnnnnnnnnnnnnnnnnnnnnnnnnnnnnnnnnnnnnnnnnnnnnnnnnnnnnnnnnnnnnnnnnnnnnnnnnnnnnnnnnnnnnnnnnnnnnnnnnnnnnnnnnnnnnnnnnnnnnnnnnnnnnnnnnnnnnnnnnnnnnnnnnnnnnnnnnnnnnnnnnnnnnnnnnnnnnnnnnnnnnnnnnnnnnnnnnnnnnnnnnnnnnnnnnnnnnnnnnnnnnnnnnnnnnnnnnnnnnnnnnnnnnnnnnnnnnnnnnnnnnnnnnnnnnnnnnnnnnnnnnnnnnnnnnnnnnnnnnnnnnnnnnnnnnnnnnnnnnnnnnnnnnnnnnnnnnnnnnnnnnnnnnnnnnnnnnnnnnnnnnnnnnnnnnnnnnnnnnnnnnnnnnnnnnnnnnnnnnnnnnnnnnnnnnnnnnnnnnnnnnnnnnnnnnnnnnnnnnnnnnnnnnnnnnnnnnnnnnnnnnnnnnnnnnnnnnnnnnnnnnnnnnnnnnnnnnnnnnnnnnnnnnnnnnnnnnnnnnnnnnnnnnnnnnnnnnnnnnnnnnnnnnnnnnnnnnnnnnnnnnnnnnnnnnnnnnnnnnnnnnnnnnnnnnnnnnnnnnnnnnnnnnnnnnnnnnnnnnnnnnnnnnnnnnnnnnnnnnnnnnnnnnnnnnnnnnnnnnnnnnnnnnnnnnnnnnnnnnnnnnnnnnnnnnnnnnnnnnnnnnnnnnnnnnnnnnnnnnnnnnnnnnnnnnnnnnnnnnnnnnnnnnnnnnnnnnnnnnnnnnnnnnnnnnnnnnnnnnnnnnnnnnnnnnnnnnnnnnnnnnnnnnnnnnnnnnnnnnnnnnnnnnnnnnnnnnnnnnnnnnnnnnnnnnnnnnnnnnnnnnnnnnnnnnnnnnnnnnnnnnnnnnnnnnnnnnnnnnnnnnnnnnnnnnnnnnnnnnnnnnnnnnnnnnnnnnnnnnnnnnnnnnnnnnnnnnnnnnnnnnnnnnnnnnnnnnnnnnnnnnnnnnnnnnnnnnnnnnnnnnnnnnnnnnnnnnnnnnnnnnnnnnnnnnnnnnnnnnnnnnnnnnnnnnnnnnnnnnnnnnnnnnnnnnnnnnnnnnnnnnnnnnnnnnnnnnnnnnnnnnnnnnnnnnnnnnnnnnnnnnnnnnnnnnnnnnnnnnnnnnnnnnnnnnnnnnnnnnnnnnnnnnnnnnnnnnnnnnnnnnnnnnnnnnnnnnnnnnnnnnnnnnnnnnnnnnnnnnnnnnnnnnnnnnnnnnnnnnnnnnnnnnnnnnnnnnnnnnnnnnnnnnnnnnnnnnnnnnnnnnnnnnnnnnnnnnnnnnnnnnnnnnnnnnnnnnnnnnnnnnnnnnnnnnnnnnnnnnnnnnnnnnnnnnnnnnnnnnnnnnnnnnnnnnnnnnnnnnnnnnnnnnnnnnnnnnnnnnnnnnnnnnnnnnnnnnnnnnnnnnnnnnnnnnnnnnnnnnnnnnnnnnnnnnnnnnnnnnnnnnnnnnnnnnnnnnnnnnnnnnnnnnnnnnnnnnnnnnnnnnnnnnnnnnnnnnnnnnnnnnnnnnnnnnnnnnnnnnnnnnnnnnnnnnnnnnnnnnnnnnnnnnnnnnnnnatgcccgctcagaatcgaatagtcggcgtgggcctgctgaaacacttgtgaagtccctaaagcagaaagttcgagccgcaaagaacaaaaacgaagacgctggtgagctcaaaaaagaactggaagaggcggagaagctgctcgctaaacatgtcgcaggcatgggtgacatgaagaactcaagcaagacgcctggcattagttatcacgctcttcccgcctcactcgagctaaatggtcgcatcgtcattctaaatgcaaaagatcgggacttagagatgttggaatatgcgctagaccaactaagtctcaacccggtcttcggtgctcaatcagcaagaggctgcggtgaaatcagtgggaccttcgacattaatatcgaaggaaaattcgcaaaaaaaatgacaattggtggctatgaagcagccaaagtcacagttttttgaaggtagaaacacctatttcagcaatttcttcaatgcattatgcgatatctactgaagccactcccgattcgagtggttactgaaacaatcgactatcaagaaaagaactatagcggactgaagccactcccgattcgagtggttactgaaaccgagccttcgatgctttcagtgctgcctttactgaagccactcccgattcgagtggttactgaaacccaaaaggctcaacagagatcggctggggtactgaagccactcccgattcgagtggttactgaaacgtggcacctgtgtcgccgcgaggaactgtgactgaagccactcccgattcgagtggttactgaaacgtgtagagcatgtagagctggtgctgcgcactgaagccactcccgattcgagtggttactgcaacttacttccgggaaataaagaacccggtcgatctaaagccacactaattcgtgtgtggttcctttgtgtaaatagtgcaagaattattttatgttccgttcccacgaacaagaaaatttttataaaatcatcgcggcgcacctcgaggtctgcgatgcgccactgctgctcgaagggggaaccggcctcggtaaaaccagggcctacctagcggcagtcgcgaagaccgataaaaccgtcgcaatcattttaccgacgcatctattgatcaatcagcttgtcgcctcaaaggaccttgaaaacgttgggcttgaggtcacggctttcagaccatcgcgtgattttgagactagggctgactatgtggctcatagaacggcctctatggccggacgcgtgatgctttgcacagcagccagcgtaatcatcgatcagcgcctcgctgggaactacaacggtgttatcaatcgagagctgttggtctttgatgaggctgacgagcttcccgccgccgccgcgctgcagcaagaccaagaagtcacggctagtgcccttcgcgatgccaacgtgaaactgtcgactgcagaagacaccttacgaaaactccttaaaaaaaagaggctcgaaccagaaacccgagcggccgccttgatggctctcgaggccatcgaagagcctgcttggttttatcaaaccgggataaataaagatggcggcatatccctttgtcaccgattacctggcaggctccttaaacgaatagccaacaaaggaaactccatattcattagcgcgaccctatcggtcgctggaagcttcaaaaattttcaaggaagcatggggatagacgcaatcagtagcctgtcgtcgatgatagagcctgaacaccacgggactatcgaactccatacgccacttgacgaagagcctgcggaggtcgtccgtagagccgcgaagccctgtctcgttgtaacccccagcttcaagttggcggaaacaatcggcaaacagatacccaacgccactgtaagattacaaactgagaccactactgaggcggcgcaacgaataggccctgatggtgtgttgattgcggcaggggcttgggctggtttggatactccgacagtttgggcatcaatcgtcgttccgaaaattccgttttccgccccaactgtgctcgacgggaaaatcgaaagccaatacctcgatagtcggaacgttgcgatcaggcggatgcgtcaggtgataggcagaggcctgaggacaccggatgcgaaatgccaggtgtacattcttgatggtcgttacaaggccttaggcgctttcgtacctgaacgctttcaggagtcctggatcgagggtgacattcaagtctatttacaggctgaagcaaaacggatgcgagggtatcggaagaaggctctagagcattacgggagcagttgcttcgtgtgttcttttgagccgaaagtactccgccaaatacacatacatcacttggaaccaattgctgagggtgtcaggacgacgactctagaggatctgcggccactttgtgccaattgtcatgagcttgcgcatagcgagagccccccaatcacaatcgaacgcctaaaggggatggagggcccataagacaaatgccacccgtgcctaaattctgccgcatctaacgattattaagaataagaagatgggtagggagaatatgagatggcgagtagtggcattatgtggatcgattacacattcaatttagcagtgcagcttttgtatgtttgcgcagaaattctcggcataacctacgaagaaattaacgtctggctttttgtcataggctggccgctgcaaactataatcatgggtgccgtaataatatgcctctggctcaaattaaatcgtcaagaagatcatcaggttcaaaaatagccacagatttacggctagtcatttggaaccacaaagccgctattccccccgctacccccggttaacgaggagccagtctgactaatctattggcacaatcctggcacaatcagggcacattagaggccgattttcgcttgtgctagaattcgatctcgactagggcaatctctaagttgttgttttcgttgtctttttgtcttaacccgtagctcagctggatagagcgctgccctccgaaggcagaggtcagaggttcgaatcctctcgggtgcgccacttttctccataaaaacaatgacttgggtttttctcaactcgttgtttgaccccaaaactgcatgcacatatcatacacatgatacacatgcgtattggggtaatctccatgacagacgttaacaacaaggttgatgtgcggggtgatggttcagtcatcctctatcaacgtctgaagtttggtagcaaaaccgagattagtgacattttccatatgaggatccggatccccctgtctgcatcgaagggatatttccggggaagcacgggtgagagcaaccaaggcagggcaacccaggtcgcactgaacaagttcgatgaactctataacaaggtgaagggtggcgggactttgctgggtaaatccttcaaggatttgttcaacgagtggaaagtccattaccccaaggtgagcaacgagagtcttccccagtatatcgagtggtcaatcaatcgtatcgggaactacccctataagttctttgtcgatgaaaaggggaaccccaaggtggataggatcaccccgcaggattttgaggaatactttatttacaggaagaataattctgtgaagaagggtgttccctacgcaccatcgaacaataccattcgtaaggaatgcacccttctggggcagatgttctcttacgcattcgagaagggttatcttccgaaggaactcaaagtcagcagaccctccccagaaaaggattcgagaagaccctcattcaccaaagatgaatggagaaaactcaccactgggatgaggagacgggtcaaagacggttggggtgctcacaaacgtgatcggttcatcctcaatcaatatgttctcattctggcaaattgtggtgtccgtctgggtgagttgagaaacatcaagtggagtgatgtcagaagagagacttacgaggatgatggagacacagtccgtctcatcattctggtcaaaggtaaaactggtatcagagaggtcgtctgcaacaaggggactgaggtcttcttcgagcggttatatgacaaccgcaaagaggaactgaacgcacatccctcacccgacaccttcgtgttctgtcatcaagatggaacccccatcaaaacgatgcgtaaggcattcgacagtctgttggatgacctcggtctcaagaagaactcaatgggtaagaaccgcaccctttattcacttcgacacatgtatgcgaccttccgtctgagtgaagaggtgtcaccgtatctccttgcaaaacaaatggggacatcggttgagatgctggagaagcattacggtcaggtggtcaatcgtctggtcgcaacccagatcaccaaaaccagaagtcgtcagacggtcagagtgacggagaaggtttatcctttttagacggaaccaccgatgaagaagaaacgaaacctaagtccctgtgtatccgtctgtcgtattgatgctgacaacgtgtgcgaaggttgtggaagaacaatcaaagaaatacgagattggtcaatttatggtgacaaaaagaaagtcgccatcatgaagaggttaaaggtcgggtaactaactaaattgaatcttcaataatattacttctcgacccttcacttaatcgaaccaaattgaccttgcccccttcattcccccgtttatgagtagaatctgctctgattatggccctgtctggaccgggttgtaaactccttcggtgtgagcccgtc

SEQ ID NO: 135 - DNA, 13830 bp, Artificial Sequence; identical to SEQ ID NO: 134
  Synthetic Oligonucleotide
  misc_feature (1)..(9049): n is a, c, g, or t

SEQ ID NO: 136 - DNA, 13820 bp, Artificial Sequence
  Synthetic Oligonucleotide
  misc_feature (1)..(9999): n is a, c, g, or t
nnnnnnnnnnnnnnnnnnnnnnnnnnnnnnnnnnnnnnnnnnnnnnnnnnnnnnnnnnnnnnnnnnnnnnnnnnnnnnnnnnnnnnnnnnnnnnnnnnnnnnnnnnnnnnnnnnnnnnnnnnnnnnnnnnnnnnnnnnnnnnnnnnnnnnnnnnnnnnnnnnnnnnnnnnnnnnnnnnnnnnnnnnnnnnnnnnnnnnnnnnnnnnnnnnnnnnnnnnnnnnnnnnnnnnnnnnnnnnnnnnnnnnnnnnnnnnnnnnnnnnnnnnnnnnnnnnnnnnnnnnnnnnnnnnnnnnnnnnnnnnnnnnnnnnnnnnnnnnnnnnnnnnnnnnnnnnnnnnnnnnnnnnnnnnnnnnnnnnnnnnnnnnnnnnnnnnnnnnnnnnnnnnnnnnnnnnnnnnnnnnnnnnnnnnnnnnnnnnnnnnnnnnnnnnnnnnnnnnnnnnnnnnnnnnnnnnnnnnnnnnnnnnnnnnnnnnnnnnnnnnnnnnnnnnnnnnnnnnnnnnnnnnnnnnnnnnnnnnnnnnnnnnnnnnnnnnnnnnnnnnnnnnnnnnnnnnnnnnnnnnnnnnnnnnnnnnnnnnnnnnnnnnnnnnnnnnnnnnnnnnnnnnnnnnnnnnnnnnnnnnnnnnnnnnnnnnnnnnnnnnnnnnnnnnnnnnnnnnnnnnnnnnnnnnnnnnnnnnnnnnnnnnnnnnnnnnnnnnnnnnnnnnnnnnnnnnnnnnnnnnnnnnnnnnnnnnnnnnnnnnnnnnnnnnnnnnnnnnnnnnnnnnnnnnnnnnnnnnnnnnnnnnnnnnnnnnnnnnnnnnnnnnnnnnnnnnnnnnnnnnnnnnnnnnnnnnnnnnnnnnnnnnnnnnnnnnnnnnnnnnnnnnnnnnnnnnnnnnnnnnnnnnnnnnnnnnnnnnnnnnnnnnnnnnnnnnnnnnnnnnnnnnnnnnnnnnnnnnnnnnnnnnnnnnnnnnnnnnnnnnnnnnnnnnnnnnnnnnnnnnnnnnnnnnnnnnnnnnnnnnnnnnnnnnnnnnnnnnnnnnnnnnnnnnnnnnnnnnnnnnnnnnnnnnnnnnnnnnnnnnnnnnnnnnnnnnnnnnnnnnnnnnnnnnnnnnnnnnnnnnnnnnnnnnnnnnnnnnnnnnnnnnnnnnnnnnnnnnnnnnnnnnnnnnnnnnnnnnnnnnnnnnnnnnnnnnnnnnnnnnnnnnnnnnnnnnnnnnnnnnnnnnnnnnnnnnnnnnnnnnnnnnnnnnnnnnnnnnnnnnnnnnnnnnnnnnnnnnnnnnnnnnnnnnnnnnnnnnnnnnnnnnnnnnnnnnnnnnnnnnnnnnnnnnnnnnnnnnnnnnnnnnnnnnnnnnnnnnnnnnnnnnnnnnnnnnnnnnnnnnnnnnnnnnnnnnnnnnnnnnnnnnnnnnnnnnnnnnnnnnnnnnnnnnnnnnnnnnnnnnnnnnnnnnnnnnnnnnnnnnnnnnnnnnnnnnnnnnnnnnnnnnnnnnnnnnnnnnnnnnnnnnnnnnnnnnnnnnnnnnnnnnnnnnnnnnnnnnnnnnnnnnnnnnnnnnnnnnnnnnnnnnnnnnnnnnnnnnnnnnnnnnnnnnnnnnnnnnnnnnnnnnnnnnnnnnnnnnnnnnnnnnnnnnnnnnnnnnnnnnnnnnnnnnnnnnnnnnnnnnnnnnnnnnnnnnnnnnnnnnnnnnnnnnnnnnnnnnnnnnnnnnnnnnnnnnnnnnnnnnnnnnnnnnnnnnnnnnnnnnnnnnnnnnnnnnnnnnnnnnnnnnnnnnnnnnnnnnnnnnnnnnnnnnnnnnnnnnnnnnnnnnnnnnnnnnnnnnnnnnnnnnnnnnnnnnnnnnnnnnnnnnnnnnnnnnnnnnnnnnnnnnnnnnnnnnnnnnnnnnnnnnnnnnnnnnnnnnnnnnnnnnnnnnnnnnnnnnnnnnnnnnnnnnnnnnnnnnnnnnnnnnnnnnnnnnnnnnnnnnnnnnnnnnnnnnnnnnnnnnnnnnnnnnnnnnnnnnnnnnnnnnnnnnnnnnnnnnnnnnnnnnnnnnnnnnnnnnnnnnnnnnnnnnnnnnnnnnnnnnnnnnnnnnnnnnnnnnnnnnnnnnnnnnnnnnnnnnnnnnnnnnnnnnnnnnnnnnnnnnnnnnnnnnnnnnnnnnnnnnnnnnnnnnnnnnnnnnnnnnnnnnnnnnnnnnnnnnnnnnnnnnnnnnnnnnnnnnnnnnnnnnnnnnnnnnnnnnnnnnnnnnnnnnnnnnnnnnnnnnnnnnnnnnnnnnnnnnnnnnnnnnnnnnnnnnnnnnnnnnnnnnnnnnnnnnnnnnnnnnnnnnnnnnnnnnnnnnnnnnnnnnnnnnnnnnnnnnnnnnnnnnnnnnnnnnnnnnnnnnnnnnnnnnnnnnnnnnnnnnnnnnnnnnnnnnnnnnnnnnnnnnnnnnnnnnnnnnnnnnnnnnnnnnnnnnnnnnnnnnnnnnnnnnnnnnnnnnnnnnnnnnnnnnnnnnnnnnnnnnnnnnnnnnnnnnnnnnnnnnnnnnnnnnnnnnnnnnnnnnnnnnnnnnnnnnnnnnnnnnnnnnnnnnnnnnnnnnnnnnnnnnnnnnnnnnnnnnnnnnnnnnnnnnnnnnnnnnnnnnnnnnnnnnnnnnnnnnnnnnnnnnnnnnnnnnnnnnnnnnnnnnnnnnnnnnnnnnnnnnnnnnnnnnnnnnnnnnnnnnnnnnnnnnnnnnnnnnnnnnnnnnnnnnnnnnnnnnnnnnnnnnnnnnnnnnnnnnnnnnnnnnnnnnnnnnnnnnnnnnnnnnnnnnnnnnnnnnnnnnnnnnnnnnnnnnnnnnnnnnnnnnnnnnnnnnnnnnnnnnnnnnnnnnnnnnnnnnnnnnnnnnnnnnnnnnnnnnnnnnnnnnnnnnnnnnnnnnnnnnnnnnnnnnnnnnnnnnnnnnnnnnnnnnnnnnnnnnnnnnnnnnnnnnnnnnnnnnnnnnnnnnnnnnnnnnnnnnnnnnnnnnnnnnnnnnnnnnnnnnnnnnnnnnnnnnnnnnnnnnnnnnnnnnnnnnnnnnnnnnnnnnnnnnnnnnnnnnnnnnnnnnnnnnnnnnnnnnnnnnnnnnnnnnnnnnnnnnnnnnnnnnnnnnnnnnnnnnnnnnnnnnnnnnnnnnnnnnnnnnnnnnnnnnnnnnnnnnnnnnnnnnnnnnnnnnnnnnnnnnnnnnnnnnnnnnnnnnnnnnnnnnnnnnnnnnnnnnnnnnnnnnnnnnnnnnnnnnnnnnnnnnnnnnnnnnnnnnnnnnnnnnnnnnnnnnnnnnnnnnnnnnnnnnnnnnnnnnnnnnnnnnnnnnnnnnnnnnnnnnnnnnnnnnnnnnnnnnnnnnnnnnnnnnnnnnnnnnnnnnnnnnnnnnnnnnnnnnnnnnnnnnnnnnnnnnnnnnnnnnnnnnnnnnnnnnnnnnnnnnnnnnnnnnnnnnnnnnnnnnnnnnnnnnnnnnnnnnnnnnnnnnnnnnnnnnnnnnnnnnnnnnnnnnnnnnnnnnnnnnnnnnnnnnnnnnnnnnnnnnnnnnnnnnnnnnnnnnnnnnnnnnnnnnnnnnnnnnnnnnnnnnnnnnnnnnnnnnnnnnnnnnnnnnnnnnnnnnnnnnnnnnnnnnnnnnnnnnnnnnnnnnnnnnnnnnnnnnnnnnnnnnnnnnnnnnnnnnnnnnnnnnnnnnnnnnnnnnnnnnnnnnnnnnnnnnnnnnnnnnnnnnnnnnnnnnnnnnnnnnnnnnnnnnnnnnnnnnnnnnnnnnnnnnnnnnnnnnnnnnnnnnnnnnnnnnnnnnnnnnnnnnnnnnnnnnnnnnnnnnnnnnnnnnnnnnnnnnnnnnnnnnnnnnnnnnnnnnnnnnnnnnnnnnnnnnnnnnnnnnnnnnnnnnnnnnnnnnnnnnnnnnnnnnnnnnnnnnnnnnnnnnnnnnnnnnnnnnnnnnnnnnnnnnnnnnnnnnnnnnnnnnnnnnnnnnnnnnnnnnnnnnnnnnnnnnnnnnnnnnnnnnnnnnnnnnnnnnnnnnnnnnnnnnnnnnnnnnnnnnnnnnnnnnnnnnnnnnnnnnnnnnnnnnnnnnnnnnnnnnnnnnnnnnnnnnnnnnnnnnnnnnnnnnnnnnnnnnnnnnnnnnnnnnnnnnnnnnnnnnnnnnnnnnnnnnnnnnnnnnnnnnnnnnnnnnnnnnnnnnnnnnnnnnnnnnnnnnnnnnnnnnnnnnnnnnnnnnnnnnnnnnnnnnnnnnnnnnnnnnnnnnnnnnnnnnnnnnnnnnnnnnnnnnnnnnnnnnnnnnnnnnnnnnnnnnnnnnnnnnnnnnnnnnnnnnnnnnnnnnnnnnnnnnnnnnnnnnnnnnnnnnnnnnnnnnnnnnnnnnnnnnnnnnnnnnnnnnnnnnnnnnnnnnnnnnnnnnnnnnnnnnnnnnnnnnnnnnnnnnnnnnnnnnnnnnnnnnnnnnnnnnnnnnnnnnnnnnnnnnnnnnnnnnnnnnnnnnnnnnnnnnnnnnnnnnnnnnnnnnnnnnnnnnnnnnnnnnnnnnnnnnnnnnnnnnnnnnnnnnnnnnnnnnnnnnnnnnnnnnnnnnnnnnnnnnnnnnnnnnnnnnnnnnnnnnnnnnnnnnnnnnnnnnnnnnnnnnnnnnnnnnnnnnnnnnnnnnnnnnnnnnnnnnnnnnnnnnnnnnnnnnnnnnnnnnnnnnnnnnnnnnnnnnnnnnnnnnnnnnnnnnnnnnnnnnnnnnnnnnnnnnnnnnnnnnnnnnnnnnnnnnnnnnnnnnnnnnnnnnnnnnnnnnnnnnnnnnnnnnnnnnnnnnnnnnnnnnnnnnnnnnnnnnnnnnnnnnnnnnnnnnnnnnnnnnnnnnnnnnnnnnnnnnnnnnnnnnnnnnnnnnnnnnnnnnnnnnnnnnnnnnnnnnnnnnnnnnnnnnnnnnnnnnnnnnnnnnnnnnnnnnnnnnnnnnnnnnnnnnnnnnnnnnnnnnnnnnnnnnnnnnnnnnnnnnnnnnnnnnnnnnnnnnnnnnnnnnnnnnnnnnnnnnnnnnnnnnnnnnnnnnnnnnnnnnnnnnnnnnnnnnnnnnnnnnnnnnnnnnnnnnnnnnnnnnnnnnnnnnnnnnnnnnnnnnnnnnnnnnnnnnnnnnnnnnnnnnnnnnnnnnnnnnnnnnnnnnnnnnnnnnnnnnnnnnnnnnnnnnnnnnnnnnnnnnnnnnnnnnnnnnnnnnnnnnnnnnnnnnnnnnnnnnnnnnnnnnnnnnnnnnnnnnnnnnnnnnnnnnnnnnnnnnnnnnnnnnnnnnnnnnnnnnnnnnnnnnnnnnnnnnnnnnnnnnnnnnnnnnnnnnnnnnnnnnnnnnnnnnnnnnnnnnnnnnnnnnnnnnnnnnnnnnnnnnnnnnnnnnnnnnnnnnnnnnnnnnnnnnnnnnnnnnnnnnnnnnnnnnnnnnnnnnnnnnnnnnnnnnnnnnnnnnnnnnnnnnnnnnnnnnnnnnnnnnnnnnnnnnnnnnnnnnnnnnnnnnnnnnnnnnnnnnnnnnnnnnnnnnnnnnnnnnnnnnnnnnnnnnnnnnnnnnnnnnnnnnnnnnnnnnnnnnnnnnnnnnnnnnnnnnnnnnnnnnnnnnnnnnnnnnnnnnnnnnnnnnnnnnnnnnnnnnnnnnnnnnnnnnnnnnnnnnnnnnnnnnnnnnnnnnnnnnnnnnnnnnnnnnnnnnnnnnnnnnnnnnnnnnnnnnnnnnnnnnnnnnnnnnnnnnnnnnnnnnnnnnnnnnnnnnnnnnnnnnnnnnnnnnnnnnnnnnnnnnnnnnnnnnnnnnnnnnnnnnnnnnnnnnnnnnnnnnnnnnnnnnnnnnnnnnnnnnnnnnnnnnnnnnnnnnnnnnnnnnnnnnnnnnnnnnnnnnnnnnnnnnnnnnnnnnnnnnnnnnnnnnnnnnnnnnnnnnnnnnnnnnnnnnnnnnnnnnnnnnnnnnnnnnnnnnnnnnnnnnnnnnnnnnnnnnnnnnnnnnnnnnnnnnnnnnnnnnnnnnnnnnnnnnnnnnnnnnnnnnnnnnnnnnnnnnnnnnnnnnnnnnnnnnnnnnnnnnnnnnnnnnnnnnnnnnnnnnnnnnnnnnnnnnnnnnnnnnnnnnnnnnnnnnnnnnnnnnnnnnnnnnnnnnnnnnnnnnnnnnnnnnnnnnnnnnnnnnnnnnnnnnnnnnnnnnnnnnnnnnnnnnnnnnnnnnnnnnnnnnnnnnnnnnnnnnnnnnnnnnnnnnnnnnnnnnnnnnnnnnnnnnnnnnnnnnnnnnnnnnnnnnnnnnnnnnnnnnnnnnnnnnnnnnnnnnnnnnnnnnnnnnnnnnnnnnnnnnnnnnnnnnnnnnnnnnnnnnnnnnnnnnnnnnnnnnnnnnnnnnnnnnnnnnnnnnnnnnnnnnnnnnnnnnnnnnnnnnnnnnnnnnnnnnnnnnnnnnnnnnnnnnnnnnnnnnnnnnnnnnnnnnnnnnnnnnnnnnnnnnnnnnnnnnnnnnnnnnnnnnnnnnnnnnnnnnnnnnnnnnnnnnnnnnnnnnnnnnnnnnnnnnnnnnnnnnnnnnnnnnnnnnnnnnnnnnnnnnnnnnnnnnnnnnnnnnnnnnnnnnnnnnnnnnnnnnnnnnnnnnnnnnnnnnnnnnnnnnnnnnnnnnnnnnnnnnnnnnnnnnnnnnnnnnnnnnnnnnnnnnnnnnnnnnnnnnnnnnnnnnnnnnnnnnnnnnnnnnnnnnnnnnnnnnnnnnnnnnnnnnnnnnnnnnnnnnnnnnnnnnnnnnnnnnnnnnnnnnnnnnnnnnnnnnnnnnnnnnnnnnnnnnnnnnnnnnnnnnnnnnnnnnnnnnnnnnnnnnnnnnnnnnnnnnnnnnnnnnnnnnnnnnnnnnnnnnnnnnnnnnnnnnnnnnnnnnnnnnnnnnnnnnnnnnnnnnnnnnnnnnnnnnnnnnnnnnnnnnnnnnnnnnnnnnnnnnnnnnnnnnnnnnnnnnnnnnnnnnnnnnnnnnnnnnnnnnnnnnnnnnnnnnnnnnnnnnnnnnnnnnnnnnnnnnnnnnnnnnnnnnnnnnnnnnnnnnnnnnnnnnnnnnnnnnnnnnnnnnnnnnnnnnnnnnnnnnnnnnnnnnnnnnnnnnnnnnnnnnnnnnnnnnnnnnnnnnnnnnnnnnnnnnnnnnnnnnnnnnnnnnnnnnnnnnnnnnnnnnnnnnnnnnnnnnnnnnnnnnnnnnnnnnnnnnnnnnnnnnnnnnnnnnnnnnnnnnnnnnnnnnnnnnnnnnnnnnnnnnnnnnnnnnnnnnnnnnnnnnnnnnnnnnnnnnnnnnnnnnnnnnnnnnnnnnnnnnnnnnnnnnnnnnnnnnnnnnnnnnnnnnnnnnnnnnnnnnnnnnnnnnnnnnnnnnnnnnnnnnnnnnnnnnnnnnnnnnnnnnnnnnnnnnnnnnnnnnnnnnnnnnnnnnnnnnnnnnnnnnnnnnnnnnnnnnnnnnnnnnnnnnnnnnnnnnnnnnnnnnnnnnnnnnnnnnnnnnnnnnnnnnnnnnnnnnnnnnnnnnnnnnnnnnnnnnnnnnnnnnnnnnnnnnnnnnnnnnnnnnnnnnnnnnnnnnnnnnnnnnnnnnnnnnnnnnnnnnnnnnnnnnnnnnnnnnnnnnnnnnnnnnnnnnnnnnnnnnnnnnnnnnnnnnnnnnnnnnnnnnnnnnnnnnnnnnnnnnnnnnnnnnnnnnnnnnnnnnnnnnnnnnnnnnnnnnnnnnnnnnnnnnnnnnnnnnnnnnnnnnnnnnnnnnnnnnnnnnnnnnnnnnnnnnnnnnnnnnnnnnnnnnnnnnnnnnnnnnnnnnnnnnnnnnnnnnnnnnnnnnnnnnnnnnnnnnnnnnnnnnnnnnnnnnnnnnnnnnnnnnnnnnnnnnnnnnnnnnnnnnnnnnnnnnnnnnnnnnnnnnnnnnnnnnnnnnnnnnnnnnnnnnnnnnnnnnnnnnnnnnnnnnnnnnnnnnnnnnnnnnnnnnnnnnnnnnnnnnnnnnnnnnnnnnnnnnnnnnnnnnnnnnnnnnnnnnnnnnnnnnnnnnnnnnnnnnnnnnnnnnnnnnnnnnnnnnnnnnnnnnnnnnnnnnnnnnnnnnnnnnnnnnnnnnnnnnnnnnnnnnnnnnnnnnnnnnnnnnnnnnnnnnnnnnnnnnnnnnnnnnnnnnnnnnnnnnnnnnnnnnnnnnnnnnnnnnnnnnnnnnnnnnnnnnnnnnnnnnnnnnnnnnnnnnnnnnnnnnnnnnnnnnnnnnnnnnnnnnnnnnnnnnnnnnnnnnnnnnnnnnnnnnnnnnnnnnnnnnnnnnnnnnnnnnnnnnnnnnnnnnnnnnnnnnnnnnnnnnnnnnnnnnnnnnnnnnnnnnnnnnnnnnnnnnnnnnnnnnnnnnnnnnnnnnnnnnnnnnnnnnnnnnnnnnnnnnnnnnnnnnnnnnnnnnnnnnnnnnnnnnnnnnnnnnnnnnnnnnnnnnnnnnnnnnnnnnnnnnnnnnnnnnnnnnnnnnnnnnnnnnnnnnnnnnnnnnnnnnnnnnnnnnnnnnnnnnnnnnnnnnnnnnnnnnnnnnnnnnnnnnnnnnnnnnnnnnnnnnnnnnnnnnnnnnnnnnnnnnnnnnnnnnnnnnnnnnnnnnnnnnnnnnnnnnnnnnnnnnnnnnnnnnnnnnnnnnnnnnnnnnnnnnnnnnnnnnnnnnnnnnnnnnnnnnnnnnnnnnnnnnnnnnnnnnnnnnnnnnnnnnnnnnnnnnnnnnnnnnnnnnnnnnnnnnnnnnnnnnnnnnnnnnnnnnnnnnnnnnnnnnnnnnnnnnnnnnnnnnnnnnnnnnnnnnnnnnnnnnnnnnnnnnnnnnnnnnnnnnnnnnnnnnnnnnnnnnnnnnnnnnnnnnnnnnnnnnnnnnnnnnnnnnnnnnnnnnnnnnnnnnnnnnnnnnnnnnnnnnnnnnnnnnnnnnnnnnnnnnnnnnnnnnnnnnnnnnnnnnnnnnnnnnnnnnnnnnnnnnnnnnnnnnnnnnnnnnnnnnnnnnnnnnnnnnnnnnnnnnnnnnnnnnnnnnnnnnnnnnnnnnnnnnnnnnnnnnnnnnnnnnnnnnnnnnnnnnnnnnnnnnnnnnnnnnnnnnnnnnnnnnnnnnnnnnnnnnnnnnnnnnnnnnnnnnnnnnnnnnnnnnnnnnnnnnnnnnnnnnnnnnnnnnnnnnnnnnnnnnnnnnnnnnnnnnnnnnnnnnnnnnnnnnnnnnnnnnnnnnnnnnnnnnnnnnnnnnnnnnnnnnnnnnnnnnnnnnnnnnnnnnnnnnnnnnnnnnnnnnnnnnnnnnnnnnnnnnnnnnnnnnnnnnnnnnnnnnnnnnnnnnnnnnnnnnnnnnnnnnnnnnnnnnnnnnnnnnnnnnnnnnnnnnnnnnnnnnnnnnnnnnnnnnnnnnnnnnnnnnnnnnnnnnnnnnnnnnnnnnnnnnnnnnnnnnnnnnnnnnnnnnnnnnnnnnnnnnnnnnnnnnnnnnnnnnnnnnnnnnnnnnnnnnnnnnnnnnnnnnnnnnnnnnnnnnnnnnnnnnnnnnnnnnnnnnnnnnnnnnnnnnnnnnnnnnnnnnnnnnnnnnnnnnnnnnnnnnnnnnnnnnnnnnnnnnnnnnnnnnnnnnnnnnnnnnnnnnnnnnnnnnnnnnnnnnnnnnnnnnnnnnnnnnnnnnnnnnnnnnnnnnnnnnnnnnnnnnnnnnnnnnnnnnnnnnnnnnnnnnnnnnnnnnnnnnnnnnnnnnnnnnnnnnnnnnnnnnnnnnnnnnnnnnnnnnnnnnnnnnnnnnnnnnnnnnnnnnnnnnnnnnnnnnnnnnnnnnnnnnnnnnnnnnnnnnnnnnnnnnnnnnnnnnnnnnnnnnnnnnnnnnnnnnnnnnnnnnnnnnnnnnnnnnnnnnnnnnnnnnnnnnnnnnnnnnnnnnnnnnnnnnnnnnnnnnnnnnnnnnnnnnnnnnnnnnnnnnnnnnnnnnnnnnnnnnnnnnnnnnnnnnnnnnnnnnnnnnnnnnnnnnnnnnnnnnnnnnnnnnnnnnnnnnnnnnnnnnnnnnnnnnnnnnnnnnnnnnnnnnnnnnnnnnnnnnnnnnnnnnnnnnnnnnnnnnnnnnnnnnnnnnnnnnnnnnnnnnnnnnnnnnnnnnnnnnnnnnnnnnnnnnnnnnnnnnnaaagatcttggtatccgtggtgctgacgcaaaggaaattgcgcaagcagtgatcgcgcacaagggagccgagattgaaacgcgcgcagcagcagtgctgattcttgaagcgctagaggaacctgcttggtatcacagcgcaggaatgactgacgatggagggattgcgctctatcacaaaatgccaggacgattgctcaagagagtttccaattcaccaaatgtcgcgtttgtgagtgccacgctctccattggtgggaagtttgatgactttcggcgcgcaatgggaatcacggggcagagttccttgtccgcgatcattgagccaagccatcacggaaccctgaagttctttcacgcagtgcatcaggtttcttctgaggagtggttgtccgcaacgcaagaagcaatcaacaaagcgcagaagccttgcttggtggtcactccaagtaatgagttatctcagatgttgggtcggttgttcccacaggcgattgttcgcacggctgaagagaagactgctgacgcgatcctccgactcacagatgaaagaaatattctcatcgcctcagctgcttgggcgggattggacacgccgattgagtggaagagcattgtgattccgcgcattccgtttctgcgcccacaggtgattgacggaaatgtggagagcagcttctttgactcacgcaacagcgctattcgccgaatgcgccaagtgatcggtcgtggactacgcaagcctgatgctgagtgtgaggtctacattcttgacgaacgcttggcgatgattgagtcattcatcccgtcaagatttcagcaagcgtggaccgcgcgtggaagggtggaaggagcaagaactgaacatacgctgtcaaaagcagagcgggatccacaggtccgcaagtcagcgctgaagcactttggtcggcgatgtatgtcttgcgacttcgttccgcgagtggacagtcagcttgaggttcatcatcttcatcccctagcgaatggcggtgaacgaatcacacggatccaaacggatgtcgcggtgctgtgtgcgaactgtcatcgcttggctcattcggcgacaccacctctcacggttgaggttcttaggggacttcaccaatcagtggggtcggagcaatgagccgaagccacgcgaacgagagttccaaaagggttccaaaaccctccgtataccctcgcttacctagccgctcacgccgctaatagccctcgagatttgagcgtatgaaacgctgttccaacgccacaccgaagcgtctgactgatcctcttcggcgacattcccttcttgtagagctcaacgatggcggctctggtcgagtcagtcacgctacttggacgcccaagtttctttccttccttccgagctcgctcaacaccaatccgaatccgctcacgaatcagatcccgctcaaactcagcgaacgatgaaaacacaccgaacatcagctttcctgatggggtggtggtgtcgatcgcctgttggtggaagtagagctgaacgccttgagcgtgaaggtcgttcacggtggtcacaaggtgctgaagggaacgcccaagacggtcaatgctccacacggcgatcagatcgaattcgcggcgagtggcggctttcaagagaccatcgagagcagggcgctgatcgcgtcccttggcgcctgagataccatcgtcacgataggtcgcgacgatgttccacccacgaagggctgcgatccgttcgagttcgtggagttgattgtcggcggtttggtgagcggtggagacgcgaagatagagagcggtacgcatttaggagcctccaagtcgttgaattagtaacctagcctctaagaaaactctagcgtatgattcttgtcttagaaatcgctgaaacccgaataaattcaggctcttatatcgttctctaaaggggttccgaatcgagctagtctcgatagtcccaaggatgcggcgagtgtgaaaattaccacccgtaaaaccgcagcggagcaaacgcttcatatctacacacgggtcagcaccgcagctcaacgggatgacggaacatccttacagacgcaactagagcaaggtaccgctcgcgccaagcaacttgggctgaagactcgacattgggatgaaggcgggaaaagttctcaccacgaagatctagccgctcgacctacactcgctgctctctaccaagccatcaaggatggtggggtcaagcacctgttcgtttacgatcaatcgcggttgtcacgaaacgacaatgtcgcctcaatttttcgatatgaatgtaacaagcagggtgtcacgctttacacgaaagacggacgctttgatctctccaatcctcaggacaagtttctaaaacagattcttgatgggctttcggaatttgataacgcgattcgcgcggaacgcacacgactaggaaaactaaatcgcgcacgatcaggcgggtggcacggcggtccacctcctttcggctacaagctcgtagaccgtcggctcacaatcgagccaaaagaatcaaaatgggtgaagcgaatattctcagaagcgttcaatggacaaagcccacagaagatcaaacagctacttgactcaaactcagtcagtccgagaaggggtgggctttggacgattggttctgtggctgcgttactgaaaaactctcactacatcgggaactacacattcaaggatcgtaagtctgatgaactagtgaccgttacttgccccgcgatagttgaccccgacctgtggaaagctgttcacctcaaacgcaaacgacaaaacagtcgagcggctcagaaaaacccaactaagcacttttatcttttgcgcgatctgatgtattgcggtcactgtgggcgaccgatttcaggtagacaaaaaccgagtaagcgagagcaactttactactgtcctaacaaagagcgcgaatgggcaaagcagggcggaagcaaaaccaaatggaagcgaggtctgggttgtggaatgagtcgcgctctcaatattgctcagactgacgagctcgtctttagtgcggtcttgaacattcacgacaagtctcacttactcaaggagcaggtgaagcgaagtgtcttatcagaggatggcgcatctaccatcaagtccgctacggagattgaggcgctcaactcaaagatgcgtcggcttgaaaagcggttagaacaagctcgtggtcttctcggtatcgctgagggtcatcgtgatctaggtaagatgagcaaatcgcaattcgaatctcgacggaaggtcattgagtctgagattgagttggttgaaaccgagctgaacaacttgaaactttcaatcaagggtcagcaaacccacaaaaagtgggatgcttggataaagcagtttggcgaaatgattgcgtccaaaatgaccttgagtcaggaagcaaagaggcagtacatcgcgggtctgttagaccgcattgaggttcgttacctaaaggcgaatgacgctcacgaactcaggcttcagttccgtctccccatcgtgaacgaccaattccaccgtaagggcattcgtcggaaaggggattggtatgatttgggtgaagggacgagggatttgctcctgagagtggacaaaaacccgagtaaaaaacagggaaaagcacttgcccccgagcaaaaccagaccgctactgtcgaatgacggttagatgggcaccgcctcgaggtcgtattcatctgaacttgtgatctttacgcgagcgaactcaccaacggtgagtttttcgccctgcttaatgcgtacaacgccatcaat

SEQ ID NO: 137 - DNA, 13820 bp, Artificial Sequence; identical to SEQ ID NO: 136
  Synthetic Oligonucleotide
  misc_feature (1)..(9999): n is a, c, g, or t

SEQ ID NO: 138 - DNA, 13788 bp, Artificial Sequence
  Synthetic Oligonucleotide
  misc_feature (1)..(3769): n is a, c, g, or t
nnnnnnnnnnnnnnnnnnnnnnnnnnnnnnnnnnnnnnnnnnnnnnnnnnnnnnnnnnnnnnnnnnnnnnnnnnnnnnnnnnnnnnnnnnnnnnnnnnnnnnnnnnnnnnnnnnnnnnnnnnnnnnnnnnnnnnnnnnnnnnnnnnnnnnnnnnnnnnnnnnnnnnnnnnnnnnnnnnnnnnnnnnnnnnnnnnnnnnnnnnnnnnnnnnnnnnnnnnnnnnnnnnnnnnnnnnnnnnnnnnnnnnnnnnnnnnnnnnnnnnnnnnnnnnnnnnnnnnnnnnnnnnnnnnnnnnnnnnnnnnnnnnnnnnnnnnnnnnnnnnnnnnnnnnnnnnnnnnnnnnnnnnnnnnnnnnnnnnnnnnnnnnnnnnnnnnnnnnnnnnnnnnnnnnnnnnnnnnnnnnnnnnnnnnnnnnnnnnnnnnnnnnnnnnnnnnnnnnnnnnnnnnnnnnnnnnnnnnnnnnnnnnnnnnnnnnnnnnnnnnnnnnnnnnnnnnnnnnnnnnnnnnnnnnnnnnnnnnnnnnnnnnnnnnnnnnnnnnnnnnnnnnnnnnnnnnnnnnnnnnnnnnnnnnnnnnnnnnnnnnnnnnnnnnnnnnnnnnnnnnnnnnnnnnnnnnnnnnnnnnnnnnnnnnnnnnnnnnnnnnnnnnnnnnnnnnnnnnnnnnnnnnnnnnnnnnnnnnnnnnnnnnnnnnnnnnnnnnnnnnnnnnnnnnnnnnnnnnnnnnnnnnnnnnnnnnnnnnnnnnnnnnnnnnnnnnnnnnnnnnnnnnnnnnnnnnnnnnnnnnnnnnnnnnnnnnnnnnnnnnnnnnnnnnnnnnnnnnnnnnnnnnnnnnnnnnnnnnnnnnnnnnnnnnnnnnnnnnnnnnnnnnnnnnnnnnnnnnnnnnnnnnnnnnnnnnnnnnnnnnnnnnnnnnnnnnnnnnnnnnnnnnnnnnnnnnnnnnnnnnnnnnnnnnnnnnnnnnnnnnnnnnnnnnnnnnnnnnnnnnnnnnnnnnnnnnnnnnnnnnnnnnnnnnnnnnnnnnnnnnnnnnnnnnnnnnnnnnnnnnnnnnnnnnnnnnnnnnnnnnnnnnnnnnnnnnnnnnnnnnnnnnnnnnnnnnnnnnnnnnnnnnnnnnnnnnnnnnnnnnnnnnnnnnnnnnnnnnnnnnnnnnnnnnnnnnnnnnnnnnnnnnnnnnnnnnnnnnnnnnnnnnnnnnnnnnnnnnnnnnnnnnnnnnnnnnnnnnnnnnnnnnnnnnnnnnnnnnnnnnnnnnnnnnnnnnnnnnnnnnnnnnnnnnnnnnnnnnnnnnnnnnnnnnnnnnnnnnnnnnnnnnnnnnnnnnnnnnnnnnnnnnnnnnnnnnnnnnnnnnnnnnnnnnnnnnnnnnnnnnnnnnnnnnnnnnnnnnnnnnnnnnnnnnnnnnnnnnnnnnnnnnnnnnnnnnnnnnnnnnnnnnnnnnnnnnnnnnnnnnnnnnnnnnnnnnnnnnnnnnnnnnnnnnnnnnnnnnnnnnnnnnnnnnnnnnnnnnnnnnnnnnnnnnnnnnnnnnnnnnnnnnnnnnnnnnnnnnnnnnnnnnnnnnnnnnnnnnnnnnnnnnnnnnnnnnnnnnnnnnnnnnnnnnnnnnnnnnnnnnnnnnnnnnnnnnnnnnnnnnnnnnnnnnnnnnnnnnnnnnnnnnnnnnnnnnnnnnnnnnnnnnnnnnnnnnnnnnnnnnnnnnnnnnnnnnnnnnnnnnnnnnnnnnnnnnnnnnnnnnnnnnnnnnnnnnnnnnnnnnnnnnnnnnnnnnnnnnnnnnnnnnnnnnnnnnnnnnnnnnnnnnnnnnnnnnnnnnnnnnnnnnnnnnnnnnnnnnnnnnnnnnnnnnnnnnnnnnnnnnnnnnnnnnnnnnnnnnnnnnnnnnnnnnnnnnnnnnnnnnnnnnnnnnnnnnnnnnnnnnnnnnnnnnnnnnnnnnnnnnnnnnnnnnnnnnnnnnnnnnnnnnnnnnnnnnnnnnnnnnnnnnnnnnnnnnnnnnnnnnnnnnnnnnnnnnnnnnnnnnnnnnnnnnnnnnnnnnnnnnnnnnnnnnnnnnnnnnnnnnnnnnnnnnnnnnnnnnnnnnnnnnnnnnnnnnnnnnnnnnnnnnnnnnnnnnnnnnnnnnnnnnnnnnnnnnnnnnnnnnnnnnnnnnnnnnnnnnnnnnnnnnnnnnnnnnnnnnnnnnnnnnnnnnnnnnnnnnnnnnnnnnnnnnnnnnnnnnnnnnnnnnnnnnnnnnnnnnnnnnnnnnnnnnnnnnnnnnnnnnnnnnnnnnnnnnnnnnnnnnnnnnnnnnnnnnnnnnnnnnnnnnnnnnnnnnnnnnnnnnnnnnnnnnnnnnnnnnnnnnnnnnnnnnnnnnnnnnnnnnnnnnnnnnnnnnnnnnnnnnnnnnnnnnnnnnnnnnnnnnnnnnnnnnnnnnnnnnnnnnnnnnnnnnnnnnnnnnnnnnnnnnnnnnnnnnnnnnnnnnnnnnnnnnnnnnnnnnnnnnnnnnnnnnnnnnnnnnnnnnnnnnnnnnnnnnnnnnnnnnnnnnnnnnnnnnnnnnnnnnnnnnnnnnnnnnnnnnnnnnnnnnnnnnnnnnnnnnnnnnnnnnnnnnnnnnnnnnnnnnnnnnnnnnnnnnnnnnnnnnnnnnnnnnnnnnnnnnnnnnnnnnnnnnnnnnnnnnnnnnnnnnnnnnnnnnnnnnnnnnnnnnnnnnnnnnnnnnnnnnnnnnnnnnnnnnnnnnnnnnnnnnnnnnnnnnnnnnnnnnnnnnnnnnnnnnnnnnnnnnnnnnnnnnnnnnnnnnnnnnnnnnnnnnnnnnnnnnnnnnnnnnnnnnnnnnnnnnnnnnnnnnnnnnnnnnnnnnnnnnnnnnnnnnnnnnnnnnnnnnnnnnnnnnnnnnnnnnnnnnnnnnnnnnnnnnnnnnnnnnnnnnnnnnnnnnnnnnnnnnnnnnnnnnnnnnnnnnnnnnnnnnnnnnnnnnnnnnnnnnnnnnnnnnnnnnnnnnnnnnnnnnnnnnnnnnnnnnnnnnnnnnnnnnnnnnnnnnnnnnnnnnnnnnnnnnnnnnnnnnnnnnnnnnnnnnnnnnnnnnnnnnnnnnnnnnnnnnnnnnnnnnnnnnnnnnnnnnnnnnnnnnnnnnnnnnnnnnnnnnnnnnnnnnnnnnnnnnnnnnnnnnnnnnnnnnnnnnnnnnnnnnnnnnnnnnnnnnnnnnnnnnnnnnnnnnnnnnnnnnnnnnnnnnnnnnnnnnnnnnnnnnnnnnnnnnnnnnnnnnnnnnnnnnnnnnnnnnnnnnnnnnnnnnnnnnnnnnnnnnnnnnnnnnnnnnnnnnnnnnnnnnnnnnnnnnnnnnnnnnnnnnnnnnnnnnnnnnnnnnnnnnnnnnnnnnnnnnnnnnnnnnnnnnnnnnnnnnnnnnnnnnnnnnnnnnnnnnnnnnnnnnnnnnnnnnnnnnnnnnnnnnnnnnnnnnnnnnnnnnnnnnnnnnnnnnnnnnnnnnnnnnnnnnnnnnnnnnnnnnnnnnnnnnnnnnnnnnnnnnnnnnnnnnnnnnnnnnnnnnnnnnnnnnnnnnnnnnnnnnnnnnnnnnnnnnnnnnnnnnnnnnnnnnnnnnnnnnnnnnnnnnnnnnnnnnnnnnnnnnnnnnnnnnnnnnnnnnnnnnnnnnnnnnnnnnnnnnnnnnnnnnnnnnnnnnnnnnnnnnnnnnnnnnnnnnnnnnnnnnnnnnnnnnnnnnnnnnnnnnnnnnnnnnnnnnnnnnnnnnnnnnnnnnnnnnnnnnnnnnnnnnnnnnnnnnnnnnnnnnnnnnnnnnnnnnnnnnnnnnnnnnnnnaagccgttcatcgccatcaataccgcagcaattccgaaggatctgcttgaatcggagctattcggccatgagcgcggcgcgtttaccggcgcgcagagcatgcggcgcggccgcttcgagcaggccgacggcggcacattgtttctcgatgaaatcggcgatatgccggccgatcttcagacgcggctgctgcgggtgttgtccgacggccagttttaccgtgtcggggggcatcagccgatcaaggccaatgtgcgtgtgatcgctgccactcaccaggacctcgatgttcgcgtcaagcagggattgtttcgggaagatctgtttcatcgtctgaacgtgatccggctgcggctgccgccgctgcgggagcggcgtgaggacataccgccgctcatcaagcatttcctggccaagagcgcacgcgcactcggcgtggaggcgaaacggctgtcgagcgccgcgctgaaattcctgtcggcgcaggattttccgggcaacgtgcgccagctcgagaacctgtgccactggctgacggtgatggcagcgggggtcaacatcgaaatcaaggacctgccgcccgaactgcgcctcgacgcgggtgccggcaccgagcagagttgggtcggcgcgctggagcgcgaagtcgcaaacgcgctgaaccgcggcgagtcgggattgatgaacctgctcgggccgcaattcgagaaggcgctgattgcgcgcgcccttgcccacaccggcggccgccgcatcgaggccgcgaatctgttgggcctcggccgcaatacgctgacgcgcaagatccaggaattgggcctggacgccgaccctaagccggattagttcagctcagcgataaccggcgcgtgatcggatggccgttccgacccgcgcgggccggggtcgatgttgcaggcaagacatgccggcgcgagaccatcgctcagcaggatatgatcgatgcgcagacccatcctgcgcttgaaggcgttcatacggtagtcccaccacgagaatgaattcgcaggctgctcgaacagacgaaagctgtccttgagcccgagcgccagcagctcctgaaatgccttgcgttcgggcgcgctgaccagcacctgcccctgccacgctgcggggtcgtgcacgtcggcgtcttcgggggcaatgttgaaatctcccacaaccgcaagccgcgggctcgccgcgagttcgtgtttaagccacgcggtgaccgcggcaagccattcgagcttgtagcggtatttgtcggagtcgacactttggccattaggcacgtacaggcagaccacgcgcagattgccgacagtggcggcgagtacccgcttctgcgggtcgatgagccccggtatttcggccagcgcctcacgcccggcatcgcgtgagagtatcgctacgccgttataagttttctggccgctgaacaagacctgataacccgcggcctgcaactccgggaccggaaaatttgcgtcttcgagcttggtttcctgcaaacacaggatgtcgggctgatgtaactgcaaccaggccaggacctgcggcaggcggactttcagcgagttgacgttccaggttgccagcttcatgattgacataacatattgttaattacgctccgctacccaaggctccaatgatagcccgctctacagggcgagtgtgctgcttcgttaatgagcggacttaagaatccgacaatcaaaaaattcgcgacacggcacaacctgtagcgcggcaggctttgacccagccggggcgaggtgctagagtggtctgaattctgaccaactggagccgacctcgatgaagacccttcccctttcggaagccaagagccagctcagcggcctggtcgagcaggtacgcgcgctcgagcaacaggtggtgatcacccgcaacggacgcccggtcgccgtgcttgtcagcgcggaagagttcgagcgctggaaggaaaccatcgaggtgcgcggggacgcggcgctaatgaaggagatccgcgccgggttgcgtgcgctgaaatcgcgcaaggctcgcctgtatacgctcgaagaattgctcggctgaacggtctcaggggcgtggggaagccgccaatccggttcagggtttccgcggaagtcgcgcaactggtgcgcggcctgcaccctgatatcaagcgcaaagtgcgcgcggctcttgatcggcttgcgctcgatgccgaagccggcaaggcgctgcaaggcgatctcaaaggactgcgcagcctgcgggtggcacgctttcgcgccatctaccgggcgcccgcgcgccgggtcatcgagatcgtgtcgatcggaccccgggaccgcatctacgaagagaccctgcggctggtatcggcggagcgcaggcgttaaggcatcgcagtcgcggtcggtatgctcgaccgtgctccggaaactatcattcgatctttgccggggacaacgggcgggtactgggttacgacagccaacatggtcgccatcaccggcattacctcgggattgtgaccgagatcacgtttgagagcttcgaggaaatcgaagccctgttcgagggtaagttgcatcaattgctaaaacgaggttccctaaggtagtgccatggcactcgggcacctttcgatgcgcgagacttcgagcagggattttcattaggggaaccgtagactgttccccgccattctcgtaggcaatatggcttggaagccaatacccatgcgggtttcaatcctatttgcgcttctaaaaacactaatatttatgatcctgcaccctcgctccgtgattaaaagaacaacgcccgcgcaaggcgggcgttgggtgaggtgtttcaacttttattgatcgcgcgcatacgagaagacactgcgcgcccgaagccatcagggggattatcaggcttgggtttacttgctacggcgggcggtgaatctgccgttgcgggagtttgcaaagcagagcaaggtatcgccttcacgtatatcgaaaatccagcggacgattgtccaggctacgtaatagattacgttacgctattgaagcgcgaggatgcggatagtccgagtaatatgcattggcagacgacgggggatcagctttttatttgtggaggcgtgatgcaaaagacattttcggtaacggcctatctttcctcgcctttcgtgacgggcggcggatatatgacgcttgacggcttgttagcggcgcggttgttcgaggaattgcaaaatgtcgaagccgcgcacgcggcggtgcctgtcaggtgtaatgcggggcttgcctgtgccagcggtgcgatttacgagccagtatcggtagaccgaatagcgttcgtcgcgcaacttcgggcggggcattccctgaatccagacctgatcaaaaagaataagcgtggagcattgcatagagacgtgaacgacacatcgttatgcaacgtgatgaatgcatacacgctagtcaccgcgcctaccatcacctggtatggggagggcgatggcaatgaggtgatgcgcctgctggctggcgttgaattcatcggcaagcggcgcgcgtccggttttgggcgggtcacgaggtgggaaattgctgacggcgatctggacggcataacgggctacgcgggagaaccattgcgccccgtgccggttgaaatgttttccggtgatgatgccaggccaatagtcgatgcggcgtggcgtttgccgtattggtcgcctgttaatcgcgctgcttgttacgtgccgaccggagcaataaatgcttgaattcttcaatagcaacttcggccgccacttcgccgagcaaacaggcgacgcaatggcggatgccaaggccgcgctatctggcggccatcccatgaagaaaggcggtatgcctcagcgcatttcgtcgggttgggcgatcgtgcgccctggcaagtccgtgatgcagatgaagttcgcggcgaagggggtggattacgcggttgaggacagatacacggcattcctctctgaactacaggcatgggatggaaagccgcgcattttcctcacattcgacaagaagccgatcccggttggcaatgtgtttgtaacgtatgacctgcgggcagttcgtatttgctctcccgccggggttgaaacttttgattttacggttccgccggagaaatccagcggcgtggctcataaggttatctggaaaaagaaagcggggaaaaaatgatagtcgattacgtgttgcccaagccagcaagcgcagggggttattctttgcatcggattgtcgaggggttaactggcggtgcgcgcccgttgttcgcggacatgggcgaccgccttttggtgcgtagcgcagtgccaataaacggtgtggaaaccttgccggtgcgcgaacttgctgcgggagatatggcggcattccagttgcgcgcctcggtcagcaagaaaacgcgcggtaaacgcagttactacccgacggctgattggtcaacccgtcacgactggctgcggcggcaaggcgagcggcatgggttcgaggtgctgaccgttcattgcaccgctgatttctcaaagattgaaaagacgggacagcgatttacagtggacaggacggacttcaccggggttttgaaagtcagggatacagagaaattcagcgcagcactgcgcgacggtattagcggatgcggtaaggcttttggttttggaatgttgttaatttgaatgcaaaggaaataacatgaaaaacagcaacagtatcctcatcaactctaccatcaccaccgtcggcccgttgtccatcaagatgccggtcgcgcaaggcggaatcgagaacaggttcgggaacttcccgctgttcacggtcggcgcaaaggaaatgcagggcaaggacggcgagagctacaccgcgaaggagcacaccggctaccttccctcgacaacggtccggggtttcctgcggcgcgccatcgtaacggatgcaatgacacgcgccgccgaggaaggtaaccactacacactgcaaagggcctacgccgacctgatcggccaagacgcggcatcggagaagtctgagaagattgacctgctggcggctcgcaagctgcgagatgagaacgaggttctcgacctattcgggtgcggcatcagcatgtcatcgcgtttacttgttagccacttcatgcccgcgggcggcgcagcgttgccggagtttgtaagtgtcgtcaggaaagacctcgaggacaccgagggcgtggttgaggctctgacgccctttgatcgcgatgcttactatgcccgcggcgattccaattcacgtcgggcagacgccgctgggttggccgctgacctgaagcggaagttgaaggctgcttccaagaaaggcgaagacgtaaaaggtcttgacgcgcagttgaaggaggccgaggcgttggttgcgaagttcgaggttcagatgggcgacatgcagaacagcagccgtacattggcgggctactacgcgctgcctcccggcaccgtgctgacaggcaagatcatcatcgagcgtccgcgtgaccgtgatttgccgatgattgagttggcgctggatgcgctgagccgccgcccgttgctcggcggtcaggtggctcgcggctgcggtgagattgccggcagcttcgatgtgttgaagggcggcgtattgctgaaaaaaatcaccatcggtggttttgcgcctgccgccgtggtcaattttggcgcggtggataatgagaaaaaatcagcgtaattgcagggatgcttgaagtcgggtcaagccacccgttatttgggtggttactagaaccggttaaaggtcagcttgaaccagcgcaccggtcaagccacccgttatttgggtggttactagaactgatttccctttcagtgctgcgcgggcttgggtcaagccacccgttatttgggtggttactagaacagtcaccagcttccagcgtctaacgggcgcggtcaagccacccgttatttcggtggttactagaacattgataaccgagtgaggccgaaatgacctggtcaagccacccgttatttgggtggttactggaacttgtggatgttctcgccgcatgccgggtagggtcaagccactcgttattcgggtggttactagaaccagatgatgacggggtaaatgtcgatgttcattcaagccatccgctattggagtggttcctaagagggaaaaatgtttcgcagcgcagaacaaaagaacttcgcaaacatcgtcgcggcacatatcgagcgccatgacgggccactgctcatagaaggcggcgtcgggttgggcaagactcgcgcatatttgtcggcagtgatgaacgcggctcgcagtgggaagcgcatcgcgctggcgttgccgactcatgcattgatagaccaattactcgcgtcgagcgaccttgccgctactggggaaggcgtgacggttgcggcattcagaccggcgcggatgtatgaaacgcgcagcgagtatcaagaggcgcgcaaatcggcaatggcagcgcaagtcatgctttgcactgcggcggccatcgtcatcgacaaccgcaacagcggggaatacagcggcgcgaccacacgcgactacctgctattcgacgaggccgatcagttgccatcagcagcggcgatgcaggttgacatggaaataccggcgcatacgtttagcgaatttcacatcaaggttgacacagccgagcaggctgcgcgtgatctgttgacgcgcaagctggctgaacctgaacacaaggcggcggcgaaattggtgctggagattcttggcgaccccgcgtggtatcacagtgcaggcgtgaccgaggacggcggagttgcggctcatcaccagatgccggggcttctgctcaaacgcgttgccaatcggggaaattcggccttcgtttctgccacccttacgctgggcggttcgttcgctgatttcaagcgcgcactgggtattggcaatgagtctacgctgtcatcaaccatcgaacccgcaaagcacggcgatctgcgtttcgtagtcaacgacgcacatgaggtagacacgcccgaatggatgacggcggtgctgggcgccattgccggtgctgcgcgtccggttctggtggtcaccccgtctcacgatctggcgcagaccatcggcgaggcagtgcccggtgctgtggtgcgcgcagatgacgaaaccacggctggcgctgcggcgcgtgttggtgacgatggtgtgctggtagccgctggtgcgtgggctgggttagacacaccgacccaatgggcgtcggtagtggtgccgaaggtgccgtatccgatgccgacgattttggatggtagaacggaaagcacctacctgtccgcgcgaggcgtcgccatccgcaggttgaggcaagtattcgggcgcgggttgcggacgccagattcggtctgcacgatctatttgcttgacccacgggcacgcaagctgtcgggcatagtgccttcacggttcgcgcagcaatggcaagagcgcgtgtatcaagaaggcacgcgtggggaggtggtgctgtcaaaggcagaacgcgatcccgcgctccggaaggctgcgctgcaaaagtttggatgcaaatgcgctgcctgcgggttcatgcctaaagtctcgcaacagatcgaaatacatcatctaaatccggtagcggacggggagcgcaagacaacactggcggacgttgtgccgctttgcgcaaattgtcaccggctcgcgcactcgaccacgccgccgatgccgcttgatgcactgcgtagggcagcggctgacaatactcaaatttaaaactaccccctcgtgcattcaatacaaagtgcaaggcgagcggatgggatccattgcaggtaagtgttttccgtgcgcatgctgtagtgcttcacgcgcagacgatcgcgtacctggtcgagcaagcgtggtgacgacatgacctcctccggtggtgcctataccgaacgaacgtagagtcgtctatcccgattgacgcggttgaggaattagaggcttgagcgtaagctgaccgcgctagaccccgcttttggggtcttataaggcccaactgaagggggcgacttcttgttgggcgggcgcgaaggaagatggtttcagatgaacgaagcgcaacgttttctgcggtatgtgacgccgggcctagtgttccttgcggagactctattcctgcttctgatactgctgccgggctggacgctagagcaagtaaaggcggtcaaagaaggtgaggcactcggagttgtcttcgcgaccttgctcgcgtcaggcggcgtcggattcgtcttcagtctcgtgcatcatgtggtccactgggcgcgacctaggccgggactcgaccattccaaattgatatctcgactgcgaaacgccaatgtcatccaactggtggacgcagagagcggccttgaaatcgcggaggacgcgaaagtcagcccggcgaacgcctggataatcgtcacgagcttgtggcatgagcgcctgacaaaatcggatcacattaaggcggcagaaccgaaagcctcggtacttgtggacatgactcatacaactggcacagcgcgtgtagcatgcgcttttgcatggattaccacattcctgatcgcagggcatgcggcgcaggtctcgtttgagcccgagccagtgtttcgcttcatcggcgcaaacgtccttgccggactcctcttcttcgtacatcactggaactgtaagcgcgtccgctatttggcgcagggtgtaatcgaggaggtgcttcatgatgccttagttgcggagaaggagcagccagtgaaaacaagagtggctctgacgaggagctaatgtctggtcagacaactcgagctaggccgcccaacctggcagtggagcggtcggctttgagccgccgcccacttctacgttagggcgcatggaaaccgtcgagcaagcgcgagagactattctcaaggagctgacctccgatgactcggaggttcgcgaagagtacctcaagatctttgacggagacgctaaagcatttgccgagttcatggctcaggccttcgtcaaatggcgcgacttcgataatgatatcaaggacgacgaaaaacgagcacatatttccgcgctggtttatgttgccatcaccttgcatgttctctcaatgaagttattcctttccggccacaccgttgcagccggcaatctatttcgccaagtgattgagagcatcgccttagctctgctgtgctcaggaaaggactttgacgtattgaagcggttcatggagaataaatattcgagcaacgatgccgtccgcgatgtattgcggcaccacgagaaactttctctgaagggcaacgcgctagaggcgctaaaggagtctcaggagttctaccataagtacagccatgtcacgaaaatgacaattgcggcgggcatgtctttctccaaacaaggtgggctctacgtaggcgcgtccttcgatgacgaaaaattggacgcatacaagaaggaaatacatggtcgggtcggattggctaaggtgtttccaaacttcgtcgcagccgtaactggcaacgtcgcaaagtggtgatgcgccctaaccacgtggtggaaagcgcgcgcggcaagagcggccgcgcgcacttcaccacggacgttaggcattgctagatatggcgtcgctgagagctgaactgcaaaaaattactcacgatggtaatttggcaaaccacgctcgccgaatcgccgaattacgagcgcaagtcccacattcgatcgaaatactaactaaacccggcgataatctccggtataactgcataatgcacgcgctcggagtgccagagaacacagaactgataggactcgtgatgcgttgtcctcgctcaattcatcctaatactcgctttctgaagttcttgaaggaccgcggtatattgtccccaatcgcgcaacttgcagccggcc

SEQ ID NO: 139 - DNA, 13713 bp, Artificial Sequence
  Synthetic Oligonucleotide
  misc_feature (1)..(9021): n is a, c, g, or t
nnnnnnnnnnnnnnnnnnnnnnnnnnnnnnnnnnnnnnnnnnnnnnnnnnnnnnnnnnnnnnnnnnnnnnnnnnnnnnnnnnnnnnnnnnnnnnnnnnnnnnnnnnnnnnnnnnnnnnnnnnnnnnnnnnnnnnnnnnnnnnnnnnnnnnnnnnnnnnnnnnnnnnnnnnnnnnnnnnnnnnnnnnnnnnnnnnnnnnnnnnnnnnnnnnnnnnnnnnnnnnnnnnnnnnnnnnnnnnnnnnnnnnnnnnnnnnnnnnnnnnnnnnnnnnnnnnnnnnnnnnnnnnnnnnnnnnnnnnnnnnnnnnnnnnnnnnnnnnnnnnnnnnnnnnnnnnnnnnnnnnnnnnnnnnnnnnnnnnnnnnnnnnnnnnnnnnnnnnnnnnnnnnnnnnnnnnnnnnnnnnnnnnnnnnnnnnnnnnnnnnnnnnnnnnnnnnnnnnnnnnnnnnnnnnnnnnnnnnnnnnnnnnnnnnnnnnnnnnnnnnnnnnnnnnnnnnnnnnnnnnnnnnnnnnnnnnnnnnnnnnnnnnnnnnnnnnnnnnnnnnnnnnnnnnnnnnnnnnnnnnnnnnnnnnnnnnnnnnnnnnnnnnnnnnnnnnnnnnnnnnnnnnnnnnnnnnnnnnnnnnnnnnnnnnnnnnnnnnnnnnnnnnnnnnnnnnnnnnnnnnnnnnnnnnnnnnnnnnnnnnnnnnnnnnnnnnnnnnnnnnnnnnnnnnnnnnnnnnnnnnnnnnnnnnnnnnnnnnnnnnnnnnnnnnnnnnnnnnnnnnnnnnnnnnnnnnnnnnnnnnnnnnnnnnnnnnnnnnnnnnnnnnnnnnnnnnnnnnnnnnnnnnnnnnnnnnnnnnnnnnnnnnnnnnnnnnnnnnnnnnnnnnnnnnnnnnnnnnnnnnnnnnnnnnnnnnnnnnnnnnnnnnnnnnnnnnnnnnnnnnnnnnnnnnnnnnnnnnnnnnnnnnnnnnnnnnnnnnnnnnnnnnnnnnnnnnnnnnnnnnnnnnnnnnnnnnnnnnnnnnnnnnnnnnnnnnnnnnnnnnnnnnnnnnnnnnnnnnnnnnnnnnnnnnnnnnnnnnnnnnnnnnnnnnnnnnnnnnnnnnnnnnnnnnnnnnnnnnnnnnnnnnnnnnnnnnnnnnnnnnnnnnnnnnnnnnnnnnnnnnnnnnnnnnnnnnnnnnnnnnnnnnnnnnnnnnnnnnnnnnnnnnnnnnnnnnnnnnnnnnnnnnnnnnnnnnnnnnnnnnnnnnnnnnnnnnnnnnnnnnnnnnnnnnnnnnnnnnnnnnnnnnnnnnnnnnnnnnnnnnnnnnnnnnnnnnnnnnnnnnnnnnnnnnnnnnnnnnnnnnnnnnnnnnnnnnnnnnnnnnnnnnnnnnnnnnnnnnnnnnnnnnnnnnnnnnnnnnnnnnnnnnnnnnnnnnnnnnnnnnnnnnnnnnnnnnnnnnnnnnnnnnnnnnnnnnnnnnnnnnnnnnnnnnnnnnnnnnnnnnnnnnnnnnnnnnnnnnnnnnnnnnnnnnnnnnnnnnnnnnnnnnnnnnnnnnnnnnnnnnnnnnnnnnnnnnnnnnnnnnnnnnnnnnnnnnnnnnnnnnnnnnnnnnnnnnnnnnnnnnnnnnnnnnnnnnnnnnnnnnnnnnnnnnnnnnnnnnnnnnnnnnnnnnnnnnnnnnnnnnnnnnnnnnnnnnnnnnnnnnnnnnnnnnnnnnnnnnnnnnnnnnnnnnnnnnnnnnnnnnnnnnnnnnnnnnnnnnnnnnnnnnnnnnnnnnnnnnnnnnnnnnnnnnnnnnnnnnnnnnnnnnnnnnnnnnnnnnnnnnnnnnnnnnnnnnnnnnnnnnnnnnnnnnnnnnnnnnnnnnnnnnnnnnnnnnnnnnnnnnnnnnnnnnnnnnnnnnnnnnnnnnnnnnnnnnnnnnnnnnnnnnnnnnnnnnnnnnnnnnnnnnnnnnnnnnnnnnnnnnnnnnnnnnnnnnnnnnnnnnnnnnnnnnnnnnnnnnnnnnnnnnnnnnnnnnnnnnnnnnnnnnnnnnnnnnnnnnnnnnnnnnnnnnnnnnnnnnnnnnnnnnnnnnnnnnnnnnnnnnnnnnnnnnnnnnnnnnnnnnnnnnnnnnnnnnnnnnnnnnnnnnnnnnnnnnnnnnnnnnnnnnnnnnnnnnnnnnnnnnnnnnnnnnnnnnnnnnnnnnnnnnnnnnnnnnnnnnnnnnnnnnnnnnnnnnnnnnnnnnnnnnnnnnnnnnnnnnnnnnnnnnnnnnnnnnnnnnnnnnnnnnnnnnnnnnnnnnnnnnnnnnnnnnnnnnnnnnnnnnnnnnnnnnnnnnnnnnnnnnnnnnnnnnnnnnnnnnnnnnnnnnnnnnnnnnnnnnnnnnnnnnnnnnnnnnnnnnnnnnnnnnnnnnnnnnnnnnnnnnnnnnnnnnnnnnnnnnnnnnnnnnnnnnnnnnnnnnnnnnnnnnnnnnnnnnnnnnnnnnnnnnnnnnnnnnnnnnnnnnnnnnnnnnnnnnnnnnnnnnnnnnnnnnnnnnnnnnnnnnnnnnnnnnnnnnnnnnnnnnnnnnnnnnnnnnnnnnnnnnnnnnnnnnnnnnnnnnnnnnnnnnnnnnnnnnnnnnnnnnnnnnnnnnnnnnnnnnnnnnnnnnnnnnnnnnnnnnnnnnnnnnnnnnnnnnnnnnnnnnnnnnnnnnnnnnnnnnnnnnnnnnnnnnnnnnnnnnnnnnnnnnnnnnnnnnnnnnnnnnnnnnnnnnnnnnnnnnnnnnnnnnnnnnnnnnnnnnnnnnnnnnnnnnnnnnnnnnnnnnnnnnnnnnnnnnnnnnnnnnnnnnnnnnnnnnnnnnnnnnnnnnnnnnnnnnnnnnnnnnnnnnnnnnnnnnnnnnnnnnnnnnnnnnnnnnnnnnnnnnnnnnnnnnnnnnnnnnnnnnnnnnnnnnnnnnnnnnnnnnnnnnnnnnnnnnnnnnnnnnnnnnnnnnnnnnnnnnnnnnnnnnnnnnnnnnnnnnnnnnnnnnnnnnnnnnnnnnnnnnnnnnnnnnnnnnnnnnnnnnnnnnnnnnnnnnnnnnnnnnnnnnnnnnnnnnnnnnnnnnnnnnnnnnnnnnnnnnnnnnnnnnnnnnnnnnnnnnnnnnnnnnnnnnnnnnnnnnnnnnnnnnnnnnnnnnnnnnnnnnnnnnnnnnnnnnnnnnnnnnnnnnnnnnnnnnnnnnnnnnnnnnnnnnnnnnnnnnnnnnnnnnnnnnnnnnnnnnnnnnnnnnnnnnnnnnnnnnnnnnnnnnnnnnnnnnnnnnnnnnnnnnnnnnnnnnnnnnnnnnnnnnnnnnnnnnnnnnnnnnnnnnnnnnnnnnnnnnnnnnnnnnnnnnnnnnnnnnnnnnnnnnnnnnnnnnnnnnnnnnnnnnnnnnnnnnnnnnnnnnnnnnnnnnnnnnnnnnnnnnnnnnnnnnnnnnnnnnnnnnnnnnnnnnnnnnnnnnnnnnnnnnnnnnnnnnnnnnnnnnnnnnnnnnnnnnnnnnnnnnnnnnnnnnnnnnnnnnnnnnnnnnnnnnnnnnnnnnnnnnnnnnnnnnnnnnnnnnnnnnnnnnnnnnnnnnnnnnnnnnnnnnnnnnnnnnnnnnnnnnnnnnnnnnnnnnnnnnnnnnnnnnnnnnnnnnnnnnnnnnnnnnnnnnnnnnnnnnnnnnnnnnnnnnnnnnnnnnnnnnnnnnnnnnnnnnnnnnnnnnnnnnnnnnnnnnnnnnnnnnnnnnnnnnnnnnnnnnnnnnnnnnnnnnnnnnnnnnnnnnnnnnnnnnnnnnnnnnnnnnnnnnnnnnnnnnnnnnnnnnnnnnnnnnnnnnnnnnnnnnnnnnnnnnnnnnnnnnnnnnnnnnnnnnnnnnnnnnnnnnnnnnnnnnnnnnnnnnnnnnnnnnnnnnnnnnnnnnnnnnnnnnnnnnnnnnnnnnnnnnnnnnnnnnnnnnnnnnnnnnnnnnnnnnnnnnnnnnnnnnnnnnnnnnnnnnnnnnnnnnnnnnnnnnnnnnnnnnnnnnnnnnnnnnnnnnnnnnnnnnnnnnnnnnnnnnnnnnnnnnnnnnnnnnnnnnnnnnnnnnnnnnnnnnnnnnnnnnnnnnnnnnnnnnnnnnnnnnnnnnnnnnnnnnnnnnnnnnnnnnnnnnnnnnnnnnnnnnnnnnnnnnnnnnnnnnnnnnnnnnnnnnnnnnnnnnnnnnnnnnnnnnnnnnnnnnnnnnnnnnnnnnnnnnnnnnnnnnnnnnnnnnnnnnnnnnnnnnnnnnnnnnnnnnnnnnnnnnnnnnnnnnnnnnnnnnnnnnnnnnnnnnnnnnnnnnnnnnnnnnnnnnnnnnnnnnnnnnnnnnnnnnnnnnnnnnnnnnnnnnnnnnnnnnnnnnnnnnnnnnnnnnnnnnnnnnnnnnnnnnnnnnnnnnnnnnnnnnnnnnnnnnnnnnnnnnnnnnnnnnnnnnnnnnnnnnnnnnnnnnnnnnnnnnnnnnnnnnnnnnnnnnnnnnnnnnnnnnnnnnnnnnnnnnnnnnnnnnnnnnnnnnnnnnnnnnnnnnnnnnnnnnnnnnnnnnnnnnnnnnnnnnnnnnnnnnnnnnnnnnnnnnnnnnnnnnnnnnnnnnnnnnnnnnnnnnnnnnnnnnnnnnnnnnnnnnnnnnnnnnnnnnnnnnnnnnnnnnnnnnnnnnnnnnnnnnnnnnnnnnnnnnnnnnnnnnnnnnnnnnnnnnnnnnnnnnnnnnnnnnnnnnnnnnnnnnnnnnnnnnnnnnnnnnnnnnnnnnnnnnnnnnnnnnnnnnnnnnnnnnnnnnnnnnnnnnnnnnnnnnnnnnnnnnnnnnnnnnnnnnnnnnnnnnnnnnnnnnnnnnnnnnnnnnnnnnnnnnnnnnnnnnnnnnnnnnnnnnnnnnnnnnnnnnnnnnnnnnnnnnnnnnnnnnnnnnnnnnnnnnnnnnnnnnnnnnnnnnnnnnnnnnnnnnnnnnnnnnnnnnnnnnnnnnnnnnnnnnnnnnnnnnnnnnnnnnnnnnnnnnnnnnnnnnnnnnnnnnnnnnnnnnnnnnnnnnnnnnnnnnnnnnnnnnnnnnnnnnnnnnnnnnnnnnnnnnnnnnnnnnnnnnnnnnnnnnnnnnnnnnnnnnnnnnnnnnnnnnnnnnnnnnnnnnnnnnnnnnnnnnnnnnnnnnnnnnnnnnnnnnnnnnnnnnnnnnnnnnnnnnnnnnnnnnnnnnnnnnnnnnnnnnnnnnnnnnnnnnnnnnnnnnnnnnnnnnnnnnnnnnnnnnnnnnnnnnnnnnnnnnnnnnnnnnnnnnnnnnnnnnnnnnnnnnnnnnnnnnnnnnnnnnnnnnnnnnnnnnnnnnnnnnnnnnnnnnnnnnnnnnnnnnnnnnnnnnnnnnnnnnnnnnnnnnnnnnnnnnnnnnnnnnnnnnnnnnnnnnnnnnnnnnnnnnnnnnnnnnnnnnnnnnnnnnnnnnnnnnnnnnnnnnnnnnnnnnnnnnnnnnnnnnnnnnnnnnnnnnnnnnnnnnnnnnnnnnnnnnnnnnnnnnnnnnnnnnnnnnnnnnnnnnnnnnnnnnnnnnnnnnnnnnnnnnnnnnnnnnnnnnnnnnnnnnnnnnnnnnnnnnnnnnnnnnnnnnnnnnnnnnnnnnnnnnnnnnnnnnnnnnnnnnnnnnnnnnnnnnnnnnnnnnnnnnnnnnnnnnnnnnnnnnnnnnnnnnnnnnnnnnnnnnnnnnnnnnnnnnnnnnnnnnnnnnnnnnnnnnnnnnnnnnnnnnnnnnnnnnnnnnnnnnnnnnnnnnnnnnnnnnnnnnnnnnnnnnnnnnnnnnnnnnnnnnnnnnnnnnnnnnnnnnnnnnnnnnnnnnnnnnnnnnnnnnnnnnnnnnnnnnnnnnnnnnnnnnnnnnnnnnnnnnnnnnnnnnnnnnnnnnnnnnnnnnnnnnnnnnnnnnnnnnnnnnnnnnnnnnnnnnnnnnnnnnnnnnnnnnnnnnnnnnnnnnnnnnnnnnnnnnnnnnnnnnnnnnnnnnnnnnnnnnnnnnnnnnnnnnnnnnnnnnnnnnnnnnnnnnnnnnnnnnnnnnnnnnnnnnnnnnnnnnnnnnnnnnnnnnnnnnnnnnnnnnnnnnnnnnnnnnnnnnnnnnnnnnnnnnnnnnnnnnnnnnnnnnnnnnnnnnnnnnnnnnnnnnnnnnnnnnnnnnnnnnnnnnnnnnnnnnnnnnnnnnnnnnnnnnnnnnnnnnnnnnnnnnnnnnnnnnnnnnnnnnnnnnnnnnnnnnnnnnnnnnnnnnnnnnnnnnnnnnnnnnnnnnnnnnnnnnnnnnnnnnnnnnnnnnnnnnnnnnnnnnnnnnnnnnnnnnnnnnnnnnnnnnnnnnnnnnnnnnnnnnnnnnnnnnnnnnnnnnnnnnnnnnnnnnnnnnnnnnnnnnnnnnnnnnnnnnnnnnnnnnnnnnnnnnnnnnnnnnnnnnnnnnnnnnnnnnnnnnnnnnnnnnnnnnnnnnnnnnnnnnnnnnnnnnnnnnnnnnnnnnnnnnnnnnnnnnnnnnnnnnnnnnnnnnnnnnnnnnnnnnnnnnnnnnnnnnnnnnnnnnnnnnnnnnnnnnnnnnnnnnnnnnnnnnnnnnnnnnnnnnnnnnnnnnnnnnnnnnnnnnnnnnnnnnnnnnnnnnnnnnnnnnnnnnnnnnnnnnnnnnnnnnnnnnnnnnnnnnnnnnnnnnnnnnnnnnnnnnnnnnnnnnnnnnnnnnnnnnnnnnnnnnnnnnnnnnnnnnnnnnnnnnnnnnnnnnnnnnnnnnnnnnnnnnnnnnnnnnnnnnnnnnnnnnnnnnnnnnnnnnnnnnnnnnnnnnnnnnnnnnnnnnnnnnnnnnnnnnnnnnnnnnnnnnnnnnnnnnnnnnnnnnnnnnnnnnnnnnnnnnnnnnnnnnnnnnnnnnnnnnnnnnnnnnnnnnnnnnnnnnnnnnnnnnnnnnnnnnnnnnnnnnnnnnnnnnnnnnnnnnnnnnnnnnnnnnnnnnnnnnnnnnnnnnnnnnnnnnnnnnnnnnnnnnnnnnnnnnnnnnnnnnnnnnnnnnnnnnnnnnnnnnnnnnnnnnnnnnnnnnnnnnnnnnnnnnnnnnnnnnnnnnnnnnnnnnnnnnnnnnnnnnnnnnnnnnnnnnnnnnnnnnnnnnnnnnnnnnnnnnnnnnnnnnnnnnnnnnnnnnnnnnnnnnnnnnnnnnnnnnnnnnnnnnnnnnnnnnnnnnnnnnnnnnnnnnnnnnnnnnnnnnnnnnnnnnnnnnnnnnnnnnnnnnnnnnnnnnnnnnnnnnnnnnnnnnnnnnnnnnnnnnnnnnnnnnnnnnnnnnnnnnnnnnnnnnnnnnnnnnnnnnnnnnnnnnnnnnnnnnnnnnnnnnnnnnnnnnnnnnnnnnnnnnnnnnnnnnnnnnnnnnnnnnnnnnnnnnnnnnnnnnnnnnnnnnnnnnnnnnnnnnnnnnnnnnnnnnnnnnnnnnnnnnnnnnnnnnnnnnnnnnnnnnnnnnnnnnnnnnnnnnnnnnnnnnnnnnnnnnnnnnnnnnnnnnnnnnnnnnnnnnnnnnnnnnnnnnnnnnnnnnnnnnnnnnnnnnnnnnnnnnnnnnnnnnnnnnnnnnnnnnnnnnnnnnnnnnnnnnnnnnnnnnnnnnnnnnnnnnnnnnnnnnnnnnnnnnnnnnnnnnnnnnnnnnnnnnnnnnnnnnnnnnnnnnnnnnnnnnnnnnnnnnnnnnnnnnnnnnnnnnnnnnnnnnnnnnnnnnnnnnnnnnnnnnnnnnnnnnnnnnnnnnnnnnnnnnnnnnnnnnnnnnnnnnnnnnnnnnnnnnnnnnnnnnnnnnnnnnnnnnnnnnnnnnnnnnnnnnnnnnnnnnnnnnnnnnnnnnnnnnnnnnnnnnnnnnnnnnnnnnnnnnnnnnnnnnnnnnnnnnnnnnnnnnnnnnnnnnnnnnnnnnnnnnnnnnnnnnnnnnnnnnnnnnnnnnnnnnnnnnnnnnnnnnnnnnnnnnnnnnnnnnnnnnnnnnnnnnnnnnnnnnnnnnnnnnnnnnnnnnnnnnnnnnnnnnnnnnnnnnnnnnnnnnnnnnnnnnnnnnnnnnnnnnnnnnnnnnnnnnnnnnnnnnnnnnnnnnnnnnnnnnnnnnnnnnnnnnnnnnnnnnnnnnnnnnnnnnnnnnnnnnnnnnnnnnnnnnnnnnnnnnnnnnnnnnnnnnnnnnnnnnnnnnnnnnnnnnnnnnnnnnnnnnnnnnnnnnnnnnnnnnnnnnnnnnnnnnnnnnnnnnnnnnnnnnnnnnnnnnnnnnnnnnnnnnnnnnnnnnnnnnnnnnnnnnnnnnnnnnnnnnnnnnnnnnnnnnnnnnnnnnnnnnnnnnnnnnnnnnnnnnnnnnnnnnnnnnnnnnnnnnnnnnnnnnnnnnnnnnnnnnnnnnnnnnnnnnnnnnnnnnnnnnnnnnnnnnnnnnnnnnnnnnnnnnnnnnnnnnnnnnnnnnnnnnnnnnnnnnnnnnnnnnnnnnnnnnnnnnnnnnnnnnnnnnnnnnnnnnnnnnnnnnnnnnnnnnnnnnnnnnnnnnnnnnnnnnnnnnnnnnnnnnnnnnnnnnnnnnnnnnnnnnnnnnnnnnnnnnnnnnnnnnnnnnnnnnnnnnnnnnnnnnnnnnnnnnnnnnnnnnnnnnnnnnnnnnnnnnnnnnnnnnnnnnnnnnnnnnnnnnnnnnnnnnnnnnnnnnnnnnnnnnnnnnnnnnnnnnnnnnnnnnnnnnnnnnnnnnnnnnnnnnnnnnnnnnnnnnnnnnnnnnnnnnnnnnnnnnnnnnnnnnnnnnnnnnnnnnnnnnnnnnnnnnnnnnnnnnnnnnnnnnnnnnnnnnnnnnnnnnnnnnnnnnnnnnnnnnnnnnnnnnnnnnnnnnnnnnnnnnnnnnnnnnnnnnnnnnnnnnnnnnnnnnnnnnnnnnnnnnnnnnnnnnnnnnnnnnnnnnnnnnnnnnnnnnnnnnnnnnnnnnnnnnnnnnnnnnnnnnnnnnnnnnnnnnnnnnnnnnnnnnnnnnnnnnnnnnnnnnnnnnnnnnnnnnnnnnnnnnnnnnnnnnnnnnnnnnnnnnnnnnnnnnnnnnnnnnnnnnnnnnnnnnnnnnnnnnnnnnnnnnnnnnnnnnnnnnnnnnnnnnnnnnnnnnnnnnnnnnnnnnnnnnnnnnnnnnnnnnnnnccgaactggtgaaacgacatgaaacagtgatgggcagcatgaagaactcttcgcgaacgattctgacccattacgccttagccactggtttagagctagaaggtaagttggttatagagagcccgaaagaacgcgacatcggactgcttgaaacagggttaaatgccttgtcgttattccccattcttggcgcgcactcagcaagagggtgtggcgaaatatcaggtacatttgattttattaaggatggcgcattgtttaaacgaatcacaacaggaggctttgaagctgcaagagttgatgacttttagaaatcaggtttgcttatttttgttaacaaccaaaggtttacagacgatcagatgcagccaccctctcaaggggtggttactacaacacaggcgaacgggatcagacggaactttaggatgcagccaccctctcaaggggtggttactacaaccaagcatggcagtagatcaatatcctagtgatgcagccaccctctcaaggggtggttactacaacaccaaggttgatttaccggattggtgaaggatgcagccaccctctcaaggggtggttactacaacattatcttcaaacaaatcatagtaattgttgatgcagccaccctctcaaggggtggttactacaaccaggcacgtcatcatggctggtcaggactagatgcagccaccctctcaaggggtggttactacaacgtatataccagtcgcagtcgttcatgccggatgcagccaccctctcaaggggtggttactacaactacgtttgcggacactgacgggtcgccgcgatgcagccaccctctcaaggggtggttactacaacatcacgggcgctacaaacggataaccacgggatgcagccaccctctaagggggtggttactacaacatgtaaggcatcggacggcagataacgtcagattcagccaccccacttgattggagggtggttatttttgtttttaaaattgatacttggtatatgactgttaacttccgatcaaccgaacaagctaatttttcaaagcttctacaggctcacctatctaacccagatgcccctcttcttttggaaggtgcgaccggattgggcaagacgagggcctatctttatccgttgttggaagctgctaaaaacggtaagaaaatcgcaatcattcttcccacacgtcaactgattgagcagttgctgaactcagaagacattgacgtatgcaataaagccggcattgagattcaagcgttcatcccgaagcgttactttgaagatgcagatcaatacggcgagcagcgtcaaaaagctttaaatgccccggtgatgctctgcaccagcgcctcagtaatcattgatcaaagactgggcggtgattacaacggcgtcaccaagcgggattacttgttatttgacgaggctgatcagttacctgatgttgcagcgcttcagtctgacgtgacaattaactatcaaacactgggggatctcaacataaagccggtatccgctcagcaagcagcagaagaacttctgaaaaagaaacacgttgagccagaagacagggccaaagctaagattattctagaagcgttagctgagccattttggtttatgtccgccggccttgatgatgaaggcgggattgttctgtatcacaagctacccgggagactccttaaacggatcgctaatcagcgaaatactgcattcgtttctgcaaccctgactattggtaacaagtttgacgacttcacgcgagctatgggaatcagtgaaatcagccgtcattcatcagccgttgagccaaagctgcatggctatttaaccttttcgttgcaccagtcggaggaagttaatagtcccgaatggattcaggcagtgattgatgcaatcgacgaagctcaaaaaccttgccttgttgttacctctagctacgagacagcgactaatcttgttgagctatatccaagctcaattgcgaggaaccaagaagaatcagagacagctagccaagcagctatacgtttagccaatgatgattcaaaagataccctaattgcgacagcggcttgggctggcttggacacgcccgtggtatggaaatctattgttgttccaaagatcccgttctcaaaacctacgattattgatggtcaggttgaaagtcactatatcaatgcaaggaacgcagccatacgacggatgcgccaagttatcgggagaggtttacgaagcccggatgccgaatgcgacatcattatttgtgatcctaggtggcaaaaaatagagtctttcgtccctgatagattcaaacaaaactggtccaacaaaaccttcagcgaaggcgatcggtatgaactgactctttcggcagttgaaagaaatccatctgttaggaggaatgcaattaagcattatggcttgaagtgttatgcctgtgacctcacgcccaaaacatcaaatcaaatagacgttcaccatcttgacccgattgctgaagggcaacgacagacaataatggaagatgtgataccgctttgtgcgaattgtcatcgcttggcacactccgagcgaccgcctctaacaatagaggaaatcaagagcgtactataatttttttgcaaacatctctacagacagaaattagctgctgtgattgaggaactgctgatcgtgctcgagggatggttacgcttgccatgatttaacaaaaggctctaggttatcatttagattttttatttaaccgggtccagagcgttcagggattaatccgaaatgattagcggatggttcaccctgaattatggctccagggcaggattgccttacgcccccagttatcagttttgttgaggaggaatactgctaccgagttagtttaaaacttgatttataagctagtattttagggttagagcttgatgcttcgctgctccggctgccatttcgatacgttcaattgcattcggccaatgcctaaggcgcgcacccatttagccgcagtgtctatagaactccaagtcttcaatctaccctttacggtgtgcgcgggttttgcttcgccgccggcattgaccaagacgtaaaccgttgacccttcggccatgatttctattttcttaatggcaccggcttcaataagtgccctcaagattttttcattcatcactaacggcccaaattgcgataggttaatgaatatggtacaaacgcgttacatttgcaatacagttgtttgagaatggtagccataaaaacagcaactcttaacctgaggatcgaccctctgctcaaagaaatgctgcgatcggctgcagttaaggagcatcgtagcctcgcgaacatggtcgaacagatgattcgagaacactgtaccgcccacggcattcctatccctgagcagcaagaaatgttcgacaaacagtgatggttatgagggggcttcttatgcgcttgtcagtaggggccacttttggggtccgcctcaaggttgagtgggatcgtaagagagcaaattggaacgtgtagtagatggaaggctagttaagtgcctgtatatggaaggctagttaagtgcctgtatatggttgctcggctcatgccgctaagcctgataacttctggcagtctaacgagcctgttagcctcaattggatcctgcatccagttctatctagtaagtcttgtttcagtcaaagtatctattcacttataagatgcttttcgcaccattgctgtttacatggtttgttcatgtcccagcaatttgctgtcattactcctgcttcggtaatttctgttgttgtggtagttgagtccccgtttgtgattaaagaatacctaaatctatctccatacaatccagcattgatagaaagatcggacgaaaaataaaaaacgtttagcgaaggataggacttggtaatttctaaagtttcgtgggggaaccccccgctaaagtaggcaactttggatccattgtctgggattgttatgaaaaaactagttccctctacttgattcattttgccgtcttttaaaattcctgtgtaatcagtccaacatgtaaataccttacgatcctcatcgtgaaaaaatacagctgcattaatttccatagaaatcagagcgtaaagaaaaataccgaatctacccatacaaatgcctgttagcttcaattggatccattatcagcctgtaactcaggtgtaacgtaagcgcgctgcaccgcacatctttcgtaattattggcctgccttctatgcaacgagtcgatcacggcaactgttcaaggcgcactggataggtagcgttttgaagctcttctgagacaacgtaagccacagctgcagtggcataaatcgtagaatcaattgtttcacaatcacctgcgggaaccttcttgccaccgattccagttgtatagtcgacgatcgcagaccgtctccgactcttaaatagcaagtactgatagtcggctagcggataaggtggcggagccagaagaactccatccaactcagaaatatcggcacgatcacgggctatgaatactgatcctgagcaatcggccgactgaaagtagagtttatttgtggtgctcaccccaccaactatttccaccgtttcgcttagcggattatttactaggtaaaattttct

SEQ ID NO: 140 - DNA, 13706 bp, Artificial Sequence
  Synthetic Oligonucleotide
  misc_feature (1)..(9998): n is a, c, g, or t
nnnnnnnnnnnnnnnnnnnnnnnnnnnnnnnnnnnnnnnnnnnnnnnnnnnnnnnnnnnnnnnnnnnnnnnnnnnnnnnnnnnnnnnnnnnnnnnnnnnnnnnnnnnnnnnnnnnnnnnnnnnnnnnnnnnnnnnnnnnnnnnnnnnnnnnnnnnnnnnnnnnnnnnnnnnnnnnnnnnnnnnnnnnnnnnnnnnnnnnnnnnnnnnnnnnnnnnnnnnnnnnnnnnnnnnnnnnnnnnnnnnnnnnnnnnnnnnnnnnnnnnnnnnnnnnnnnnnnnnnnnnnnnnnnnnnnnnnnnnnnnnnnnnnnnnnnnnnnnnnnnnnnnnnnnnnnnnnnnnnnnnnnnnnnnnnnnnnnnnnnnnnnnnnnnnnnnnnnnnnnnnnnnnnnnnnnnnnnnnnnnnnnnnnnnnnnnnnnnnnnnnnnnnnnnnnnnnnnnnnnnnnnnnnnnnnnnnnnnnnnnnnnnnnnnnnnnnnnnnnnnnnnnnnnnnnnnnnnnnnnnnnnnnnnnnnnnnnnnnnnnnnnnnnnnnnnnnnnnnnnnnnnnnnnnnnnnnnnnnnnnnnnnnnnnnnnnnnnnnnnnnnnnnnnnnnnnnnnnnnnnnnnnnnnnnnnnnnnnnnnnnnnnnnnnnnnnnnnnnnnnnnnnnnnnnnnnnnnnnnnnnnnnnnnnnnnnnnnnnnnnnnnnnnnnnnnnnnnnnnnnnnnnnnnnnnnnnnnnnnnnnnnnnnnnnnnnnnnnnnnnnnnnnnnnnnnnnnnnnnnnnnnnnnnnnnnnnnnnnnnnnnnnnnnnnnnnnnnnnnnnnnnnnnnnnnnnnnnnnnnnnnnnnnnnnnnnnnnnnnnnnnnnnnnnnnnnnnnnnnnnnnnnnnnnnnnnnnnnnnnnnnnnnnnnnnnnnnnnnnnnnnnnnnnnnnnnnnnnnnnnnnnnnnnnnnnnnnnnnnnnnnnnnnnnnnnnnnnnnnnnnnnnnnnnnnnnnnnnnnnnnnnnnnnnnnnnnnnnnnnnnnnnnnnnnnnnnnnnnnnnnnnnnnnnnnnnnnnnnnnnnnnnnnnnnnnnnnnnnnnnnnnnnnnnnnnnnnnnnnnnnnnnnnnnnnnnnnnnnnnnnnnnnnnnnnnnnnnnnnnnnnnnnnnnnnnnnnnnnnnnnnnnnnnnnnnnnnnnnnnnnnnnnnnnnnnnnnnnnnnnnnnnnnnnnnnnnnnnnnnnnnnnnnnnnnnnnnnnnnnnnnnnnnnnnnnnnnnnnnnnnnnnnnnnnnnnnnnnnnnnnnnnnnnnnnnnnnnnnnnnnnnnnnnnnnnnnnnnnnnnnnnnnnnnnnnnnnnnnnnnnnnnnnnnnnnnnnnnnnnnnnnnnnnnnnnnnnnnnnnnnnnnnnnnnnnnnnnnnnnnnnnnnnnnnnnnnnnnnnnnnnnnnnnnnnnnnnnnnnnnnnnnnnnnnnnnnnnnnnnnnnnnnnnnnnnnnnnnnnnnnnnnnnnnnnnnnnnnnnnnnnnnnnnnnnnnnnnnnnnnnnnnnnnnnnnnnnnnnnnnnnnnnnnnnnnnnnnnnnnnnnnnnnnnnnnnnnnnnnnnnnnnnnnnnnnnnnnnnnnnnnnnnnnnnnnnnnnnnnnnnnnnnnnnnnnnnnnnnnnnnnnnnnnnnnnnnnnnnnnnnnnnnnnnnnnnnnnnnnnnnnnnnnnnnnnnnnnnnnnnnnnnnnnnnnnnnnnnnnnnnnnnnnnnnnnnnnnnnnnnnnnnnnnnnnnnnnnnnnnnnnnnnnnnnnnnnnnnnnnnnnnnnnnnnnnnnnnnnnnnnnnnnnnnnnnnnnnnnnnnnnnnnnnnnnnnnnnnnnnnnnnnnnnnnnnnnnnnnnnnnnnnnnnnnnnnnnnnnnnnnnnnnnnnnnnnnnnnnnnnnnnnnnnnnnnnnnnnnnnnnnnnnnnnnnnnnnnnnnnnnnnnnnnnnnnnnnnnnnnnnnnnnnnnnnnnnnnnnnnnnnnnnnnnnnnnnnnnnnnnnnnnnnnnnnnnnnnnnnnnnnnnnnnnnnnnnnnnnnnnnnnnnnnnnnnnnnnnnnnnnnnnnnnnnnnnnnnnnnnnnnnnnnnnnnnnnnnnnnnnnnnnnnnnnnnnnnnnnnnnnnnnnnnnnnnnnnnnnnnnnnnnnnnnnnnnnnnnnnnnnnnnnnnnnnnnnnnnnnnnnnnnnnnnnnnnnnnnnnnnnnnnnnnnnnnnnnnnnnnnnnnnnnnnnnnnnnnnnnnnnnnnnnnnnnnnnnnnnnnnnnnnnnnnnnnnnnnnnnnnnnnnnnnnnnnnnnnnnnnnnnnnnnnnnnnnnnnnnnnnnnnnnnnnnnnnnnnnnnnnnnnnnnnnnnnnnnnnnnnnnnnnnnnnnnnnnnnnnnnnnnnnnnnnnnnnnnnnnnnnnnnnnnnnnnnnnnnnnnnnnnnnnnnnnnnnnnnnnnnnnnnnnnnnnnnnnnnnnnnnnnnnnnnnnnnnnnnnnnnnnnnnnnnnnnnnnnnnnnnnnnnnnnnnnnnnnnnnnnnnnnnnnnnnnnnnnnnnnnnnnnnnnnnnnnnnnnnnnnnnnnnnnnnnnnnnnnnnnnnnnnnnnnnnnnnnnnnnnnnnnnnnnnnnnnnnnnnnnnnnnnnnnnnnnnnnnnnnnnnnnnnnnnnnnnnnnnnnnnnnnnnnnnnnnnnnnnnnnnnnnnnnnnnnnnnnnnnnnnnnnnnnnnnnnnnnnnnnnnnnnnnnnnnnnnnnnnnnnnnnnnnnnnnnnnnnnnnnnnnnnnnnnnnnnnnnnnnnnnnnnnnnnnnnnnnnnnnnnnnnnnnnnnnnnnnnnnnnnnnnnnnnnnnnnnnnnnnnnnnnnnnnnnnnnnnnnnnnnnnnnnnnnnnnnnnnnnnnnnnnnnnnnnnnnnnnnnnnnnnnnnnnnnnnnnnnnnnnnnnnnnnnnnnnnnnnnnnnnnnnnnnnnnnnnnnnnnnnnnnnnnnnnnnnnnnnnnnnnnnnnnnnnnnnnnnnnnnnnnnnnnnnnnnnnnnnnnnnnnnnnnnnnnnnnnnnnnnnnnnnnnnnnnnnnnnnnnnnnnnnnnnnnnnnnnnnnnnnnnnnnnnnnnnnnnnnnnnnnnnnnnnnnnnnnnnnnnnnnnnnnnnnnnnnnnnnnnnnnnnnnnnnnnnnnnnnnnnnnnnnnnnnnnnnnnnnnnnnnnnnnnnnnnnnnnnnnnnnnnnnnnnnnnnnnnnnnnnnnnnnnnnnnnnnnnnnnnnnnnnnnnnnnnnnnnnnnnnnnnnnnnnnnnnnnnnnnnnnnnnnnnnnnnnnnnnnnnnnnnnnnnnnnnnnnnnnnnnnnnnnnnnnnnnnnnnnnnnnnnnnnnnnnnnnnnnnnnnnnnnnnnnnnnnnnnnnnnnnnnnnnnnnnnnnnnnnnnnnnnnnnnnnnnnnnnnnnnnnnnnnnnnnnnnnnnnnnnnnnnnnnnnnnnnnnnnnnnnnnnnnnnnnnnnnnnnnnnnnnnnnnnnnnnnnnnnnnnnnnnnnnnnnnnnnnnnnnnnnnnnnnnnnnnnnnnnnnnnnnnnnnnnnnnnnnnnnnnnnnnnnnnnnnnnnnnnnnnnnnnnnnnnnnnnnnnnnnnnnnnnnnnnnnnnnnnnnnnnnnnnnnnnnnnnnnnnnnnnnnnnnnnnnnnnnnnnnnnnnnnnnnnnnnnnnnnnnnnnnnnnnnnnnnnnnnnnnnnnnnnnnnnnnnnnnnnnnnnnnnnnnnnnnnnnnnnnnnnnnnnnnnnnnnnnnnnnnnnnnnnnnnnnnnnnnnnnnnnnnnnnnnnnnnnnnnnnnnnnnnnnnnnnnnnnnnnnnnnnnnnnnnnnnnnnnnnnnnnnnnnnnnnnnnnnnnnnnnnnnnnnnnnnnnnnnnnnnnnnnnnnnnnnnnnnnnnnnnnnnnnnnnnnnnnnnnnnnnnnnnnnnnnnnnnnnnnnnnnnnnnnnnnnnnnnnnnnnnnnnnnnnnnnnnnnnnnnnnnnnnnnnnnnnnnnnnnnnnnnnnnnnnnnnnnnnnnnnnnnnnnnnnnnnnnnnnnnnnnnnnnnnnnnnnnnnnnnnnnnnnnnnnnnnnnnnnnnnnnnnnnnnnnnnnnnnnnnnnnnnnnnnnnnnnnnnnnnnnnnnnnnnnnnnnnnnnnnnnnnnnnnnnnnnnnnnnnnnnnnnnnnnnnnnnnnnnnnnnnnnnnnnnnnnnnnnnnnnnnnnnnnnnnnnnnnnnnnnnnnnnnnnnnnnnnnnnnnnnnnnnnnnnnnnnnnnnnnnnnnnnnnnnnnnnnnnnnnnnnnnnnnnnnnnnnnnnnnnnnnnnnnnnnnnnnnnnnnnnnnnnnnnnnnnnnnnnnnnnnnnnnnnnnnnnnnnnnnnnnnnnnnnnnnnnnnnnnnnnnnnnnnnnnnnnnnnnnnnnnnnnnnnnnnnnnnnnnnnnnnnnnnnnnnnnnnnnnnnnnnnnnnnnnnnnnnnnnnnnnnnnnnnnnnnnnnnnnnnnnnnnnnnnnnnnnnnnnnnnnnnnnnnnnnnnnnnnnnnnnnnnnnnnnnnnnnnnnnnnnnnnnnnnnnnnnnnnnnnnnnnnnnnnnnnnnnnnnnnnnnnnnnnnnnnnnnnnnnnnnnnnnnnnnnnnnnnnnnnnnnnnnnnnnnnnnnnnnnnnnnnnnnnnnnnnnnnnnnnnnnnnnnnnnnnnnnnnnnnnnnnnnnnnnnnnnnnnnnnnnnnnnnnnnnnnnnnnnnnnnnnnnnnnnnnnnnnnnnnnnnnnnnnnnnnnnnnnnnnnnnnnnnnnnnnnnnnnnnnnnnnnnnnnnnnnnnnnnnnnnnnnnnnnnnnnnnnnnnnnnnnnnnnnnnnnnnnnnnnnnnnnnnnnnnnnnnnnnnnnnnnnnnnnnnnnnnnnnnnnnnnnnnnnnnnnnnnnnnnnnnnnnnnnnnnnnnnnnnnnnnnnnnnnnnnnnnnnnnnnnnnnnnnnnnnnnnnnnnnnnnnnnnnnnnnnnnnnnnnnnnnnnnnnnnnnnnnnnnnnnnnnnnnnnnnnnnnnnnnnnnnnnnnnnnnnnnnnnnnnnnnnnnnnnnnnnnnnnnnnnnnnnnnnnnnnnnnnnnnnnnnnnnnnnnnnnnnnnnnnnnnnnnnnnnnnnnnnnnnnnnnnnnnnnnnnnnnnnnnnnnnnnnnnnnnnnnnnnnnnnnnnnnnnnnnnnnnnnnnnnnnnnnnnnnnnnnnnnnnnnnnnnnnnnnnnnnnnnnnnnnnnnnnnnnnnnnnnnnnnnnnnnnnnnnnnnnnnnnnnnnnnnnnnnnnnnnnnnnnnnnnnnnnnnnnnnnnnnnnnnnnnnnnnnnnnnnnnnnnnnnnnnnnnnnnnnnnnnnnnnnnnnnnnnnnnnnnnnnnnnnnnnnnnnnnnnnnnnnnnnnnnnnnnnnnnnnnnnnnnnnnnnnnnnnnnnnnnnnnnnnnnnnnnnnnnnnnnnnnnnnnnnnnnnnnnnnnnnnnnnnnnnnnnnnnnnnnnnnnnnnnnnnnnnnnnnnnnnnnnnnnnnnnnnnnnnnnnnnnnnnnnnnnnnnnnnnnnnnnnnnnnnnnnnnnnnnnnnnnnnnnnnnnnnnnnnnnnnnnnnnnnnnnnnnnnnnnnnnnnnnnnnnnnnnnnnnnnnnnnnnnnnnnnnnnnnnnnnnnnnnnnnnnnnnnnnnnnnnnnnnnnnnnnnnnnnnnnnnnnnnnnnnnnnnnnnnnnnnnnnnnnnnnnnnnnnnnnnnnnnnnnnnnnnnnnnnnnnnnnnnnnnnnnnnnnnnnnnnnnnnnnnnnnnnnnnnnnnnnnnnnnnnnnnnnnnnnnnnnnnnnnnnnnnnnnnnnnnnnnnnnnnnnnnnnnnnnnnnnnnnnnnnnnnnnnnnnnnnnnnnnnnnnnnnnnnnnnnnnnnnnnnnnnnnnnnnnnnnnnnnnnnnnnnnnnnnnnnnnnnnnnnnnnnnnnnnnnnnnnnnnnnnnnnnnnnnnnnnnnnnnnnnnnnnnnnnnnnnnnnnnnnnnnnnnnnnnnnnnnnnnnnnnnnnnnnnnnnnnnnnnnnnnnnnnnnnnnnnnnnnnnnnnnnnnnnnnnnnnnnnnnnnnnnnnnnnnnnnnnnnnnnnnnnnnnnnnnnnnnnnnnnnnnnnnnnnnnnnnnnnnnnnnnnnnnnnnnnnnnnnnnnnnnnnnnnnnnnnnnnnnnnnnnnnnnnnnnnnnnnnnnnnnnnnnnnnnnnnnnnnnnnnnnnnnnnnnnnnnnnnnnnnnnnnnnnnnnnnnnnnnnnnnnnnnnnnnnnnnnnnnnnnnnnnnnnnnnnnnnnnnnnnnnnnnnnnnnnnnnnnnnnnnnnnnnnnnnnnnnnnnnnnnnnnnnnnnnnnnnnnnnnnnnnnnnnnnnnnnnnnnnnnnnnnnnnnnnnnnnnnnnnnnnnnnnnnnnnnnnnnnnnnnnnnnnnnnnnnnnnnnnnnnnnnnnnnnnnnnnnnnnnnnnnnnnnnnnnnnnnnnnnnnnnnnnnnnnnnnnnnnnnnnnnnnnnnnnnnnnnnnnnnnnnnnnnnnnnnnnnnnnnnnnnnnnnnnnnnnnnnnnnnnnnnnnnnnnnnnnnnnnnnnnnnnnnnnnnnnnnnnnnnnnnnnnnnnnnnnnnnnnnnnnnnnnnnnnnnnnnnnnnnnnnnnnnnnnnnnnnnnnnnnnnnnnnnnnnnnnnnnnnnnnnnnnnnnnnnnnnnnnnnnnnnnnnnnnnnnnnnnnnnnnnnnnnnnnnnnnnnnnnnnnnnnnnnnnnnnnnnnnnnnnnnnnnnnnnnnnnnnnnnnnnnnnnnnnnnnnnnnnnnnnnnnnnnnnnnnnnnnnnnnnnnnnnnnnnnnnnnnnnnnnnnnnnnnnnnnnnnnnnnnnnnnnnnnnnnnnnnnnnnnnnnnnnnnnnnnnnnnnnnnnnnnnnnnnnnnnnnnnnnnnnnnnnnnnnnnnnnnnnnnnnnnnnnnnnnnnnnnnnnnnnnnnnnnnnnnnnnnnnnnnnnnnnnnnnnnnnnnnnnnnnnnnnnnnnnnnnnnnnnnnnnnnnnnnnnnnnnnnnnnnnnnnnnnnnnnnnnnnnnnnnnnnnnnnnnnnnnnnnnnnnnnnnnnnnnnnnnnnnnnnnnnnnnnnnnnnnnnnnnnnnnnnnnnnnnnnnnnnnnnnnnnnnnnnnnnnnnnnnnnnnnnnnnnnnnnnnnnnnnnnnnnnnnnnnnnnnnnnnnnnnnnnnnnnnnnnnnnnnnnnnnnnnnnnnnnnnnnnnnnnnnnnnnnnnnnnnnnnnnnnnnnnnnnnnnnnnnnnnnnnnnnnnnnnnnnnnnnnnnnnnnnnnnnnnnnnnnnnnnnnnnnnnnnnnnnnnnnnnnnnnnnnnnnnnnnnnnnnnnnnnnnnnnnnnnnnnnnnnnnnnnnnnnnnnnnnnnnnnnnnnnnnnnnnnnnnnnnnnnnnnnnnnnnnnnnnnnnnnnnnnnnnnnnnnnnnnnnnnnnnnnnnnnnnnnnnnnnnnnnnnnnnnnnnnnnnnnnnnnnnnnnnnnnnnnnnnnnnnnnnnnnnnnnnnnnnnnnnnnnnnnnnnnnnnnnnnnnnnnnnnnnnnnnnnnnnnnnnnnnnnnnnnnnnnnnnnnnnnnnnnnnnnnnnnnnnnnnnnnnnnnnnnnnnnnnnnnnnnnnnnnnnnnnnnnnnnnnnnnnnnnnnnnnnnnnnnnnnnnnnnnnnnnnnnnnnnnnnnnnnnnnnnnnnnnnnnnnnnnnnnnnnnnnnnnnnnnnnnnnnnnnnnnnnnnnnnnnnnnnnnnnnnnnnnnnnnnnnnnnnnnnnnnnnnnnnnnnnnnnnnnnnnnnnnnnnnnnnnnnnnnnnnnnnnnnnnnnnnnnnnnnnnnnnnnnnnnnnnnnnnnnnnnnnnnnnnnnnnnnnnnnnnnnnnnnnnnnnnnnnnnnnnnnnnnnnnnnnnnnnnnnnnnnnnnnnnnnnnnnnnnnnnnnnnnnnnnnnnnnnnnnnnnnnnnnnnnnnnnnnnnnnnnnnnnnnnnnnnnnnnnnnnnnnnnnnnnnnnnnnnnnnnnnnnnnnnnnnnnnnnnnnnnnnnnnnnnnnnnnnnnnnnnnnnnnnnnnnnnnnnnnnnnnnnnnnnnnnnnnnnnnnnnnnnnnnnnnnnnnnnnnnnnnnnnnnnnnnnnnnnnnnnnnnnnnnnnnnnnnnnnnnnnnnnnnnnnnnnnnnnnnnnnnnnnnnnnnnnnnnnnnnnnnnnnnnnnnnnnnnnnnnnnnnnnnnnnnnnnnnnnnnnnnnnnnnnnnnnnnnnnnnnnnnnnnnnnnnnnnnnnnnnnnnnnnnnnnnnnnnnnnnnnnnnnnnnnnnnnnnnnnnnnnnnnnnnnnnnnnnnnnnnnnnnnnnnnnnnnnnnnnnnnnnnnnnnnnnnnnnnnnnnnnnnnnnnnnnnnnnnnnnnnnnnnnnnnnnnnnnnnnnnnnnnnnnnnnnnnnnnnnnnnnnnnnnnnnnnnnnnnnnnnnnnnnnnnnnnnnnnnnnnnnnnnnnnnnnnnnnnnnnnnnnnnnnnnnnnnnnnnnnnnnnnnnnnnnnnnnnnnnnnnnnnnnnnnnnnnnnnnnnnnnnnnnnnnnnnnnnnnnnnnnnnnnnnnnnnnnnnnnnnnnnnnnnnnnnnnnnnnnnnnnnnnnnnnnnnnnnnnnnnnnnnnnnnnnnnnnnnnnnnnnnnnnnnnnnnnnnnnnnnnnnnnnnnnnnnnnnnnnnnnnnnnnnnnnnnnnnnnnnnnnnnnnnnnnnnnnnnnnnnnnnnnnnnnnnnnnnnnnnnnnnnnnnnnnnnnnnnnnnnnnnnnnnnnnnnnnnnnnnnnnnnnnnnnnnnnnnnnnnnnnnnnnnnnnnnnnnnnnnnnnnnnnnnnnnnnnnnnnnnnnnnnnnnnnnnnnnnnnnnnnnnnnnnnnnnnnnnnnnnnnnnnnnnnnnnnnnnnnnnnnnnnnnnnnnnnnnnnnnnnnnnnnnnnnnnnnnnnnnnnnnnnnnnnnnnnnnnnnnnnnnnnnnnnnnnnnnnnnnnnnnnnnnnnnnnnnnnnnnnnnnnnnnnnnnnnnnnnnnnnnnnnnnnnnnnnnnnnnnnnnnnnnnnnnnnnnnnnnnnnnnnnnnnnnnnnnnnnnnnnnnnnnnnnnnnnnnnnnnnnnnnnnnnnnnnnnnnnnnnnnnnnnnnnnnnnnnnnnnnnnnnnnnnnnnnnnnnnnnnnnnnnnnnnnnnnnnnnnnnnnnnnnnnnnnnnnnnnnnnnnnnnnnnnnnnnnnnnnnnnnnnnnnnnnnnnnnnnnnnnnnnnnnnnnnnnnnnnnnnnnnnnnnnnnnnnnnnnnnnnnnnnnnnnnnnnnnnnnnnnnnnnnnnnnnnnnnnnnnnnnnnnnnnnnnnnnnnnnnnnnnnnnnnnnnnnnnnnnnnnnnnnnnnnnnnnnnnnnnnnnnnnnnnnnnnnnnnnnnnnnnnnnnnnnnnnnnnnnnnnnnnnnnnnnnnnnnnnnnnnnnnnnnnnnnnnnnnnnnnnnnnnnnnnnnnnnnnnnnnnnnnnnnnnnnnnnnnnnnnnnnnnnnnnnnnnnnnnnnnnnnnnnnnnnnnnnnnnnnnnnnnnnnnnnnnnnnnnnnnnnnnnnnnnnnnnnnnnnnnnnnnnnnnnnnnnnnnnnnnnnnnnnnnnnnnnnnnnnnnnnnnnnnnnnnnnnnnnnnnnnnnnnnnnnnnnnnnnnnnnnnnnnnnnnnnnnnnnnnnnnnnnnnnnnnnnnnnnnnnnnnnnnnnnnnnnnnnnnnnnnnnnnnnnnnnnnnnnnnnnnnnnnnnnnnnnnnnnnnnnnnnnnnnnnnnnnnnnnnnnnnnnnnnnnnnnnnnnnnnnnnnnnnnnnnnnnnnnnnnnnnnnnnnnnnnnnnnnnnnnnnnnnnnnnnnnnnnnnnnnnnnnnnnnnnnnnnnnnnnnnnnnnnnnnnnnnnnnnnnnnnnnnnnnnnnnnnnnnnnnnnnnnnnnnnnnnnnnnnnnnnnnnnnnnnnnnnnnnnnnnnnnnnnnnnnnnnnnnnnnnnnnnnnnnnnnnnnnnnnnnnnnnnnnnagaggaacctgcttggtatcacagcgcaggaatgactgacgatggagggattgcgctctatcacaaaatgccaggacgattgctcaagagagtttccaattcaccaaatgtcgcgtttgtgagtgcgacgctctcaattggtgggaagtttgatgactttcggcgagcaatgggaatcactgcgcaaagttccttgtccgcgatcattgagccaagccatcacggaaccctgaagttctttcacgcagcgcatcaggtttcttctgaggagtggttatccgccacacaagaagcaatcaacaaagcgcagaagccttgcttggtggtcactccaagtagtgagttatctcagatgttgggtcggttgttcccacaggcgattgttcgcacggctgaagagaagactgctgacgcgatcctccgactcacagatgaaagaaatattctcatcgcctcagctgcttgggcgggattggacacgccgattgagtggaagagcattgtgattccgcgcattccgtttctgcgcccacaggtgattgacggaaatgtggagagcagcttctttgactcacgcaacagcgctattcgccgaatgcgccaagtgatcggtcgtggactacgcaagcctgatgctgagtgtgaggtctacattcttgacgaacgcttggcgatgattgagtcattcatcccgtcaagatttcagcaagcgtggaccgcgcgtggaagggtggaaggagcaagaactgaacatacgctgtcaaaagcagagcgggatccacaggtccgcaagtcagcgctgaagcactttggtcggcgatgtatgtcttgcgacttcgttccgcgagtggacagtcagcttgaggttcatcatcttcatcccctagcgaatggcggtgaacgaatcacacggatccaaacggatgtcgcggtgctgtgtgcgaactgtcatcgcttggctcattcggcgacaccacctctcacggttgaggttcttaggggacttcaccaatcagtggggtcggagcaatgagccgaagccacgcgaacgagagttccaaaagggttccaaaaccctccgtataccctcgcttacctagccgctcacgccgctaatagccctcgagatttgagcgtatgaaacgctgttccaacgccacaccgaagcgtctgactgatcctcttcggcgacattcccttcttgtagagctcaacgatggcggctctggtcgagtcagtcacgctacttggacgcccaagtttctttccttccttccgagctcgctcaacaccaatccgaatccgctcacgaatcagatcccgctcaaactcagcgaacgatgaaaacacaccgaacatcagctttcctgatggggtggtggtgtcgatcgcctgttggtggaagtagagctgaacgccttgagcgtgaaggtcgttcacggtggtcacaaggtgctgaagggaacgcccaagacggtcaatgctccacacggcgatcagatcgaattcgcggcgagcggcggctttcaagagaccatcgagagcagggcgctgatcgcgtcccttggcgcctgagataccatcgtcacgataggtcgcgacgatgttccacccacgaagggctgcgatccgttcgagttcgtggagttgattgtcggcggtttggtgagcggtggagacgcgaagatagagagcggtacgcatttaggagcctccaagtcgttgaattagtaacctagcctctaagaaaactctagcgtatgattcttgtcttagaaatcgctgaaacccgaataaattcaggctcttatatcgttctctaaaggggttccgaatcgagctagtctcgatagtcccaaggatgcggcgagtgtgaaaattaccacccgtaaaaccgcagcggagcaaacgcttcatatctacacacgggtcagcaccgcagctcaacgggatgacggaacatccttacagacgcaactagagcaaggtaccgctcgcgccaagcaacttgggctgaagactcgacattgggatgaaggcgggaaaagttctcaccacgaagatctagccgctcgacctacactcgctgctctctaccaagccatcaaggatggtggggtcaagcacctgttcgtttacgatcaatcgcggttgtcacgaaacgacaatgtcgcctcaatttttcgatatgaatgtaacaagcagggtgtcacgctttacacgaaagacggacgctttgatctctccaatcctcaggacaagtttctaaaacagattcttgatgggctttcggaatttgataacgcgattcgcgcggaacgcacacgactaggaaaactaaatcgcgcacgatcaggcgggtggcacggcggtccacctcctttcggctacaagctcgtagaccgtcggctcacaatcgagccaaaagaatcaaaatgggtgaagcgaatattctcagaagcgttcaatggacaaagcccacagaagatcaaacagctacttgactcaaactcagtcagtccgagaaggggtgggctttggacgattggttctgtggctgcgttactgaaaaactctcactacatcgggaactacacattcaaggatcgtaagtctgatgaactagtgaccgttacttgccccgcgatagttgaccccgacctgtggaaagctgttcacctcaaacgcaaacgacaaaacagtcgagcggctcagaaaaacccaactaagcacttttatcttttgcgcgatctgatgtattgcggtcactgtgggcgaccgatttcaggtagacaaaaaccgagtaagcgagagcaactttactactgtcctaacaaagagcgcgaatgggcaaagcagggcggaagcaaaaccaaatggaagcgaggtctgggttgtggaatgagtcgcgctctcaatattgctcagactgacgagctcgtctttagtgcggtcttgaacattcacgacaagtctcacttactcaaggagcaggtgaagcgaagtgtcttatcagaggatggcgcatctaccatcaagtccgctacggagattgaggcgctcaactcaaagatgcgtcggcttgaaaagcggttagaacaagctcgtggtcttctcggtatcgctgagggtcatcgtgatctaggtaagatgagcaaatcgcaattcgaatctcgacggaaggtcattgagtctgagattgagttggttgaaaccgagctgaacaacttgaaactttcaatcaagggtcagcaaacccacaaaaagtgggatgcttggataaagcagtttggcgaaatgattgcgtccaaaatgaccttgagtcaggaagcaaagaggcagtacatcgcgggtctgttagaccgcattgaggttcgttacctaaaggcgaatgacgctcacgaactcaggcttcagttccgtctccccatcgtgaacgaccaattccaccgtaagggcattcgtcggaaaggggattggtatgatttgggtgaagggacgagggatttgctcctgagagtggacaaaaacccgagtaaaaaacagggaaaagcacttgcccccgagcaaaaccagaccgctactgtcgaatgacggttagatgggcaccgcctcgaggtcgtattcatctgaacttgtgatctttacgcgagcgaactcaccaacggtgagtttttcgccctgcttaatgcgtacaacgccatcaat

SEQ ID NO: 141 - DNA, 13706 bp, Artificial Sequence; identical to SEQ ID NO: 140
  Synthetic Oligonucleotide
  misc_feature (1)..(9998): n is a, c, g, or t

SEQ ID NO: 142 - DNA, 13686 bp, Artificial Sequence
  Synthetic Oligonucleotide
  misc_feature (1)..(9591): n is a, c, g, or t
nnnnnnnnnnnnnnnnnnnnnnnnnnnnnnnnnnnnnnnnnnnnnnnnnnnnnnnnnnnnnnnnnnnnnnnnnnnnnnnnnnnnnnnnnnnnnnnnnnnnnnnnnnnnnnnnnnnnnnnnnnnnnnnnnnnnnnnnnnnnnnnnnnnnnnnnnnnnnnnnnnnnnnnnnnnnnnnnnnnnnnnnnnnnnnnnnnnnnnnnnnnnnnnnnnnnnnnnnnnnnnnnnnnnnnnnnnnnnnnnnnnnnnnnnnnnnnnnnnnnnnnnnnnnnnnnnnnnnnnnnnnnnnnnnnnnnnnnnnnnnnnnnnnnnnnnnnnnnnnnnnnnnnnnnnnnnnnnnnnnnnnnnnnnnnnnnnnnnnnnnnnnnnnnnnnnnnnnnnnnnnnnnnnnnnnnnnnnnnnnnnnnnnnnnnnnnnnnnnnnnnnnnnnnnnnnnnnnnnnnnnnnnnnnnnnnnnnnnnnnnnnnnnnnnnnnnnnnnnnnnnnnnnnnnnnnnnnnnnnnnnnnnnnnnnnnnnnnnnnnnnnnnnnnnnnnnnnnnnnnnnnnnnnnnnnnnnnnnnnnnnnnnnnnnnnnnnnnnnnnnnnnnnnnnnnnnnnnnnnnnnnnnnnnnnnnnnnnnnnnnnnnnnnnnnnnnnnnnnnnnnnnnnnnnnnnnnnnnnnnnnnnnnnnnnnnnnnnnnnnnnnnnnnnnnnnnnnnnnnnnnnnnnnnnnnnnnnnnnnnnnnnnnnnnnnnnnnnnnnnnnnnnnnnnnnnnnnnnnnnnnnnnnnnnnnnnnnnnnnnnnnnnnnnnnnnnnnnnnnnnnnnnnnnnnnnnnnnnnnnnnnnnnnnnnnnnnnnnnnnnnnnnnnnnnnnnnnnnnnnnnnnnnnnnnnnnnnnnnnnnnnnnnnnnnnnnnnnnnnnnnnnnnnnnnnnnnnnnnnnnnnnnnnnnnnnnnnnnnnnnnnnnnnnnnnnnnnnnnnnnnnnnnnnnnnnnnnnnnnnnnnnnnnnnnnnnnnnnnnnnnnnnnnnnnnnnnnnnnnnnnnnnnnnnnnnnnnnnnnnnnnnnnnnnnnnnnnnnnnnnnnnnnnnnnnnnnnnnnnnnnnnnnnnnnnnnnnnnnnnnnnnnnnnnnnnnnnnnnnnnnnnnnnnnnnnnnnnnnnnnnnnnnnnnnnnnnnnnnnnnnnnnnnnnnnnnnnnnnnnnnnnnnnnnnnnnnnnnnnnnnnnnnnnnnnnnnnnnnnnnnnnnnnnnnnnnnnnnnnnnnnnnnnnnnnnnnnnnnnnnnnnnnnnnnnnnnnnnnnnnnnnnnnnnnnnnnnnnnnnnnnnnnnnnnnnnnnnnnnnnnnnnnnnnnnnnnnnnnnnnnnnnnnnnnnnnnnnnnnnnnnnnnnnnnnnnnnnnnnnnnnnnnnnnnnnnnnnnnnnnnnnnnnnnnnnnnnnnnnnnnnnnnnnnnnnnnnnnnnnnnnnnnnnnnnnnnnnnnnnnnnnnnnnnnnnnnnnnnnnnnnnnnnnnnnnnnnnnnnnnnnnnnnnnnnnnnnnnnnnnnnnnnnnnnnnnnnnnnnnnnnnnnnnnnnnnnnnnnnnnnnnnnnnnnnnnnnnnnnnnnnnnnnnnnnnnnnnnnnnnnnnnnnnnnnnnnnnnnnnnnnnnnnnnnnnnnnnnnnnnnnnnnnnnnnnnnnnnnnnnnnnnnnnnnnnnnnnnnnnnnnnnnnnnnnnnnnnnnnnnnnnnnnnnnnnnnnnnnnnnnnnnnnnnnnnnnnnnnnnnnnnnnnnnnnnnnnnnnnnnnnnnnnnnnnnnnnnnnnnnnnnnnnnnnnnnnnnnnnnnnnnnnnnnnnnnnnnnnnnnnnnnnnnnnnnnnnnnnnnnnnnnnnnnnnnnnnnnnnnnnnnnnnnnnnnnnnnnnnnnnnnnnnnnnnnnnnnnnnnnnnnnnnnnnnnnnnnnnnnnnnnnnnnnnnnnnnnnnnnnnnnnnnnnnnnnnnnnnnnnnnnnnnnnnnnnnnnnnnnnnnnnnnnnnnnnnnnnnnnnnnnnnnnnnnnnnnnnnnnnnnnnnnnnnnnnnnnnnnnnnnnnnnnnnnnnnnnnnnnnnnnnnnnnnnnnnnnnnnnnnnnnnnnnnnnnnnnnnnnnnnnnnnnnnnnnnnnnnnnnnnnnnnnnnnnnnnnnnnnnnnnnnnnnnnnnnnnnnnnnnnnnnnnnnnnnnnnnnnnnnnnnnnnnnnnnnnnnnnnnnnnnnnnnnnnnnnnnnnnnnnnnnnnnnnnnnnnnnnnnnnnnnnnnnnnnnnnnnnnnnnnnnnnnnnnnnnnnnnnnnnnnnnnnnnnnnnnnnnnnnnnnnnnnnnnnnnnnnnnnnnnnnnnnnnnnnnnnnnnnnnnnnnnnnnnnnnnnnnnnnnnnnnnnnnnnnnnnnnnnnnnnnnnnnnnnnnnnnnnnnnnnnnnnnnnnnnnnnnnnnnnnnnnnnnnnnnnnnnnnnnnnnnnnnnnnnnnnnnnnnnnnnnnnnnnnnnnnnnnnnnnnnnnnnnnnnnnnnnnnnnnnnnnnnnnnnnnnnnnnnnnnnnnnnnnnnnnnnnnnnnnnnnnnnnnnnnnnnnnnnnnnnnnnnnnnnnnnnnnnnnnnnnnnnnnnnnnnnnnnnnnnnnnnnnnnnnnnnnnnnnnnnnnnnnnnnnnnnnnnnnnnnnnnnnnnnnnnnnnnnnnnnnnnnnnnnnnnnnnnnnnnnnnnnnnnnnnnnnnnnnnnnnnnnnnnnnnnnnnnnnnnnnnnnnnnnnnnnnnnnnnnnnnnnnnnnnnnnnnnnnnnnnnnnnnnnnnnnnnnnnnnnnnnnnnnnnnnnnnnnnnnnnnnnnnnnnnnnnnnnnnnnnnnnnnnnnnnnnnnnnnnnnnnnnnnnnnnnnnnnnnnnnnnnnnnnnnnnnnnnnnnnnnnnnnnnnnnnnnnnnnnnnnnnnnnnnnnnnnnnnnnnnnnnnnnnnnnnnnnnnnnnnnnnnnnnnnnnnnnnnnnnnnnnnnnnnnnnnnnnnnnnnnnnnnnnnnnnnnnnnnnnnnnnnnnnnnnnnnnnnnnnnnnnnnnnnnnnnnnnnnnnnnnnnnnnnnnnnnnnnnnnnnnnnnnnnnnnnnnnnnnnnnnnnnnnnnnnnnnnnnnnnnnnnnnnnnnnnnnnnnnnnnnnnnnnnnnnnnnnnnnnnnnnnnnnnnnnnnnnnnnnnnnnnnnnnnnnnnnnnnnnnnnnnnnnnnnnnnnnnnnnnnnnnnnnnnnnnnnnnnnnnnnnnnnnnnnnnnnnnnnnnnnnnnnnnnnnnnnnnnnnnnnnnnnnnnnnnnnnnnnnnnnnnnnnnnnnnnnnnnnnnnnnnnnnnnnnnnnnnnnnnnnnnnnnnnnnnnnnnnnnnnnnnnnnnnnnnnnnnnnnnnnnnnnnnnnnnnnnnnnnnnnnnnnnnnnnnnnnnnnnnnnnnnnnnnnnnnnnnnnnnnnnnnnnnnnnnnnnnnnnnnnnnnnnnnnnnnnnnnnnnnnnnnnnnnnnnnnnnnnnnnnnnnnnnnnnnnnnnnnnnnnnnnnnnnnnnnnnnnnnnnnnnnnnnnnnnnnnnnnnnnnnnnnnnnnnnnnnnnnnnnnnnnnnnnnnnnnnnnnnnnnnnnnnnnnnnnnnnnnnnnnnnnnnnnnnnnnnnnnnnnnnnnnnnnnnnnnnnnnnnnnnnnnnnnnnnnnnnnnnnnnnnnnnnnnnnnnnnnnnnnnnnnnnnnnnnnnnnnnnnnnnnnnnnnnnnnnnnnnnnnnnnnnnnnnnnnnnnnnnnnnnnnnnnnnnnnnnnnnnnnnnnnnnnnnnnnnnnnnnnnnnnnnnnnnnnnnnnnnnnnnnnnnnnnnnnnnnnnnnnnnnnnnnnnnnnnnnnnnnnnnnnnnnnnnnnnnnnnnnnnnnnnnnnnnnnnnnnnnnnnnnnnnnnnnnnnnnnnnnnnnnnnnnnnnnnnnnnnnnnnnnnnnnnnnnnnnnnnnnnnnnnnnnnnnnnnnnnnnnnnnnnnnnnnnnnnnnnnnnnnnnnnnnnnnnnnnnnnnnnnnnnnnnnnnnnnnnnnnnnnnnnnnnnnnnnnnnnnnnnnnnnnnnnnnnnnnnnnnnnnnnnnnnnnnnnnnnnnnnnnnnnnnnnnnnnnnnnnnnnnnnnnnnnnnnnnnnnnnnnnnnnnnnnnnnnnnnnnnnnnnnnnnnnnnnnnnnnnnnnnnnnnnnnnnnnnnnnnnnnnnnnnnnnnnnnnnnnnnnnnnnnnnnnnnnnnnnnnnnnnnnnnnnnnnnnnnnnnnnnnnnnnnnnnnnnnnnnnnnnnnnnnnnnnnnnnnnnnnnnnnnnnnnnnnnnnnnnnnnnnnnnnnnnnnnnnnnnnnnnnnnnnnnnnnnnnnnnnnnnnnnnnnnnnnnnnnnnnnnnnnnnnnnnnnnnnnnnnnnnnnnnnnnnnnnnnnnnnnnnnnnnnnnnnnnnnnnnnnnnnnnnnnnnnnnnnnnnnnnnnnnnnnnnnnnnnnnnnnnnnnnnnnnnnnnnnnnnnnnnnnnnnnnnnnnnnnnnnnnnnnnnnnnnnnnnnnnnnnnnnnnnnnnnnnnnnnnnnnnnnnnnnnnnnnnnnnnnnnnnnnnnnnnnnnnnnnnnnnnnnnnnnnnnnnnnnnnnnnnnnnnnnnnnnnnnnnnnnnnnnnnnnnnnnnnnnnnnnnnnnnnnnnnnnnnnnnnnnnnnnnnnnnnnnnnnnnnnnnnnnnnnnnnnnnnnnnnnnnnnnnnnnnnnnnnnnnnnnnnnnnnnnnnnnnnnnnnnnnnnnnnnnnnnnnnnnnnnnnnnnnnnnnnnnnnnnnnnnnnnnnnnnnnnnnnnnnnnnnnnnnnnnnnnnnnnnnnnnnnnnnnnnnnnnnnnnnnnnnnnnnnnnnnnnnnnnnnnnnnnnnnnnnnnnnnnnnnnnnnnnnnnnnnnnnnnnnnnnnnnnnnnnnnnnnnnnnnnnnnnnnnnnnnnnnnnnnnnnnnnnnnnnnnnnnnnnnnnnnnnnnnnnnnnnnnnnnnnnnnnnnnnnnnnnnnnnnnnnnnnnnnnnnnnnnnnnnnnnnnnnnnnnnnnnnnnnnnnnnnnnnnnnnnnnnnnnnnnnnnnnnnnnnnnnnnnnnnnnnnnnnnnnnnnnnnnnnnnnnnnnnnnnnnnnnnnnnnnnnnnnnnnnnnnnnnnnnnnnnnnnnnnnnnnnnnnnnnnnnnnnnnnnnnnnnnnnnnnnnnnnnnnnnnnnnnnnnnnnnnnnnnnnnnnnnnnnnnnnnnnnnnnnnnnnnnnnnnnnnnnnnnnnnnnnnnnnnnnnnnnnnnnnnnnnnnnnnnnnnnnnnnnnnnnnnnnnnnnnnnnnnnnnnnnnnnnnnnnnnnnnnnnnnnnnnnnnnnnnnnnnnnnnnnnnnnnnnnnnnnnnnnnnnnnnnnnnnnnnnnnnnnnnnnnnnnnnnnnnnnnnnnnnnnnnnnnnnnnnnnnnnnnnnnnnnnnnnnnnnnnnnnnnnnnnnnnnnnnnnnnnnnnnnnnnnnnnnnnnnnnnnnnnnnnnnnnnnnnnnnnnnnnnnnnnnnnnnnnnnnnnnnnnnnnnnnnnnnnnnnnnnnnnnnnnnnnnnnnnnnnnnnnnnnnnnnnnnnnnnnnnnnnnnnnnnnnnnnnnnnnnnnnnnnnnnnnnnnnnnnnnnnnnnnnnnnnnnnnnnnnnnnnnnnnnnnnnnnnnnnnnnnnnnnnnnnnnnnnnnnnnnnnnnnnnnnnnnnnnnnnnnnnnnnnnnnnnnnnnnnnnnnnnnnnnnnnnnnnnnnnnnnnnnnnnnnnnnnnnnnnnnnnnnnnnnnnnnnnnnnnnnnnnnnnnnnnnnnnnnnnnnnnnnnnnnnnnnnnnnnnnnnnnnnnnnnnnnnnnnnnnnnnnnnnnnnnnnnnnnnnnnnnnnnnnnnnnnnnnnnnnnnnnnnnnnnnnnnnnnnnnnnnnnnnnnnnnnnnnnnnnnnnnnnnnnnnnnnnnnnnnnnnnnnnnnnnnnnnnnnnnnnnnnnnnnnnnnnnnnnnnnnnnnnnnnnnnnnnnnnnnnnnnnnnnnnnnnnnnnnnnnnnnnnnnnnnnnnnnnnnnnnnnnnnnnnnnnnnnnnnnnnnnnnnnnnnnnnnnnnnnnnnnnnnnnnnnnnnnnnnnnnnnnnnnnnnnnnnnnnnnnnnnnnnnnnnnnnnnnnnnnnnnnnnnnnnnnnnnnnnnnnnnnnnnnnnnnnnnnnnnnnnnnnnnnnnnnnnnnnnnnnnnnnnnnnnnnnnnnnnnnnnnnnnnnnnnnnnnnnnnnnnnnnnnnnnnnnnnnnnnnnnnnnnnnnnnnnnnnnnnnnnnnnnnnnnnnnnnnnnnnnnnnnnnnnnnnnnnnnnnnnnnnnnnnnnnnnnnnnnnnnnnnnnnnnnnnnnnnnnnnnnnnnnnnnnnnnnnnnnnnnnnnnnnnnnnnnnnnnnnnnnnnnnnnnnnnnnnnnnnnnnnnnnnnnnnnnnnnnnnnnnnnnnnnnnnnnnnnnnnnnnnnnnnnnnnnnnnnnnnnnnnnnnnnnnnnnnnnnnnnnnnnnnnnnnnnnnnnnnnnnnnnnnnnnnnnnnnnnnnnnnnnnnnnnnnnnnnnnnnnnnnnnnnnnnnnnnnnnnnnnnnnnnnnnnnnnnnnnnnnnnnnnnnnnnnnnnnnnnnnnnnnnnnnnnnnnnnnnnnnnnnnnnnnnnnnnnnnnnnnnnnnnnnnnnnnnnnnnnnnnnnnnnnnnnnnnnnnnnnnnnnnnnnnnnnnnnnnnnnnnnnnnnnnnnnnnnnnnnnnnnnnnnnnnnnnnnnnnnnnnnnnnnnnnnnnnnnnnnnnnnnnnnnnnnnnnnnnnnnnnnnnnnnnnnnnnnnnnnnnnnnnnnnnnnnnnnnnnnnnnnnnnnnnnnnnnnnnnnnnnnnnnnnnnnnnnnnnnnnnnnnnnnnnnnnnnnnnnnnnnnnnnnnnnnnnnnnnnnnnnnnnnnnnnnnnnnnnnnnnnnnnnnnnnnnnnnnnnnnnnnnnnnnnnnnnnnnnnnnnnnnnnnnnnnnnnnnnnnnnnnnnnnnnnnnnnnnnnnnnnnnnnnnnnnnnnnnnnnnnnnnnnnnnnnnnnnnnnnnnnnnnnnnnnnnnnnnnnnnnnnnnnnnnnnnnnnnnnnnnnnnnnnnnnnnnnnnnnnnnnnnnnnnnnnnnnnnnnnnnnnnnnnnnnnnnnnnnnnnnnnnnnnnnnnnnnnnnnnnnnnnnnnnnnnnnnnnnnnnnnnnnnnnnnnnnnnnnnnnnnnnnnnnnnnnnnnnnnnnnnnnnnnnnnnnnnnnnnnnnnnnnnnnnnnnnnnnnnnnnnnnnnnnnnnnnnnnnnnnnnnnnnnnnnnnnnnnnnnnnnnnnnnnnnnnnnnnnnnnnnnnnnnnnnnnnnnnnnnnnnnnnnnnnnnnnnnnnnnnnnnnnnnnnnnnnnnnnnnnnnnnnnnnnnnnnnnnnnnnnnnnnnnnnnnnnnnnnnnnnnnnnnnnnnnnnnnnnnnnnnnnnnnnnnnnnnnnnnnnnnnnnnnnnnnnnnnnnnnnnnnnnnnnnnnnnnnnnnnnnnnnnnnnnnnnnnnnnnnnnnnnnnnnnnnnnnnnnnnnnnnnnnnnnnnnnnnnnnnnnnnnnnnnnnnnnnnnnnnnnnnnnnnnnnnnnnnnnnnnnnnnnnnnnnnnnnnnnnnnnnnnnnnnnnnnnnnnnnnnnnnnnnnnnnnnnnnnnnnnnnnnnnnnnnnnnnnnnnnnnnnnnnnnnnnnnnnnnnnnnnnnnnnnnnnnnnnnnnnnnnnnnnnnnnnnnnnnnnnnnnnnnnnnnnnnnnnnnnnnnnnnnnnnnnnnnnnnnnnnnnnnnnnnnnnnnnnnnnnnnnnnnnnnnnnnnnnnnnnnnnnnnnnnnnnnnnnnnnnnnnnnnnnnnnnnnnnnnnnnnnnnnnnnnnnnnnnnnnnnnnnnnnnnnnnnnnnnnnnnnnnnnnnnnnnnnnnnnnnnnnnnnnnnnnnnnnnnnnnnnnnnnnnnnnnnnnnnnnnnnnnnnnnnnnnnnnnnnnnnnnnnnnnnnnnnnnnnnnnnnnnnnnnnnnnnnnnnnnnnnnnnnnnnnnnnnnnnnnnnnnnnnnnnnnnnnnnnnnnnnnnnnnnnnnnnnnnnnnnnnnnnnnnnnnnnnnnnnnnnnnnnnnnnnnnnnnnnnnnnnnnnnnnnnnnnnnnnnnnnnnnnnnnnnnnnnnnnnnnnnnnnnnnnnnnnnnnnnnnnnnnnnnnnnnnnnnnnnnnnnnnnnnnnnnnnnnnnnnnnnnnnnnnnnnnnnnnnnnnnnnnnnnnnnnnnnnnnnnnnnnnnnnnnnnnnnnnnnnnnnnnnnnnnnnnnnnnnnnnnnnnnnnnnnnnnnnnnnnnnnnnnnnnnnnnnnnnnnnnnnnnnnnnnnnnnnnnnnnnnnnnnnnnnnnnnnnnnnnnnnnnnnnnnnnnnnnnnnnnnnnnnnnnnnnnnnnnnnnnnnnnnnnnnnnnnnnnnnnnnnnnnnnnnnnnnnnnnnnnnnnnnnnnnnnnnnnnnnnnnnnnnnnnnnnnnnnnnnnnnnnnnnnnnnnnnnnnnnnnnnnnnnnnnnnnnnnnnnnnnnnnnnnnnnnnnnnnnnnnnnnnnnnnnnnnnnnnnnnnnnnnnnnnnnnnnnnnnnnnnnnnnnnnnnnnnnnnnnnnnnnnnnnnnnnnnnnnnnnnnnnnnnnnnnnnnnnnnnnnnnnnnnnnnnnnnnnnnnnnnnnnnnnnnnnnnnnnnnnnnnnnnnnnnnnnnnnnnnnnnnnnnnnnnnnnnnnnnnnnnnnnnnnnnnnnnnnnnnnnnnnnnnnnnnnnnnnnnnnnnnnnnnnnnnnnnnnnnnnnnnnnnnnnnnnnnnnnnnnnnnnnnnnnnnnnnnnnnnnnnnnnnnnnnnnnnnnnnnnnnnnnnnnnnnnnnnnnnnnnnnnnnnnnnnnnnnnnnnnnnnnnnnnnnnnnnnnnnnnnnnnnnnnnnnnnnnnnnnnnnnnnnnnnnnnnnnnnnnnnnnnnnnnnnnnnnnnnnnnnnnnnnnnnnnnnnnnnnnnnnnnnnnnnnnnnnnnnnnnnnnnnnnnnnnnnnnnnnnnnnnnnnnnnnnnnnnnnnnnnnnnnnnnnnnnnnnnnnnnnnnnnnnnnnnnnnnnnnnnnnnnnnnnnnnnnnnnnnnnnnnnnnnnnnnnnnnnnnnnnnnnnnnnnnnnnnnnnnnnnnnnnnnnnnnnnnnnnnnnnnnnnnnnnnnnnnnnnnnnnnnnnnnnnnnnnnnnnnnnnnnnnnnnnnnnnnnnnnnnnnnnnnnnnnnnnnnnnnnnnnnnnnnnnnnnnnnnnnnnnnnnnnnnnnnnnnnnnnnnnnnnnnnnnnnnnnnnnnnnnnnnnnnnnnnnnnnnnnnnnnnnnnnnnnnnnnnnnnnnnnnnnnnnnnnnnnnnnnnnnnnnnnnnnnnnnnnnnnnnnnnnnnnnnnnnnnnnnnnnnnnnnnnnnnnnnnnnnnnnnnnnnnnnnnnnnnnnnnnnnnnnnnnnnnnnnnnnnnnnnnnnnnnnnnnnnnnnnnnnnnnnnnnnnnnnnnnnnnnnnnnnnnnnnnnnnnnnnnnnnnnnnnnnnnnnnnnnnnnnnnnnnaggtcaagccaccatgcaaatgtgtggctactagaagttcttcattgagttcatcatagatgtaccaggtcaagccaccatgcaaatgtgtggctactagaagtgcccaatcgtctatattcgtctctgagtgggtcaagccaccatgcaaatgtgtggctactagaagcattgcctgacgaataaccaaagagtaggtggtcaagccaccatgcaaatgtgtggctactagaaggttaaatatgtaacggacatgagggattttggtcaagccaccatgcaaatgtgtggctactaaagatggaattgcagccccgatgctgtaatgtttaattaagccgccccttcgggggtggctattttttattcctgactatgagtgaaaatgggatatcaagaaggtaacaaatgtttcgttctcaagagcaatccaacttcaacgccatagtcactaagcatatggctcaaagcgatgcgcctttactcttggagggggcgacaggcttaggaaagactcgagcctatttgtctgcggttatggatgcagttaaaacgggtcgcaagatagcaattgcactgcccagccatcaactgattgaccagttgctggtttccagcgatttattagaaacacaaagttctggcgttcgggttgtagcgtttaaacctgcccgtatgtttgaaaatagaaatcaatacaaagaatataaagacttggcgatggattcggatgtgatgttatgtacgagtgcatctatcatcattgaccagcgccttggtggagattacaacggtgcaacaaagcgtgattacattatttttgatgaggctgaccaactgcccgatgcggctgctttgcaaagcgattgtgaaattacaaaagaacaactcaaagagttaaacatcactgccgaaacggctggacaggtagtgacagaagttttaaagaagaagaatcttgagcctgaggtcaaggcttctgccctgatgatattagaggctattgaagagcctgcgtggttttacaaagcggggctaaccgataacggtggcgtgaggttatttcacaaaatgccgggtcgactacttaaaaaaatagccaatagaagtgaggttgcttttatcagcgcaacgttatctgtacatggaaagtttgatgattttaaaagggctatgggtatccaaaaggagagcaacctatcttgcatcattgaaccagccaaacatggacagttaacttttgaagtctcagaggttgaggtaaatactcctgaatggttagatgctattaaatcaaccatcaattccgcccccaaaccaattttgattgttaccccaagtcatgacctatccaatacactgggcgcaatcattcctaactcaaccataagaagtagggacgaaacttccactgaagcctccaagcgaatgggtaactcagagattttgattgcctcaggtgcatgggctggaatggatacacccattaagtgggggtcgattgttgtgccaagaatcccctatgagcctccaacagttttagatggtgaggttgagagcagtttctttgattcacgtaacactgctttacgaaggatgcgtcaggtcattggacgaggcttacgttctccagatgcggtatgcaagatttttgtgcttgatggtcgatataagagtattggggcgtttattccagatagatttaaaaatgcttgggctgaaaaatcctccaaggaaggtaagcggtatgaagtcacgctgtccaagattgaaagagaccccgctgtccgaaagcgagccttaaaacactacggtcactcatgtatgagttgccagttttcaccaaaagttattagccaacttgatgttcatcatttgaatccattatctgacggtggagagcgtataacaactattgatgatgtagcggttttgtgtgctaactgtcacaggctggcacattcaactagtcctccgctaacagtcgaagacatgaaggcattgcaggcctaataaacgtaattaggtaattaaacaaggatgaaaatctagttctcaaactgcgggtgttttaactaacttgtcactcaattaggatattcgccactgcgtttggctgactgtggagttggagcaacacacaaatcaattcgttcaatgaaatcgcccttaacttctgcaaagacgacagcaaccaagttttctttatcaccttgtgcgagtacaacacatgggccgggaaaactatgcgtcaatgttgccatttcagcccaaacggtttctcctgacgatttaactactttgagtttcgagttgatgtaatctaaatattctttttttgattcgatttcagagaacaccatttgcgaagaataacaaaagtggtttgctagcagtggttccaattttgaggaatccaaggtattcatcatcgatgcgaatgctcttagtgcagtttcaatagttaacattttagactctctcgaacgtatgtgattttactttattctgcgtgggttggactttagatatcgtaaataaaattactttcagtacgaacgttcgcattggcaacatgcgaacaaatgggtaatatttgccaattaactagcgtcttatcttgggtggatatgagtatttcaagtgacaaaattgatgattcaacttatataacacttgcaggcggtgcgatacgctgccgccgctgtttggcaaggtcaagcaggacgggcgagcaatgtcgcaaacctgcgatgaaatcaagcaggacgcagaaatgtacgcatcacggcggtcgctccaaaggggcgaccactgccaaaggcaaacaacgaattattgatgccaacctgaagcacggggaatgcaccttggctgaaaggaagcgtcattcccaaatttctgcgagattatcaatgcttgaagattgcatgattgttcttggcatgggggatggactgcgtattcgaggcagaacgcccgcaggctattgcccaatacgaacgatggacgaggttaaacaattcctcgtgggaattgactgacactatgtgtagggggtcaaacgatgggtaacatttttttaaaccttgctacccatcggccgttagcatcttcctaatgcgttgtaacgcttgcaacgcttatttgcggagtgcatgcgggaagatatcttataaatgcgtctttgaatgaatcaagtttgtaacctttgcaaggtgactcactagtccttattgtttcagatttaactccgtatggtttcagaatagcacttagtcgcctgtcatcaagtggtctatgttctaagtctccccaaggagacattgttaagttatttaattcaaatagtagttccttagtgctgattaaattaactttcttgttgtcaaagattgccttgatgtcgctgagaagcaagatgcctaaactctgaggagtctcctttttaagcgttacaagcgttacagccgttacacggattgcttgagaccattgctcgtctgcgtggtctccaatcgcaataagtgcctcccatacatctgcgtccctatcagttacctcgggaggtaacggcttcatattcgcaagtaaatccttgcactggctcgcccattgctctatgtgatgacgaatcgcagacgcttcatcttggaatttggtgaccctaaagggctctacagtttcatggggcgctctgcgcttcatgcgcacaatgacacttcgggaaaggatggtgtctggaagattacctaatccagcgaccgctactgcgcagaacgcagaaatatcttcggttgtaaattgaccatttttattactcacgcatctgccgtactttgagtgtttcctatatcccgcattgatgaatccacgcacgtcctcgttatccttcgccttagggccgaaaactgtatcaatttcatcatgcagtatggtgggtcttccgtcagcactagcagttcttctgaacaaatacgcagtagagacattcactggctcaatagcccttgggacaagttgagcagttacctccaacgcacggctctttccacttgcaggttcacttgatagaaatgcaatccgtggggtggt

SEQ ID NO: 143 - DNA, 13676 bp, Artificial Sequence
  Synthetic Oligonucleotide
  misc_feature (1)..(9997): n is a, c, g, or t
nnnnnnnnnnnnnnnnnnnnnnnnnnnnnnnnnnnnnnnnnnnnnnnnnnnnnnnnnnnnnnnnnnnnnnnnnnnnnnnnnnnnnnnnnnnnnnnnnnnnnnnnnnnnnnnnnnnnnnnnnnnnnnnnnnnnnnnnnnnnnnnnnnnnnnnnnnnnnnnnnnnnnnnnnnnnnnnnnnnnnnnnnnnnnnnnnnnnnnnnnnnnnnnnnnnnnnnnnnnnnnnnnnnnnnnnnnnnnnnnnnnnnnnnnnnnnnnnnnnnnnnnnnnnnnnnnnnnnnnnnnnnnnnnnnnnnnnnnnnnnnnnnnnnnnnnnnnnnnnnnnnnnnnnnnnnnnnnnnnnnnnnnnnnnnnnnnnnnnnnnnnnnnnnnnnnnnnnnnnnnnnnnnnnnnnnnnnnnnnnnnnnnnnnnnnnnnnnnnnnnnnnnnnnnnnnnnnnnnnnnnnnnnnnnnnnnnnnnnnnnnnnnnnnnnnnnnnnnnnnnnnnnnnnnnnnnnnnnnnnnnnnnnnnnnnnnnnnnnnnnnnnnnnnnnnnnnnnnnnnnnnnnnnnnnnnnnnnnnnnnnnnnnnnnnnnnnnnnnnnnnnnnnnnnnnnnnnnnnnnnnnnnnnnnnnnnnnnnnnnnnnnnnnnnnnnnnnnnnnnnnnnnnnnnnnnnnnnnnnnnnnnnnnnnnnnnnnnnnnnnnnnnnnnnnnnnnnnnnnnnnnnnnnnnnnnnnnnnnnnnnnnnnnnnnnnnnnnnnnnnnnnnnnnnnnnnnnnnnnnnnnnnnnnnnnnnnnnnnnnnnnnnnnnnnnnnnnnnnnnnnnnnnnnnnnnnnnnnnnnnnnnnnnnnnnnnnnnnnnnnnnnnnnnnnnnnnnnnnnnnnnnnnnnnnnnnnnnnnnnnnnnnnnnnnnnnnnnnnnnnnnnnnnnnnnnnnnnnnnnnnnnnnnnnnnnnnnnnnnnnnnnnnnnnnnnnnnnnnnnnnnnnnnnnnnnnnnnnnnnnnnnnnnnnnnnnnnnnnnnnnnnnnnnnnnnnnnnnnnnnnnnnnnnnnnnnnnnnnnnnnnnnnnnnnnnnnnnnnnnnnnnnnnnnnnnnnnnnnnnnnnnnnnnnnnnnnnnnnnnnnnnnnnnnnnnnnnnnnnnnnnnnnnnnnnnnnnnnnnnnnnnnnnnnnnnnnnnnnnnnnnnnnnnnnnnnnnnnnnnnnnnnnnnnnnnnnnnnnnnnnnnnnnnnnnnnnnnnnnnnnnnnnnnnnnnnnnnnnnnnnnnnnnnnnnnnnnnnnnnnnnnnnnnnnnnnnnnnnnnnnnnnnnnnnnnnnnnnnnnnnnnnnnnnnnnnnnnnnnnnnnnnnnnnnnnnnnnnnnnnnnnnnnnnnnnnnnnnnnnnnnnnnnnnnnnnnnnnnnnnnnnnnnnnnnnnnnnnnnnnnnnnnnnnnnnnnnnnnnnnnnnnnnnnnnnnnnnnnnnnnnnnnnnnnnnnnnnnnnnnnnnnnnnnnnnnnnnnnnnnnnnnnnnnnnnnnnnnnnnnnnnnnnnnnnnnnnnnnnnnnnnnnnnnnnnnnnnnnnnnnnnnnnnnnnnnnnnnnnnnnnnnnnnnnnnnnnnnnnnnnnnnnnnnnnnnnnnnnnnnnnnnnnnnnnnnnnnnnnnnnnnnnnnnnnnnnnnnnnnnnnnnnnnnnnnnnnnnnnnnnnnnnnnnnnnnnnnnnnnnnnnnnnnnnnnnnnnnnnnnnnnnnnnnnnnnnnnnnnnnnnnnnnnnnnnnnnnnnnnnnnnnnnnnnnnnnnnnnnnnnnnnnnnnnnnnnnnnnnnnnnnnnnnnnnnnnnnnnnnnnnnnnnnnnnnnnnnnnnnnnnnnnnnnnnnnnnnnnnnnnnnnnnnnnnnnnnnnnnnnnnnnnnnnnnnnnnnnnnnnnnnnnnnnnnnnnnnnnnnnnnnnnnnnnnnnnnnnnnnnnnnnnnnnnnnnnnnnnnnnnnnnnnnnnnnnnnnnnnnnnnnnnnnnnnnnnnnnnnnnnnnnnnnnnnnnnnnnnnnnnnnnnnnnnnnnnnnnnnnnnnnnnnnnnnnnnnnnnnnnnnnnnnnnnnnnnnnnnnnnnnnnnnnnnnnnnnnnnnnnnnnnnnnnnnnnnnnnnnnnnnnnnnnnnnnnnnnnnnnnnnnnnnnnnnnnnnnnnnnnnnnnnnnnnnnnnnnnnnnnnnnnnnnnnnnnnnnnnnnnnnnnnnnnnnnnnnnnnnnnnnnnnnnnnnnnnnnnnnnnnnnnnnnnnnnnnnnnnnnnnnnnnnnnnnnnnnnnnnnnnnnnnnnnnnnnnnnnnnnnnnnnnnnnnnnnnnnnnnnnnnnnnnnnnnnnnnnnnnnnnnnnnnnnnnnnnnnnnnnnnnnnnnnnnnnnnnnnnnnnnnnnnnnnnnnnnnnnnnnnnnnnnnnnnnnnnnnnnnnnnnnnnnnnnnnnnnnnnnnnnnnnnnnnnnnnnnnnnnnnnnnnnnnnnnnnnnnnnnnnnnnnnnnnnnnnnnnnnnnnnnnnnnnnnnnnnnnnnnnnnnnnnnnnnnnnnnnnnnnnnnnnnnnnnnnnnnnnnnnnnnnnnnnnnnnnnnnnnnnnnnnnnnnnnnnnnnnnnnnnnnnnnnnnnnnnnnnnnnnnnnnnnnnnnnnnnnnnnnnnnnnnnnnnnnnnnnnnnnnnnnnnnnnnnnnnnnnnnnnnnnnnnnnnnnnnnnnnnnnnnnnnnnnnnnnnnnnnnnnnnnnnnnnnnnnnnnnnnnnnnnnnnnnnnnnnnnnnnnnnnnnnnnnnnnnnnnnnnnnnnnnnnnnnnnnnnnnnnnnnnnnnnnnnnnnnnnnnnnnnnnnnnnnnnnnnnnnnnnnnnnnnnnnnnnnnnnnnnnnnnnnnnnnnnnnnnnnnnnnnnnnnnnnnnnnnnnnnnnnnnnnnnnnnnnnnnnnnnnnnnnnnnnnnnnnnnnnnnnnnnnnnnnnnnnnnnnnnnnnnnnnnnnnnnnnnnnnnnnnnnnnnnnnnnnnnnnnnnnnnnnnnnnnnnnnnnnnnnnnnnnnnnnnnnnnnnnnnnnnnnnnnnnnnnnnnnnnnnnnnnnnnnnnnnnnnnnnnnnnnnnnnnnnnnnnnnnnnnnnnnnnnnnnnnnnnnnnnnnnnnnnnnnnnnnnnnnnnnnnnnnnnnnnnnnnnnnnnnnnnnnnnnnnnnnnnnnnnnnnnnnnnnnnnnnnnnnnnnnnnnnnnnnnnnnnnnnnnnnnnnnnnnnnnnnnnnnnnnnnnnnnnnnnnnnnnnnnnnnnnnnnnnnnnnnnnnnnnnnnnnnnnnnnnnnnnnnnnnnnnnnnnnnnnnnnnnnnnnnnnnnnnnnnnnnnnnnnnnnnnnnnnnnnnnnnnnnnnnnnnnnnnnnnnnnnnnnnnnnnnnnnnnnnnnnnnnnnnnnnnnnnnnnnnnnnnnnnnnnnnnnnnnnnnnnnnnnnnnnnnnnnnnnnnnnnnnnnnnnnnnnnnnnnnnnnnnnnnnnnnnnnnnnnnnnnnnnnnnnnnnnnnnnnnnnnnnnnnnnnnnnnnnnnnnnnnnnnnnnnnnnnnnnnnnnnnnnnnnnnnnnnnnnnnnnnnnnnnnnnnnnnnnnnnnnnnnnnnnnnnnnnnnnnnnnnnnnnnnnnnnnnnnnnnnnnnnnnnnnnnnnnnnnnnnnnnnnnnnnnnnnnnnnnnnnnnnnnnnnnnnnnnnnnnnnnnnnnnnnnnnnnnnnnnnnnnnnnnnnnnnnnnnnnnnnnnnnnnnnnnnnnnnnnnnnnnnnnnnnnnnnnnnnnnnnnnnnnnnnnnnnnnnnnnnnnnnnnnnnnnnnnnnnnnnnnnnnnnnnnnnnnnnnnnnnnnnnnnnnnnnnnnnnnnnnnnnnnnnnnnnnnnnnnnnnnnnnnnnnnnnnnnnnnnnnnnnnnnnnnnnnnnnnnnnnnnnnnnnnnnnnnnnnnnnnnnnnnnnnnnnnnnnnnnnnnnnnnnnnnnnnnnnnnnnnnnnnnnnnnnnnnnnnnnnnnnnnnnnnnnnnnnnnnnnnnnnnnnnnnnnnnnnnnnnnnnnnnnnnnnnnnnnnnnnnnnnnnnnnnnnnnnnnnnnnnnnnnnnnnnnnnnnnnnnnnnnnnnnnnnnnnnnnnnnnnnnnnnnnnnnnnnnnnnnnnnnnnnnnnnnnnnnnnnnnnnnnnnnnnnnnnnnnnnnnnnnnnnnnnnnnnnnnnnnnnnnnnnnnnnnnnnnnnnnnnnnnnnnnnnnnnnnnnnnnnnnnnnnnnnnnnnnnnnnnnnnnnnnnnnnnnnnnnnnnnnnnnnnnnnnnnnnnnnnnnnnnnnnnnnnnnnnnnnnnnnnnnnnnnnnnnnnnnnnnnnnnnnnnnnnnnnnnnnnnnnnnnnnnnnnnnnnnnnnnnnnnnnnnnnnnnnnnnnnnnnnnnnnnnnnnnnnnnnnnnnnnnnnnnnnnnnnnnnnnnnnnnnnnnnnnnnnnnnnnnnnnnnnnnnnnnnnnnnnnnnnnnnnnnnnnnnnnnnnnnnnnnnnnnnnnnnnnnnnnnnnnnnnnnnnnnnnnnnnnnnnnnnnnnnnnnnnnnnnnnnnnnnnnnnnnnnnnnnnnnnnnnnnnnnnnnnnnnnnnnnnnnnnnnnnnnnnnnnnnnnnnnnnnnnnnnnnnnnnnnnnnnnnnnnnnnnnnnnnnnnnnnnnnnnnnnnnnnnnnnnnnnnnnnnnnnnnnnnnnnnnnnnnnnnnnnnnnnnnnnnnnnnnnnnnnnnnnnnnnnnnnnnnnnnnnnnnnnnnnnnnnnnnnnnnnnnnnnnnnnnnnnnnnnnnnnnnnnnnnnnnnnnnnnnnnnnnnnnnnnnnnnnnnnnnnnnnnnnnnnnnnnnnnnnnnnnnnnnnnnnnnnnnnnnnnnnnnnnnnnnnnnnnnnnnnnnnnnnnnnnnnnnnnnnnnnnnnnnnnnnnnnnnnnnnnnnnnnnnnnnnnnnnnnnnnnnnnnnnnnnnnnnnnnnnnnnnnnnnnnnnnnnnnnnnnnnnnnnnnnnnnnnnnnnnnnnnnnnnnnnnnnnnnnnnnnnnnnnnnnnnnnnnnnnnnnnnnnnnnnnnnnnnnnnnnnnnnnnnnnnnnnnnnnnnnnnnnnnnnnnnnnnnnnnnnnnnnnnnnnnnnnnnnnnnnnnnnnnnnnnnnnnnnnnnnnnnnnnnnnnnnnnnnnnnnnnnnnnnnnnnnnnnnnnnnnnnnnnnnnnnnnnnnnnnnnnnnnnnnnnnnnnnnnnnnnnnnnnnnnnnnnnnnnnnnnnnnnnnnnnnnnnnnnnnnnnnnnnnnnnnnnnnnnnnnnnnnnnnnnnnnnnnnnnnnnnnnnnnnnnnnnnnnnnnnnnnnnnnnnnnnnnnnnnnnnnnnnnnnnnnnnnnnnnnnnnnnnnnnnnnnnnnnnnnnnnnnnnnnnnnnnnnnnnnnnnnnnnnnnnnnnnnnnnnnnnnnnnnnnnnnnnnnnnnnnnnnnnnnnnnnnnnnnnnnnnnnnnnnnnnnnnnnnnnnnnnnnnnnnnnnnnnnnnnnnnnnnnnnnnnnnnnnnnnnnnnnnnnnnnnnnnnnnnnnnnnnnnnnnnnnnnnnnnnnnnnnnnnnnnnnnnnnnnnnnnnnnnnnnnnnnnnnnnnnnnnnnnnnnnnnnnnnnnnnnnnnnnnnnnnnnnnnnnnnnnnnnnnnnnnnnnnnnnnnnnnnnnnnnnnnnnnnnnnnnnnnnnnnnnnnnnnnnnnnnnnnnnnnnnnnnnnnnnnnnnnnnnnnnnnnnnnnnnnnnnnnnnnnnnnnnnnnnnnnnnnnnnnnnnnnnnnnnnnnnnnnnnnnnnnnnnnnnnnnnnnnnnnnnnnnnnnnnnnnnnnnnnnnnnnnnnnnnnnnnnnnnnnnnnnnnnnnnnnnnnnnnnnnnnnnnnnnnnnnnnnnnnnnnnnnnnnnnnnnnnnnnnnnnnnnnnnnnnnnnnnnnnnnnnnnnnnnnnnnnnnnnnnnnnnnnnnnnnnnnnnnnnnnnnnnnnnnnnnnnnnnnnnnnnnnnnnnnnnnnnnnnnnnnnnnnnnnnnnnnnnnnnnnnnnnnnnnnnnnnnnnnnnnnnnnnnnnnnnnnnnnnnnnnnnnnnnnnnnnnnnnnnnnnnnnnnnnnnnnnnnnnnnnnnnnnnnnnnnnnnnnnnnnnnnnnnnnnnnnnnnnnnnnnnnnnnnnnnnnnnnnnnnnnnnnnnnnnnnnnnnnnnnnnnnnnnnnnnnnnnnnnnnnnnnnnnnnnnnnnnnnnnnnnnnnnnnnnnnnnnnnnnnnnnnnnnnnnnnnnnnnnnnnnnnnnnnnnnnnnnnnnnnnnnnnnnnnnnnnnnnnnnnnnnnnnnnnnnnnnnnnnnnnnnnnnnnnnnnnnnnnnnnnnnnnnnnnnnnnnnnnnnnnnnnnnnnnnnnnnnnnnnnnnnnnnnnnnnnnnnnnnnnnnnnnnnnnnnnnnnnnnnnnnnnnnnnnnnnnnnnnnnnnnnnnnnnnnnnnnnnnnnnnnnnnnnnnnnnnnnnnnnnnnnnnnnnnnnnnnnnnnnnnnnnnnnnnnnnnnnnnnnnnnnnnnnnnnnnnnnnnnnnnnnnnnnnnnnnnnnnnnnnnnnnnnnnnnnnnnnnnnnnnnnnnnnnnnnnnnnnnnnnnnnnnnnnnnnnnnnnnnnnnnnnnnnnnnnnnnnnnnnnnnnnnnnnnnnnnnnnnnnnnnnnnnnnnnnnnnnnnnnnnnnnnnnnnnnnnnnnnnnnnnnnnnnnnnnnnnnnnnnnnnnnnnnnnnnnnnnnnnnnnnnnnnnnnnnnnnnnnnnnnnnnnnnnnnnnnnnnnnnnnnnnnnnnnnnnnnnnnnnnnnnnnnnnnnnnnnnnnnnnnnnnnnnnnnnnnnnnnnnnnnnnnnnnnnnnnnnnnnnnnnnnnnnnnnnnnnnnnnnnnnnnnnnnnnnnnnnnnnnnnnnnnnnnnnnnnnnnnnnnnnnnnnnnnnnnnnnnnnnnnnnnnnnnnnnnnnnnnnnnnnnnnnnnnnnnnnnnnnnnnnnnnnnnnnnnnnnnnnnnnnnnnnnnnnnnnnnnnnnnnnnnnnnnnnnnnnnnnnnnnnnnnnnnnnnnnnnnnnnnnnnnnnnnnnnnnnnnnnnnnnnnnnnnnnnnnnnnnnnnnnnnnnnnnnnnnnnnnnnnnnnnnnnnnnnnnnnnnnnnnnnnnnnnnnnnnnnnnnnnnnnnnnnnnnnnnnnnnnnnnnnnnnnnnnnnnnnnnnnnnnnnnnnnnnnnnnnnnnnnnnnnnnnnnnnnnnnnnnnnnnnnnnnnnnnnnnnnnnnnnnnnnnnnnnnnnnnnnnnnnnnnnnnnnnnnnnnnnnnnnnnnnnnnnnnnnnnnnnnnnnnnnnnnnnnnnnnnnnnnnnnnnnnnnnnnnnnnnnnnnnnnnnnnnnnnnnnnnnnnnnnnnnnnnnnnnnnnnnnnnnnnnnnnnnnnnnnnnnnnnnnnnnnnnnnnnnnnnnnnnnnnnnnnnnnnnnnnnnnnnnnnnnnnnnnnnnnnnnnnnnnnnnnnnnnnnnnnnnnnnnnnnnnnnnnnnnnnnnnnnnnnnnnnnnnnnnnnnnnnnnnnnnnnnnnnnnnnnnnnnnnnnnnnnnnnnnnnnnnnnnnnnnnnnnnnnnnnnnnnnnnnnnnnnnnnnnnnnnnnnnnnnnnnnnnnnnnnnnnnnnnnnnnnnnnnnnnnnnnnnnnnnnnnnnnnnnnnnnnnnnnnnnnnnnnnnnnnnnnnnnnnnnnnnnnnnnnnnnnnnnnnnnnnnnnnnnnnnnnnnnnnnnnnnnnnnnnnnnnnnnnnnnnnnnnnnnnnnnnnnnnnnnnnnnnnnnnnnnnnnnnnnnnnnnnnnnnnnnnnnnnnnnnnnnnnnnnnnnnnnnnnnnnnnnnnnnnnnnnnnnnnnnnnnnnnnnnnnnnnnnnnnnnnnnnnnnnnnnnnnnnnnnnnnnnnnnnnnnnnnnnnnnnnnnnnnnnnnnnnnnnnnnnnnnnnnnnnnnnnnnnnnnnnnnnnnnnnnnnnnnnnnnnnnnnnnnnnnnnnnnnnnnnnnnnnnnnnnnnnnnnnnnnnnnnnnnnnnnnnnnnnnnnnnnnnnnnnnnnnnnnnnnnnnnnnnnnnnnnnnnnnnnnnnnnnnnnnnnnnnnnnnnnnnnnnnnnnnnnnnnnnnnnnnnnnnnnnnnnnnnnnnnnnnnnnnnnnnnnnnnnnnnnnnnnnnnnnnnnnnnnnnnnnnnnnnnnnnnnnnnnnnnnnnnnnnnnnnnnnnnnnnnnnnnnnnnnnnnnnnnnnnnnnnnnnnnnnnnnnnnnnnnnnnnnnnnnnnnnnnnnnnnnnnnnnnnnnnnnnnnnnnnnnnnnnnnnnnnnnnnnnnnnnnnnnnnnnnnnnnnnnnnnnnnnnnnnnnnnnnnnnnnnnnnnnnnnnnnnnnnnnnnnnnnnnnnnnnnnnnnnnnnnnnnnnnnnnnnnnnnnnnnnnnnnnnnnnnnnnnnnnnnnnnnnnnnnnnnnnnnnnnnnnnnnnnnnnnnnnnnnnnnnnnnnnnnnnnnnnnnnnnnnnnnnnnnnnnnnnnnnnnnnnnnnnnnnnnnnnnnnnnnnnnnnnnnnnnnnnnnnnnnnnnnnnnnnnnnnnnnnnnnnnnnnnnnnnnnnnnnnnnnnnnnnnnnnnnnnnnnnnnnnnnnnnnnnnnnnnnnnnnnnnnnnnnnnnnnnnnnnnnnnnnnnnnnnnnnnnnnnnnnnnnnnnnnnnnnnnnnnnnnnnnnnnnnnnnnnnnnnnnnnnnnnnnnnnnnnnnnnnnnnnnnnnnnnnnnnnnnnnnnnnnnnnnnnnnnnnnnnnnnnnnnnnnnnnnnnnnnnnnnnnnnnnnnnnnnnnnnnnnnnnnnnnnnnnnnnnnnnnnnnnnnnnnnnnnnnnnnnnnnnnnnnnnnnnnnnnnnnnnnnnnnnnnnnnnnnnnnnnnnnnnnnnnnnnnnnnnnnnnnnnnnnnnnnnnnnnnnnnnnnnnnnnnnnnnnnnnnnnnnnnnnnnnnnnnnnnnnnnnnnnnnnnnnnnnnnnnnnnnnnnnnnnnnnnnnnnnnnnnnnnnnnnnnnnnnnnnnnnnnnnnnnnnnnnnnnnnnnnnnnnnnnnnnnnnnnnnnnnnnnnnnnnnnnnnnnnnnnnnnnnnnnnnnnnnnnnnnnnnnnnnnnnnnnnnnnnnnnnnnnnnnnnnnnnnnnnnnnnnnnnnnnnnnnnnnnnnnnnnnnnnnnnnnnnnnnnnnnnnnnnnnnnnnnnnnnnnnnnnnnnnnnnnnnnnnnnnnnnnnnnnnnnnnnnnnnnnnnnnnnnnnnnnnnnnnnnnnnnnnnnnnnnnnnnnnnnnnnnnnnnnnnnnnnnnnnnnnnnnnnnnnnnnnnnnnnnnnnnnnnnnnnnnnnnnnnnnnnnnnnnnnnnnnnnnnnnnnnnnnnnnnnnnnnnnnnnnnnnnnnnnnnnnnnnnnnnnnnnnnnnnnnnnnnnnnnnnnnnnnnnnnnnnnnnnnnnnnnnnnnnnnnnnnnnnnnnnnnnnnnnnnnnnnnnnnnnnnnnnnnnnnnnnnnnnnnnnnnnnnnnnnnnnnnnnnnnnnnnnnnnnnnnnnnnnnnnnnnnnnnnnnnnnnnnnnnnnnnnnnnnnnnnnnnnnnnnnnnnnnnnnnnnnnnnnnnnnnnnnnnnnnnnnnnnnnnnnnnnnnnnnnnnnnnnnnnnnnnnnnnnnnnnnnnnnnnnnnnnnnnnnnnnnnnnnnnnnnnnnnnnnnnnnnnnnnnnnnnnnnnnnnnnnnnnnnnnnnnnnnnnnnnnnnnnnnnnnnnnnnnnnnnnnnnnnnnnnnnnnnnnnnnnnnnnnnnnnnnnnnnnnnnnnnnnnnnnnnnnnnnnnnnnnnnnnnnnnnnnnnnnnnnnnnnnnnnnnnnnnnnnnnnnnnnnnnnnnnnnnnnnnnnnnnnnnnnnnnnnnnnnnnnnnnnnnnnnnnnnnnnnnnnnnnnnnnnnnnnnnnnnnnnnnnnnnnnnnnnnnnnnnnnnnnnnnnnnnnnnnnnnnnnnnnnnnnnnnnnnnnnatggcaggtataaaaacatagaggcctttgtacccaagcgattccgtagtgggtggacaagcaaacagttcttagagggcagtagacgtgaactggtcttgtccaaaatagaacgtgatccatcagtccgtaaagaagcactaaaacgctttggtcatgaatgcatgtgttgtggctttcatccaaaggtgatctctcagttagatgtgcatcacctatcccccttgagtgaaggcggcgaaagactcacagcaattagcgatcttgcagttctctgcgctaactgtcaccgactcgcccactcaacttcaccaccgttaagtattgatgctatgaaggcgttgagatgaggtagtggccttttttcgggtcacgttaccaagttgctactggcaaacacagcgccactcgtatcgtccggttgcctgattgaagacttgcttttgagtgcactggctcgtacctaggggtggcagttgtaacgacggcattggttggattgatggcggagtcattgggcacatcccgatgcatatagcttggtcgaacttattttaattggggggttgactttttaccgcccacgagtaaaagcattactggaagtccaagtgcaacgccacttcgggctagatgtctggcgctaaagatgaagacccccatcctacttacagaaacatagtgacatacaaaataagagtaaataaatgacaaatcgtcctaagggttggttggctgcgctgctttcgctaggttttccgcctatcggctttttatacgtgggccggtggaggtgggcgatattgagtttgctgcctattggcgtatttgccggcactacttacgcgtttcctaaagtgcatttggaggaaatgtggtgggttgttgacatattttcttgggtcttttctggcatatgcgcatggattgcctataaggaggcggcccgatttggtgcagaccggatccgtcctggctatagcaaatggtatggattgcttgcaacagcaatcgtgatacctagttcagtcattggtgttcgcgcttttttattcgagccgttcagaattcccgctcgaagcatgttgccaacactagacataggggccagaataatagttaaaaaatggggatatgggaactacgcaactttcggatttcagctatttcatgctaaacccagtgttgctttgaatcgaggtgatctcattgtctttgaatacccgcccaatcgggatataaactacatcaaacggctagttggcctacctggtgatacggtggcttacctcaataagcgccttacgataaacggtcagtctgtttctataactgacttaccggattactacgatgaacaaagtatgagatatttcaaacagtttgaagaagcattaggtgatacgagatatagattgctaaatgaggtcgatcgacctgcttttgtgcctggtgctgaacaatttttggggcgcgaatggtgtcgctatacgattgatggtttcatctgcaaagtgcccttaggcaactatttcatgcttggtgacaatcgggacaattcgttggactctcgctactggggttttgtaccttcagaccacatcgttgggaaagttgtctatattattcaatagcgtagcaaacataggttttgaaaccactgaaggaaatctctaggcgtcttgtatttagaagggcaaggggtggtgcaccgcgacattgttgccaagcgcatgaccccgcagcaaatcgctgacgcgcaaaaactggcgcgggattgtttggctcggaatttcaagggctgcgactagtgtcggttgccaaggttcaaacaatgggggggtgttcatgcgaaagtccattttggtattcgcggtttacttagcagttagtgtggacgctgcacgctagttgtagctggatgatataacctctgtgagtactgacggcaaagtacacaaataaataattaatattttcactaaagattacacatgaaaaatatcaaaaaatctataattactgctggatttttattactgattaccggctgtggaacaacatcaaatgtcggttacgtttggtttggcactggtatcaatgacgattggggtactggaggtaatatttggagccatttttcctcctactctcagcaaagtgtcaatcaggttgctactgaatactgttcaagaaaaaatttaccacccccaactgtaactaccatctcaagtccatcatttgtggtctccgagtattacatgttcagatttcagtgtgataaaaatgctatgccacgcactacagttccacaatccatacaacaaggtaaattatcattgaacgaagcaaaaaataagtgcattgatttggggtttaaagcaaatactgaggaattgggaaaatgcgtattacaactatcaaaataggactggcactcagtctttgttcattaaatgggtttgctgttgacttaactctttttgaaaaccaatgcgctgagattggttttacaaggaatacgcctgcatttgggagttgtgttttagatttgcattcacgtgaattcaattcaaatccaagtcaaaaactgtatcaacaaccagcttcggagttttctaggcaaaatgaattgtctagggaagcgttagacgaagctaggaaagctcggcaagaggccgcaacagcgcggcgagaggctgatgagtaccgaaaaaggatagaagcacaaaaacgacaagaccaatttgatgaacagagaagacttctctgggatagcaatgaaaaggcaatgcgtgaaagttggcgacgtccctgaaagaattaaaagagggacagtttttacgcctcattaaaaaaaacttcgctattaaggtgcttagtgaattgggtgagtttaaaaatagggtttagtctgtctataaattgagaattaaatgaataaattttcgacgctcctcattcctctgataattgtatcagtcagtacatttgccacaccgttaacggctcaggaaaagctagaatttcaaaaaagcagtgtgccttcttgcatagcaaaaaataatgcttccagagatttaactaccttacaaaaagaaggacttaacaattactgcatatgtcatagtgttgtaatgacaagtcttgttactagagaagaaatgatgagtttaggcaaaggtaagctaccgacaacattccaaggtaaggtctcggaggcacagaagcaatgtatcaaagcattgtctaattaatcaacatgcaatatttaactttatctgttggcgcagttttattgttgcctcttagcgtgtttgctcaaatgggcgctagaatgccaccaattgattatgatgagggagcatttaggaatccctctgattggtggtggactgtcctaattattgcaaactttattattgctccgtatttaataacaagaaaagaccttgactttggtggtgttgcatactttaaatggttcattgcgcttttcattacttttgttatttctcttcttttaattccattgttcgtaaataaaaatgattatatgttctggactattgctattcagttgggagttactagctatggatttataactaacaaaaaatagtttggtaaaattatattccgccagtagtgtgcatgcacaaaatgaacgagtagggcc

SEQ ID NO: 144 - DNA, 13676 bp, Artificial Sequence; identical to SEQ ID NO: 143
  Synthetic Oligonucleotide
  misc_feature (1)..(9997): n is a, c, g, or t

SEQ ID NO: 145 - DNA, 13652 bp, Artificial Sequence
  Synthetic Oligonucleotide
  misc_feature (1)..(9998): n is a, c, g, or t
nnnnnnnnnnnnnnnnnnnnnnnnnnnnnnnnnnnnnnnnnnnnnnnnnnnnnnnnnnnnnnnnnnnnnnnnnnnnnnnnnnnnnnnnnnnnnnnnnnnnnnnnnnnnnnnnnnnnnnnnnnnnnnnnnnnnnnnnnnnnnnnnnnnnnnnnnnnnnnnnnnnnnnnnnnnnnnnnnnnnnnnnnnnnnnnnnnnnnnnnnnnnnnnnnnnnnnnnnnnnnnnnnnnnnnnnnnnnnnnnnnnnnnnnnnnnnnnnnnnnnnnnnnnnnnnnnnnnnnnnnnnnnnnnnnnnnnnnnnnnnnnnnnnnnnnnnnnnnnnnnnnnnnnnnnnnnnnnnnnnnnnnnnnnnnnnnnnnnnnnnnnnnnnnnnnnnnnnnnnnnnnnnnnnnnnnnnnnnnnnnnnnnnnnnnnnnnnnnnnnnnnnnnnnnnnnnnnnnnnnnnnnnnnnnnnnnnnnnnnnnnnnnnnnnnnnnnnnnnnnnnnnnnnnnnnnnnnnnnnnnnnnnnnnnnnnnnnnnnnnnnnnnnnnnnnnnnnnnnnnnnnnnnnnnnnnnnnnnnnnnnnnnnnnnnnnnnnnnnnnnnnnnnnnnnnnnnnnnnnnnnnnnnnnnnnnnnnnnnnnnnnnnnnnnnnnnnnnnnnnnnnnnnnnnnnnnnnnnnnnnnnnnnnnnnnnnnnnnnnnnnnnnnnnnnnnnnnnnnnnnnnnnnnnnnnnnnnnnnnnnnnnnnnnnnnnnnnnnnnnnnnnnnnnnnnnnnnnnnnnnnnnnnnnnnnnnnnnnnnnnnnnnnnnnnnnnnnnnnnnnnnnnnnnnnnnnnnnnnnnnnnnnnnnnnnnnnnnnnnnnnnnnnnnnnnnnnnnnnnnnnnnnnnnnnnnnnnnnnnnnnnnnnnnnnnnnnnnnnnnnnnnnnnnnnnnnnnnnnnnnnnnnnnnnnnnnnnnnnnnnnnnnnnnnnnnnnnnnnnnnnnnnnnnnnnnnnnnnnnnnnnnnnnnnnnnnnnnnnnnnnnnnnnnnnnnnnnnnnnnnnnnnnnnnnnnnnnnnnnnnnnnnnnnnnnnnnnnnnnnnnnnnnnnnnnnnnnnnnnnnnnnnnnnnnnnnnnnnnnnnnnnnnnnnnnnnnnnnnnnnnnnnnnnnnnnnnnnnnnnnnnnnnnnnnnnnnnnnnnnnnnnnnnnnnnnnnnnnnnnnnnnnnnnnnnnnnnnnnnnnnnnnnnnnnnnnnnnnnnnnnnnnnnnnnnnnnnnnnnnnnnnnnnnnnnnnnnnnnnnnnnnnnnnnnnnnnnnnnnnnnnnnnnnnnnnnnnnnnnnnnnnnnnnnnnnnnnnnnnnnnnnnnnnnnnnnnnnnnnnnnnnnnnnnnnnnnnnnnnnnnnnnnnnnnnnnnnnnnnnnnnnnnnnnnnnnnnnnnnnnnnnnnnnnnnnnnnnnnnnnnnnnnnnnnnnnnnnnnnnnnnnnnnnnnnnnnnnnnnnnnnnnnnnnnnnnnnnnnnnnnnnnnnnnnnnnnnnnnnnnnnnnnnnnnnnnnnnnnnnnnnnnnnnnnnnnnnnnnnnnnnnnnnnnnnnnnnnnnnnnnnnnnnnnnnnnnnnnnnnnnnnnnnnnnnnnnnnnnnnnnnnnnnnnnnnnnnnnnnnnnnnnnnnnnnnnnnnnnnnnnnnnnnnnnnnnnnnnnnnnnnnnnnnnnnnnnnnnnnnnnnnnnnnnnnnnnnnnnnnnnnnnnnnnnnnnnnnnnnnnnnnnnnnnnnnnnnnnnnnnnnnnnnnnnnnnnnnnnnnnnnnnnnnnnnnnnnnnnnnnnnnnnnnnnnnnnnnnnnnnnnnnnnnnnnnnnnnnnnnnnnnnnnnnnnnnnnnnnnnnnnnnnnnnnnnnnnnnnnnnnnnnnnnnnnnnnnnnnnnnnnnnnnnnnnnnnnnnnnnnnnnnnnnnnnnnnnnnnnnnnnnnnnnnnnnnnnnnnnnnnnnnnnnnnnnnnnnnnnnnnnnnnnnnnnnnnnnnnnnnnnnnnnnnnnnnnnnnnnnnnnnnnnnnnnnnnnnnnnnnnnnnnnnnnnnnnnnnnnnnnnnnnnnnnnnnnnnnnnnnnnnnnnnnnnnnnnnnnnnnnnnnnnnnnnnnnnnnnnnnnnnnnnnnnnnnnnnnnnnnnnnnnnnnnnnnnnnnnnnnnnnnnnnnnnnnnnnnnnnnnnnnnnnnnnnnnnnnnnnnnnnnnnnnnnnnnnnnnnnnnnnnnnnnnnnnnnnnnnnnnnnnnnnnnnnnnnnnnnnnnnnnnnnnnnnnnnnnnnnnnnnnnnnnnnnnnnnnnnnnnnnnnnnnnnnnnnnnnnnnnnnnnnnnnnnnnnnnnnnnnnnnnnnnnnnnnnnnnnnnnnnnnnnnnnnnnnnnnnnnnnnnnnnnnnnnnnnnnnnnnnnnnnnnnnnnnnnnnnnnnnnnnnnnnnnnnnnnnnnnnnnnnnnnnnnnnnnnnnnnnnnnnnnnnnnnnnnnnnnnnnnnnnnnnnnnnnnnnnnnnnnnnnnnnnnnnnnnnnnnnnnnnnnnnnnnnnnnnnnnnnnnnnnnnnnnnnnnnnnnnnnnnnnnnnnnnnnnnnnnnnnnnnnnnnnnnnnnnnnnnnnnnnnnnnnnnnnnnnnnnnnnnnnnnnnnnnnnnnnnnnnnnnnnnnnnnnnnnnnnnnnnnnnnnnnnnnnnnnnnnnnnnnnnnnnnnnnnnnnnnnnnnnnnnnnnnnnnnnnnnnnnnnnnnnnnnnnnnnnnnnnnnnnnnnnnnnnnnnnnnnnnnnnnnnnnnnnnnnnnnnnnnnnnnnnnnnnnnnnnnnnnnnnnnnnnnnnnnnnnnnnnnnnnnnnnnnnnnnnnnnnnnnnnnnnnnnnnnnnnnnnnnnnnnnnnnnnnnnnnnnnnnnnnnnnnnnnnnnnnnnnnnnnnnnnnnnnnnnnnnnnnnnnnnnnnnnnnnnnnnnnnnnnnnnnnnnnnnnnnnnnnnnnnnnnnnnnnnnnnnnnnnnnnnnnnnnnnnnnnnnnnnnnnnnnnnnnnnnnnnnnnnnnnnnnnnnnnnnnnnnnnnnnnnnnnnnnnnnnnnnnnnnnnnnnnnnnnnnnnnnnnnnnnnnnnnnnnnnnnnnnnnnnnnnnnnnnnnnnnnnnnnnnnnnnnnnnnnnnnnnnnnnnnnnnnnnnnnnnnnnnnnnnnnnnnnnnnnnnnnnnnnnnnnnnnnnnnnnnnnnnnnnnnnnnnnnnnnnnnnnnnnnnnnnnnnnnnnnnnnnnnnnnnnnnnnnnnnnnnnnnnnnnnnnnnnnnnnnnnnnnnnnnnnnnnnnnnnnnnnnnnnnnnnnnnnnnnnnnnnnnnnnnnnnnnnnnnnnnnnnnnnnnnnnnnnnnnnnnnnnnnnnnnnnnnnnnnnnnnnnnnnnnnnnnnnnnnnnnnnnnnnnnnnnnnnnnnnnnnnnnnnnnnnnnnnnnnnnnnnnnnnnnnnnnnnnnnnnnnnnnnnnnnnnnnnnnnnnnnnnnnnnnnnnnnnnnnnnnnnnnnnnnnnnnnnnnnnnnnnnnnnnnnnnnnnnnnnnnnnnnnnnnnnnnnnnnnnnnnnnnnnnnnnnnnnnnnnnnnnnnnnnnnnnnnnnnnnnnnnnnnnnnnnnnnnnnnnnnnnnnnnnnnnnnnnnnnnnnnnnnnnnnnnnnnnnnnnnnnnnnnnnnnnnnnnnnnnnnnnnnnnnnnnnnnnnnnnnnnnnnnnnnnnnnnnnnnnnnnnnnnnnnnnnnnnnnnnnnnnnnnnnnnnnnnnnnnnnnnnnnnnnnnnnnnnnnnnnnnnnnnnnnnnnnnnnnnnnnnnnnnnnnnnnnnnnnnnnnnnnnnnnnnnnnnnnnnnnnnnnnnnnnnnnnnnnnnnnnnnnnnnnnnnnnnnnnnnnnnnnnnnnnnnnnnnnnnnnnnnnnnnnnnnnnnnnnnnnnnnnnnnnnnnnnnnnnnnnnnnnnnnnnnnnnnnnnnnnnnnnnnnnnnnnnnnnnnnnnnnnnnnnnnnnnnnnnnnnnnnnnnnnnnnnnnnnnnnnnnnnnnnnnnnnnnnnnnnnnnnnnnnnnnnnnnnnnnnnnnnnnnnnnnnnnnnnnnnnnnnnnnnnnnnnnnnnnnnnnnnnnnnnnnnnnnnnnnnnnnnnnnnnnnnnnnnnnnnnnnnnnnnnnnnnnnnnnnnnnnnnnnnnnnnnnnnnnnnnnnnnnnnnnnnnnnnnnnnnnnnnnnnnnnnnnnnnnnnnnnnnnnnnnnnnnnnnnnnnnnnnnnnnnnnnnnnnnnnnnnnnnnnnnnnnnnnnnnnnnnnnnnnnnnnnnnnnnnnnnnnnnnnnnnnnnnnnnnnnnnnnnnnnnnnnnnnnnnnnnnnnnnnnnnnnnnnnnnnnnnnnnnnnnnnnnnnnnnnnnnnnnnnnnnnnnnnnnnnnnnnnnnnnnnnnnnnnnnnnnnnnnnnnnnnnnnnnnnnnnnnnnnnnnnnnnnnnnnnnnnnnnnnnnnnnnnnnnnnnnnnnnnnnnnnnnnnnnnnnnnnnnnnnnnnnnnnnnnnnnnnnnnnnnnnnnnnnnnnnnnnnnnnnnnnnnnnnnnnnnnnnnnnnnnnnnnnnnnnnnnnnnnnnnnnnnnnnnnnnnnnnnnnnnnnnnnnnnnnnnnnnnnnnnnnnnnnnnnnnnnnnnnnnnnnnnnnnnnnnnnnnnnnnnnnnnnnnnnnnnnnnnnnnnnnnnnnnnnnnnnnnnnnnnnnnnnnnnnnnnnnnnnnnnnnnnnnnnnnnnnnnnnnnnnnnnnnnnnnnnnnnnnnnnnnnnnnnnnnnnnnnnnnnnnnnnnnnnnnnnnnnnnnnnnnnnnnnnnnnnnnnnnnnnnnnnnnnnnnnnnnnnnnnnnnnnnnnnnnnnnnnnnnnnnnnnnnnnnnnnnnnnnnnnnnnnnnnnnnnnnnnnnnnnnnnnnnnnnnnnnnnnnnnnnnnnnnnnnnnnnnnnnnnnnnnnnnnnnnnnnnnnnnnnnnnnnnnnnnnnnnnnnnnnnnnnnnnnnnnnnnnnnnnnnnnnnnnnnnnnnnnnnnnnnnnnnnnnnnnnnnnnnnnnnnnnnnnnnnnnnnnnnnnnnnnnnnnnnnnnnnnnnnnnnnnnnnnnnnnnnnnnnnnnnnnnnnnnnnnnnnnnnnnnnnnnnnnnnnnnnnnnnnnnnnnnnnnnnnnnnnnnnnnnnnnnnnnnnnnnnnnnnnnnnnnnnnnnnnnnnnnnnnnnnnnnnnnnnnnnnnnnnnnnnnnnnnnnnnnnnnnnnnnnnnnnnnnnnnnnnnnnnnnnnnnnnnnnnnnnnnnnnnnnnnnnnnnnnnnnnnnnnnnnnnnnnnnnnnnnnnnnnnnnnnnnnnnnnnnnnnnnnnnnnnnnnnnnnnnnnnnnnnnnnnnnnnnnnnnnnnnnnnnnnnnnnnnnnnnnnnnnnnnnnnnnnnnnnnnnnnnnnnnnnnnnnnnnnnnnnnnnnnnnnnnnnnnnnnnnnnnnnnnnnnnnnnnnnnnnnnnnnnnnnnnnnnnnnnnnnnnnnnnnnnnnnnnnnnnnnnnnnnnnnnnnnnnnnnnnnnnnnnnnnnnnnnnnnnnnnnnnnnnnnnnnnnnnnnnnnnnnnnnnnnnnnnnnnnnnnnnnnnnnnnnnnnnnnnnnnnnnnnnnnnnnnnnnnnnnnnnnnnnnnnnnnnnnnnnnnnnnnnnnnnnnnnnnnnnnnnnnnnnnnnnnnnnnnnnnnnnnnnnnnnnnnnnnnnnnnnnnnnnnnnnnnnnnnnnnnnnnnnnnnnnnnnnnnnnnnnnnnnnnnnnnnnnnnnnnnnnnnnnnnnnnnnnnnnnnnnnnnnnnnnnnnnnnnnnnnnnnnnnnnnnnnnnnnnnnnnnnnnnnnnnnnnnnnnnnnnnnnnnnnnnnnnnnnnnnnnnnnnnnnnnnnnnnnnnnnnnnnnnnnnnnnnnnnnnnnnnnnnnnnnnnnnnnnnnnnnnnnnnnnnnnnnnnnnnnnnnnnnnnnnnnnnnnnnnnnnnnnnnnnnnnnnnnnnnnnnnnnnnnnnnnnnnnnnnnnnnnnnnnnnnnnnnnnnnnnnnnnnnnnnnnnnnnnnnnnnnnnnnnnnnnnnnnnnnnnnnnnnnnnnnnnnnnnnnnnnnnnnnnnnnnnnnnnnnnnnnnnnnnnnnnnnnnnnnnnnnnnnnnnnnnnnnnnnnnnnnnnnnnnnnnnnnnnnnnnnnnnnnnnnnnnnnnnnnnnnnnnnnnnnnnnnnnnnnnnnnnnnnnnnnnnnnnnnnnnnnnnnnnnnnnnnnnnnnnnnnnnnnnnnnnnnnnnnnnnnnnnnnnnnnnnnnnnnnnnnnnnnnnnnnnnnnnnnnnnnnnnnnnnnnnnnnnnnnnnnnnnnnnnnnnnnnnnnnnnnnnnnnnnnnnnnnnnnnnnnnnnnnnnnnnnnnnnnnnnnnnnnnnnnnnnnnnnnnnnnnnnnnnnnnnnnnnnnnnnnnnnnnnnnnnnnnnnnnnnnnnnnnnnnnnnnnnnnnnnnnnnnnnnnnnnnnnnnnnnnnnnnnnnnnnnnnnnnnnnnnnnnnnnnnnnnnnnnnnnnnnnnnnnnnnnnnnnnnnnnnnnnnnnnnnnnnnnnnnnnnnnnnnnnnnnnnnnnnnnnnnnnnnnnnnnnnnnnnnnnnnnnnnnnnnnnnnnnnnnnnnnnnnnnnnnnnnnnnnnnnnnnnnnnnnnnnnnnnnnnnnnnnnnnnnnnnnnnnnnnnnnnnnnnnnnnnnnnnnnnnnnnnnnnnnnnnnnnnnnnnnnnnnnnnnnnnnnnnnnnnnnnnnnnnnnnnnnnnnnnnnnnnnnnnnnnnnnnnnnnnnnnnnnnnnnnnnnnnnnnnnnnnnnnnnnnnnnnnnnnnnnnnnnnnnnnnnnnnnnnnnnnnnnnnnnnnnnnnnnnnnnnnnnnnnnnnnnnnnnnnnnnnnnnnnnnnnnnnnnnnnnnnnnnnnnnnnnnnnnnnnnnnnnnnnnnnnnnnnnnnnnnnnnnnnnnnnnnnnnnnnnnnnnnnnnnnnnnnnnnnnnnnnnnnnnnnnnnnnnnnnnnnnnnnnnnnnnnnnnnnnnnnnnnnnnnnnnnnnnnnnnnnnnnnnnnnnnnnnnnnnnnnnnnnnnnnnnnnnnnnnnnnnnnnnnnnnnnnnnnnnnnnnnnnnnnnnnnnnnnnnnnnnnnnnnnnnnnnnnnnnnnnnnnnnnnnnnnnnnnnnnnnnnnnnnnnnnnnnnnnnnnnnnnnnnnnnnnnnnnnnnnnnnnnnnnnnnnnnnnnnnnnnnnnnnnnnnnnnnnnnnnnnnnnnnnnnnnnnnnnnnnnnnnnnnnnnnnnnnnnnnnnnnnnnnnnnnnnnnnnnnnnnnnnnnnnnnnnnnnnnnnnnnnnnnnnnnnnnnnnnnnnnnnnnnnnnnnnnnnnnnnnnnnnnnnnnnnnnnnnnnnnnnnnnnnnnnnnnnnnnnnnnnnnnnnnnnnnnnnnnnnnnnnnnnnnnnnnnnnnnnnnnnnnnnnnnnnnnnnnnnnnnnnnnnnnnnnnnnnnnnnnnnnnnnnnnnnnnnnnnnnnnnnnnnnnnnnnnnnnnnnnnnnnnnnnnnnnnnnnnnnnnnnnnnnnnnnnnnnnnnnnnnnnnnnnnnnnnnnnnnnnnnnnnnnnnnnnnnnnnnnnnnnnnnnnnnnnnnnnnnnnnnnnnnnnnnnnnnnnnnnnnnnnnnnnnnnnnnnnnnnnnnnnnnnnnnnnnnnnnnnnnnnnnnnnnnnnnnnnnnnnnnnnnnnnnnnnnnnnnnnnnnnnnnnnnnnnnnnnnnnnnnnnnnnnnnnnnnnnnnnnnnnnnnnnnnnnnnnnnnnnnnnnnnnnnnnnnnnnnnnnnnnnnnnnnnnnnnnnnnnnnnnnnnnnnnnnnnnnnnnnnnnnnnnnnnnnnnnnnnnnnnnnnnnnnnnnnnnnnnnnnnnnnnnnnnnnnnnnnnnnnnnnnnnnnnnnnnnnnnnnnnnnnnnnnnnnnnnnnnnnnnnnnnnnnnnnnnnnnnnnnnnnnnnnnnnnnnnnnnnnnnnnnnnnnnnnnnnnnnnnnnnnnnnnnnnnnnnnnnnnnnnnnnnnnnnnnnnnnnnnnnnnnnnnnnnnnnnnnnnnnnnnnnnnnnnnnnnnnnnnnnnnnnnnnnnnnnnnnnnnnnnnnnnnnnnnnnnnnnnnnnnnnnnnnnnnnnnnnnnnnnnnnnnnnnnnnnnnnnnnnnnnnnnnnnnnnnnnnnnnnnnnnnnnnnnnnnnnnnnnnnnnnnnnnnnnnnnnnnnnnnnnnnnnnnnnnnnnnnnnnnnnnnnnnnnnnnnnnnnnnnnnnnnnnnnnnnnnnnnnnnnnnnnnnnnnnnnnnnnnnnnnnnnnnnnnnnnnnnnnnnnnnnnnnnnnnnnnnnnnnnnnnnnnnnnnnnnnnnnnnnnnnnnnnnnnnnnnnnnnnnnnnnnnnnnnnnnnnnnnnnnnnnnnnnnnnnnnnnnnnnnnnnnnnnnnnnnnnnnnnnnnnnnnnnnnnnnnnnnnnnnnnnnnnnnnnnnnnnnnnnnnnnnnnnnnnnnnnnnnnnnnnnnnnnnnnnnnnnnnnnnnnnnnnnnnnnnnnnnnnnnnnnnnnnnnnnnnnnnnnnnnnnnnnnnnnnnnnnnnnnnnnnnnnnnnnnnnnnnnnnnnnnnnnnnnnnnnnnnnnnnnnnnnnnnnnnnnnnnnnnnnnnnnnnnnnnnnnnnnnnnnnnnnnnnnnnnnnnnnnnnnnnnnnnnnnnnnnnnnnnnnnnnnnnnnnnnnnnnnnnnnnnnnnnnnnnnnnnnnnnnnnnnnnnnnnnnnnnnnnnnnnnnnnnnnnnnnnnnnnnnnnnnnnnnnnnnnnnnnnnnnnnnnnnnnnnnnnnnnnnnnnnnnnnnnnnnnnnnnnnnnnnnnnnnnnnnnnnnnnnnnnnnnnnnnnnnnnnnnnnnnnnnnnnnnnnnnnnnnnnnnnnnnnnnnnnnnnnnnnnnnnnnnnnnnnnnnnnnnnnnnnnnnnnnnnnnnnnnnnnnnnnnnnnnnnnnnnnnnnnnnnnnnnnnnnnnnnnnnnnnnnnnnnnnnnnnnnnnnnnnnnnnnnnnnnnnnnnnnnnnnnnnnnnnnnnnnnnnnnnnnnnnnnnnnnnnnnnnnnnnnnnnnnnnnnnnnnnnnnnnnnnnnnnnnnnnnnnnnnnnnnnnnnnnnnnnnnnnnnnnnnnnnnnnnnnnnnnnnnnnnnnnnnnnnnnnnnnnnnnnnnnnnnnnnnnnnnnnnnnnnnnnnnnnnnnnnnnnnnnnnnnnnnnnnnnnnnnnnnnnnnnnnnnnnnnnnnnnnnnnnnnnnnnnnnnnnnnnnnnnnnnnnnnnnnnnnnnnnnnnnnnnnnnnnnnnnnnnnnnnnnnnnnnnnnnnnnnnnnnnnnnnnnnnnnnnnnnnnnnnnnnnnnnnnnnnnnnnnnnnnnnnnnnnnnnnnnnnnnnnnnnnnnnnnnnnnnnnnnnnnnnnnnnnnnnnnnnnnnnnnnnnnnnnnnnnnnnnnnnnnnnnnnnnnnnnnnnnnnnnnnnnnnnnnnnnnnnnnnnnnnnnnnnnnnnnnnnnnnnnnnnnnnnnnnnnnnnnnnnnnnnnnnnnnnnnnnnnnnnnnnnnnnnnnnnnnnnnnnnnnnnnnnnnnnnnnnnnnnnnnnnnnnnnnnnnnnnnnnnnnnnnnnnnnnnnnnnnnnnnnnnnnnnnnnnnnnnnnnnnnnnnnnnnnnnnnnnnnnnnnnnnnnnnnnnnnnnnnnnnnnnnnnnnnnnnnnnnnnnnnnnnnnnnnnnnnnnnnnnnnnnnnnnnnnnnnnnnnnnnnnnnnnnnnnnnnnnnnnnnnnnnnnnnnnnnnnnnnnnnnnnnnnnnnnnnnnnnnnnnnnnnnnnnnnnnnnnnnnnnnnnnnnnnnnnnnnnnnnnnnnnnnnnnnnnnnnnnnnnnnnnnnnnnnnnnnnnnnnnnnnnnnnnnnnnnnnnnnnnnnnnnnnnnnnnnnnnnnnnnnnnnnnnnnnnnnnnnnnnnnnnnnnnnnnnnnnnnnnnnnnnnnnnngctctatcacaaaatgccaggacgattgctcaagagagtttccaattcaccaaatgtcgcgtttgtgagtgccacgctctccattggtgggaagtttgatgactttcggcgcgcaatgggaatcactgcgcaaagttccttgtccgcgatcattgagccaagccatcacggaaccctgaagttctttcacgcagcgcatcaggtttcttctgaggagtggttatccgccacacaagaagcaatcaacaaagcgcagaagccttgcttggtggtcactccaagtagtgagttatctcagatgttgggtcggttgttcccacaggcgattgttcgcacggctgaagagaagactgctgacgcgatcctccgactcacagatgaaagaaatattctcatcgcctcagctgcttgggcgggattggacacgccgattgagtggaagagcattgtgattccgcgcattccgtttctgcgcccacaggtgattgacggaaatgtggagagcagcttctttgactcacgcaacagcgctattcgccgaatgcgccaagtgatcggtcgtggactacgcaagcctgatgctgagtgtgaggtctacattcttgacgaacgcttggcgatgattgagtcattcatcccgtcaagatttcagcaagcgtggaccgcgcgtggaagggtggaaggagcaagaactgaacatacgctgtcaaaagcagagcgggatccacaggtccgcaagtcagcgctgaagcactttggtcggcgatgtatgtcttgcgacttcgttccgcgagtggacagtcagcttgaggttcatcatcttcatcccctagcgaatggcggtgaacgaatcacacggatccaaacggatgtcgcggtgctgtgtgcgaactgtcatcgcttggctcattcggcgacaccacctctcacggttgaggttcttaggggacttcaccaatcagtggggtcggagcaatgagccgaagccacgcgaacgagagttccaaaagggttccaaaaccctccgtataccctcgcttacctagccgctcacgccgctaatagccctcgagatttgagcgtatgaaacgctgttccaacgccacaccgaagcgtctgactgatcctcttcggcgacattcccttcttgtagagctcaacgatggcggctctggtcgagtcagtcacgctacttggacgcccaagtttctttccttccttccgagctcgctcaacaccaatccgaatccgctcacgaatcagatcccgctcaaactcagcgaacgatgaaaacacaccgaacatcagctttcctgatggggtggtggtgtcgatcgcctgttggtggaagtagagctgaacgccttgagcgtgaaggtcgttcacggtggtcacaaggtgctgaagggaacgcccaagacggtcaatgctccacacggcgatcagatcgaattcgcggcgagtggcggctttcaagagaccatcgagagcagggcgctgatcgcgtcccttggcgcctgagataccatcgtcacgataggtcgcgacgatgttccacccacgaagggctgcgatccgttcgagttcgtggagttgattgtcggcggtttggtgagcggtggagacgcgaagatagagagcggtacgcatttaggagcctccaagtcgttgaattagtaacctagcctctaagaaaactctagcgtatgattcttgtcttagaaatcgctgaaacccgaataaattcaggctcttatatcgttctctaaaggggttccgaatcgagctagtctcgatagtcccaaggatgcggcgagtgtgaaaattaccacccgtaaaaccgcagcggagcaaacgcttcatatctacacacgggtcagcaccgcagctcaacgggatgacggaacatccttacagacgcaactagagcaaggtaccgctcgcgccaagcaacttgggctgaagactcgacattgggatgaaggcgggaaaagttctcaccacgaagatctagccgctcgacctacactcgctgctctctaccaagccatcaaggatggtggggtcaagcacctgttcgtttacgatcaatcgcggttgtcacgaaacgacaatgtcgcctcaatttttcgatatgaatgtaacaagcagggtgtcacgctttacacgaaagacggacgctttgatctctccaatcctcaggacaagtttctaaaacagattcttgatgggctttcggaatttgataacgcgattcgcgcggaacgcacacgactaggaaaactaaatcgcgcacgatcaggcgggtggcacggcggtccacctcctttcggctacaagctcgtagaccgtcggctcacaatcgagccaaaagaatcaaaatgggtgaagcgaatattctcagaagcgttcaatggacaaagcccacagaagatcaaacagctacttgactcaaactcagtcagtccgagaaggggtgggctttggacgattggttctgtggctgcgttactgaaaaactctcactacatcgggaactacacattcaaggatcgtaagtctgatgaactagtgaccgttacttgccccgcgatagttgaccccgacctgtggaaagctgttcacctcaaacgcaaacgacaaaacagtcgagcggctcagaaaaacccaactaagcacttttatcttttgcgcgatctgatgtattgcggtcactgtgggcgaccgatttcaggtagacaaaaaccgagtaagcgagagcaactttactactgtcctaacaaagagcgcgaatgggcaaagcagggcggaagcaaaaccaaatggaagcgaggtctgggttgtggaatgagtcgcgctctcaatattgctcagactgacgagctcgtctttagtgcggtcttgaacactcacgacaagtctcacttactcaaggagcaggtgaagcgaagtgtcttatcagaggatggcgcatctaccatcaagtccgctacggagattgaggcgctcaactcaaagatgcgtcggcttgaaaagcggttagaacaagctcgtggtcttctcggtatcgctgagggtcatcgtgatctaggtaagatgagcaaatcgcaattcgaatctcgacggaaggtcattgagtctgagattgagttggttgaaaccgagctgaacaacttgaaactttcaatcaagggtcagcaaacccacaaaaagtgggatgcttggataaagcagtttggcgaaatgattgcgtccaaaatgaccttgagtcaggaagcaaagaggcagtacatcgcgggtctgttagaccgcattgaggttcgttacctaaaggcgaatgacgctcacgaactcaggcttcagttccgtctccccatcgtgaacgaccaattccaccgtaagggcattcgtcggaaaggggattggtatgatttgggtgaagggacgagggatttgctcctgagagtggacaaaaacccgagtaaaaaacagggaaaagcacttgcccccgagcaaaaccagaccgctactgtcgaatgacggttagatgggcaccgcctcgaggtcgtattcatctgaacttgtgatctttacgcgagcgaactcaccaacggtgagtttttcgccctgcttaatgcgtacaacgccatcaat

SEQ ID NO: 146 - DNA, 13628 bp, Artificial Sequence
  Synthetic Oligonucleotide
  misc_feature (1)..(9974): n is a, c, g, or t
nnnnnnnnnnnnnnnnnnnnnnnnnnnnnnnnnnnnnnnnnnnnnnnnnnnnnnnnnnnnnnnnnnnnnnnnnnnnnnnnnnnnnnnnnnnnnnnnnnnnnnnnnnnnnnnnnnnnnnnnnnnnnnnnnnnnnnnnnnnnnnnnnnnnnnnnnnnnnnnnnnnnnnnnnnnnnnnnnnnnnnnnnnnnnnnnnnnnnnnnnnnnnnnnnnnnnnnnnnnnnnnnnnnnnnnnnnnnnnnnnnnnnnnnnnnnnnnnnnnnnnnnnnnnnnnnnnnnnnnnnnnnnnnnnnnnnnnnnnnnnnnnnnnnnnnnnnnnnnnnnnnnnnnnnnnnnnnnnnnnnnnnnnnnnnnnnnnnnnnnnnnnnnnnnnnnnnnnnnnnnnnnnnnnnnnnnnnnnnnnnnnnnnnnnnnnnnnnnnnnnnnnnnnnnnnnnnnnnnnnnnnnnnnnnnnnnnnnnnnnnnnnnnnnnnnnnnnnnnnnnnnnnnnnnnnnnnnnnnnnnnnnnnnnnnnnnnnnnnnnnnnnnnnnnnnnnnnnnnnnnnnnnnnnnnnnnnnnnnnnnnnnnnnnnnnnnnnnnnnnnnnnnnnnnnnnnnnnnnnnnnnnnnnnnnnnnnnnnnnnnnnnnnnnnnnnnnnnnnnnnnnnnnnnnnnnnnnnnnnnnnnnnnnnnnnnnnnnnnnnnnnnnnnnnnnnnnnnnnnnnnnnnnnnnnnnnnnnnnnnnnnnnnnnnnnnnnnnnnnnnnnnnnnnnnnnnnnnnnnnnnnnnnnnnnnnnnnnnnnnnnnnnnnnnnnnnnnnnnnnnnnnnnnnnnnnnnnnnnnnnnnnnnnnnnnnnnnnnnnnnnnnnnnnnnnnnnnnnnnnnnnnnnnnnnnnnnnnnnnnnnnnnnnnnnnnnnnnnnnnnnnnnnnnnnnnnnnnnnnnnnnnnnnnnnnnnnnnnnnnnnnnnnnnnnnnnnnnnnnnnnnnnnnnnnnnnnnnnnnnnnnnnnnnnnnnnnnnnnnnnnnnnnnnnnnnnnnnnnnnnnnnnnnnnnnnnnnnnnnnnnnnnnnnnnnnnnnnnnnnnnnnnnnnnnnnnnnnnnnnnnnnnnnnnnnnnnnnnnnnnnnnnnnnnnnnnnnnnnnnnnnnnnnnnnnnnnnnnnnnnnnnnnnnnnnnnnnnnnnnnnnnnnnnnnnnnnnnnnnnnnnnnnnnnnnnnnnnnnnnnnnnnnnnnnnnnnnnnnnnnnnnnnnnnnnnnnnnnnnnnnnnnnnnnnnnnnnnnnnnnnnnnnnnnnnnnnnnnnnnnnnnnnnnnnnnnnnnnnnnnnnnnnnnnnnnnnnnnnnnnnnnnnnnnnnnnnnnnnnnnnnnnnnnnnnnnnnnnnnnnnnnnnnnnnnnnnnnnnnnnnnnnnnnnnnnnnnnnnnnnnnnnnnnnnnnnnnnnnnnnnnnnnnnnnnnnnnnnnnnnnnnnnnnnnnnnnnnnnnnnnnnnnnnnnnnnnnnnnnnnnnnnnnnnnnnnnnnnnnnnnnnnnnnnnnnnnnnnnnnnnnnnnnnnnnnnnnnnnnnnnnnnnnnnnnnnnnnnnnnnnnnnnnnnnnnnnnnnnnnnnnnnnnnnnnnnnnnnnnnnnnnnnnnnnnnnnnnnnnnnnnnnnnnnnnnnnnnnnnnnnnnnnnnnnnnnnnnnnnnnnnnnnnnnnnnnnnnnnnnnnnnnnnnnnnnnnnnnnnnnnnnnnnnnnnnnnnnnnnnnnnnnnnnnnnnnnnnnnnnnnnnnnnnnnnnnnnnnnnnnnnnnnnnnnnnnnnnnnnnnnnnnnnnnnnnnnnnnnnnnnnnnnnnnnnnnnnnnnnnnnnnnnnnnnnnnnnnnnnnnnnnnnnnnnnnnnnnnnnnnnnnnnnnnnnnnnnnnnnnnnnnnnnnnnnnnnnnnnnnnnnnnnnnnnnnnnnnnnnnnnnnnnnnnnnnnnnnnnnnnnnnnnnnnnnnnnnnnnnnnnnnnnnnnnnnnnnnnnnnnnnnnnnnnnnnnnnnnnnnnnnnnnnnnnnnnnnnnnnnnnnnnnnnnnnnnnnnnnnnnnnnnnnnnnnnnnnnnnnnnnnnnnnnnnnnnnnnnnnnnnnnnnnnnnnnnnnnnnnnnnnnnnnnnnnnnnnnnnnnnnnnnnnnnnnnnnnnnnnnnnnnnnnnnnnnnnnnnnnnnnnnnnnnnnnnnnnnnnnnnnnnnnnnnnnnnnnnnnnnnnnnnnnnnnnnnnnnnnnnnnnnnnnnnnnnnnnnnnnnnnnnnnnnnnnnnnnnnnnnnnnnnnnnnnnnnnnnnnnnnnnnnnnnnnnnnnnnnnnnnnnnnnnnnnnnnnnnnnnnnnnnnnnnnnnnnnnnnnnnnnnnnnnnnnnnnnnnnnnnnnnnnnnnnnnnnnnnnnnnnnnnnnnnnnnnnnnnnnnnnnnnnnnnnnnnnnnnnnnnnnnnnnnnnnnnnnnnnnnnnnnnnnnnnnnnnnnnnnnnnnnnnnnnnnnnnnnnnnnnnnnnnnnnnnnnnnnnnnnnnnnnnnnnnnnnnnnnnnnnnnnnnnnnnnnnnnnnnnnnnnnnnnnnnnnnnnnnnnnnnnnnnnnnnnnnnnnnnnnnnnnnnnnnnnnnnnnnnnnnnnnnnnnnnnnnnnnnnnnnnnnnnnnnnnnnnnnnnnnnnnnnnnnnnnnnnnnnnnnnnnnnnnnnnnnnnnnnnnnnnnnnnnnnnnnnnnnnnnnnnnnnnnnnnnnnnnnnnnnnnnnnnnnnnnnnnnnnnnnnnnnnnnnnnnnnnnnnnnnnnnnnnnnnnnnnnnnnnnnnnnnnnnnnnnnnnnnnnnnnnnnnnnnnnnnnnnnnnnnnnnnnnnnnnnnnnnnnnnnnnnnnnnnnnnnnnnnnnnnnnnnnnnnnnnnnnnnnnnnnnnnnnnnnnnnnnnnnnnnnnnnnnnnnnnnnnnnnnnnnnnnnnnnnnnnnnnnnnnnnnnnnnnnnnnnnnnnnnnnnnnnnnnnnnnnnnnnnnnnnnnnnnnnnnnnnnnnnnnnnnnnnnnnnnnnnnnnnnnnnnnnnnnnnnnnnnnnnnnnnnnnnnnnnnnnnnnnnnnnnnnnnnnnnnnnnnnnnnnnnnnnnnnnnnnnnnnnnnnnnnnnnnnnnnnnnnnnnnnnnnnnnnnnnnnnnnnnnnnnnnnnnnnnnnnnnnnnnnnnnnnnnnnnnnnnnnnnnnnnnnnnnnnnnnnnnnnnnnnnnnnnnnnnnnnnnnnnnnnnnnnnnnnnnnnnnnnnnnnnnnnnnnnnnnnnnnnnnnnnnnnnnnnnnnnnnnnnnnnnnnnnnnnnnnnnnnnnnnnnnnnnnnnnnnnnnnnnnnnnnnnnnnnnnnnnnnnnnnnnnnnnnnnnnnnnnnnnnnnnnnnnnnnnnnnnnnnnnnnnnnnnnnnnnnnnnnnnnnnnnnnnnnnnnnnnnnnnnnnnnnnnnnnnnnnnnnnnnnnnnnnnnnnnnnnnnnnnnnnnnnnnnnnnnnnnnnnnnnnnnnnnnnnnnnnnnnnnnnnnnnnnnnnnnnnnnnnnnnnnnnnnnnnnnnnnnnnnnnnnnnnnnnnnnnnnnnnnnnnnnnnnnnnnnnnnnnnnnnnnnnnnnnnnnnnnnnnnnnnnnnnnnnnnnnnnnnnnnnnnnnnnnnnnnnnnnnnnnnnnnnnnnnnnnnnnnnnnnnnnnnnnnnnnnnnnnnnnnnnnnnnnnnnnnnnnnnnnnnnnnnnnnnnnnnnnnnnnnnnnnnnnnnnnnnnnnnnnnnnnnnnnnnnnnnnnnnnnnnnnnnnnnnnnnnnnnnnnnnnnnnnnnnnnnnnnnnnnnnnnnnnnnnnnnnnnnnnnnnnnnnnnnnnnnnnnnnnnnnnnnnnnnnnnnnnnnnnnnnnnnnnnnnnnnnnnnnnnnnnnnnnnnnnnnnnnnnnnnnnnnnnnnnnnnnnnnnnnnnnnnnnnnnnnnnnnnnnnnnnnnnnnnnnnnnnnnnnnnnnnnnnnnnnnnnnnnnnnnnnnnnnnnnnnnnnnnnnnnnnnnnnnnnnnnnnnnnnnnnnnnnnnnnnnnnnnnnnnnnnnnnnnnnnnnnnnnnnnnnnnnnnnnnnnnnnnnnnnnnnnnnnnnnnnnnnnnnnnnnnnnnnnnnnnnnnnnnnnnnnnnnnnnnnnnnnnnnnnnnnnnnnnnnnnnnnnnnnnnnnnnnnnnnnnnnnnnnnnnnnnnnnnnnnnnnnnnnnnnnnnnnnnnnnnnnnnnnnnnnnnnnnnnnnnnnnnnnnnnnnnnnnnnnnnnnnnnnnnnnnnnnnnnnnnnnnnnnnnnnnnnnnnnnnnnnnnnnnnnnnnnnnnnnnnnnnnnnnnnnnnnnnnnnnnnnnnnnnnnnnnnnnnnnnnnnnnnnnnnnnnnnnnnnnnnnnnnnnnnnnnnnnnnnnnnnnnnnnnnnnnnnnnnnnnnnnnnnnnnnnnnnnnnnnnnnnnnnnnnnnnnnnnnnnnnnnnnnnnnnnnnnnnnnnnnnnnnnnnnnnnnnnnnnnnnnnnnnnnnnnnnnnnnnnnnnnnnnnnnnnnnnnnnnnnnnnnnnnnnnnnnnnnnnnnnnnnnnnnnnnnnnnnnnnnnnnnnnnnnnnnnnnnnnnnnnnnnnnnnnnnnnnnnnnnnnnnnnnnnnnnnnnnnnnnnnnnnnnnnnnnnnnnnnnnnnnnnnnnnnnnnnnnnnnnnnnnnnnnnnnnnnnnnnnnnnnnnnnnnnnnnnnnnnnnnnnnnnnnnnnnnnnnnnnnnnnnnnnnnnnnnnnnnnnnnnnnnnnnnnnnnnnnnnnnnnnnnnnnnnnnnnnnnnnnnnnnnnnnnnnnnnnnnnnnnnnnnnnnnnnnnnnnnnnnnnnnnnnnnnnnnnnnnnnnnnnnnnnnnnnnnnnnnnnnnnnnnnnnnnnnnnnnnnnnnnnnnnnnnnnnnnnnnnnnnnnnnnnnnnnnnnnnnnnnnnnnnnnnnnnnnnnnnnnnnnnnnnnnnnnnnnnnnnnnnnnnnnnnnnnnnnnnnnnnnnnnnnnnnnnnnnnnnnnnnnnnnnnnnnnnnnnnnnnnnnnnnnnnnnnnnnnnnnnnnnnnnnnnnnnnnnnnnnnnnnnnnnnnnnnnnnnnnnnnnnnnnnnnnnnnnnnnnnnnnnnnnnnnnnnnnnnnnnnnnnnnnnnnnnnnnnnnnnnnnnnnnnnnnnnnnnnnnnnnnnnnnnnnnnnnnnnnnnnnnnnnnnnnnnnnnnnnnnnnnnnnnnnnnnnnnnnnnnnnnnnnnnnnnnnnnnnnnnnnnnnnnnnnnnnnnnnnnnnnnnnnnnnnnnnnnnnnnnnnnnnnnnnnnnnnnnnnnnnnnnnnnnnnnnnnnnnnnnnnnnnnnnnnnnnnnnnnnnnnnnnnnnnnnnnnnnnnnnnnnnnnnnnnnnnnnnnnnnnnnnnnnnnnnnnnnnnnnnnnnnnnnnnnnnnnnnnnnnnnnnnnnnnnnnnnnnnnnnnnnnnnnnnnnnnnnnnnnnnnnnnnnnnnnnnnnnnnnnnnnnnnnnnnnnnnnnnnnnnnnnnnnnnnnnnnnnnnnnnnnnnnnnnnnnnnnnnnnnnnnnnnnnnnnnnnnnnnnnnnnnnnnnnnnnnnnnnnnnnnnnnnnnnnnnnnnnnnnnnnnnnnnnnnnnnnnnnnnnnnnnnnnnnnnnnnnnnnnnnnnnnnnnnnnnnnnnnnnnnnnnnnnnnnnnnnnnnnnnnnnnnnnnnnnnnnnnnnnnnnnnnnnnnnnnnnnnnnnnnnnnnnnnnnnnnnnnnnnnnnnnnnnnnnnnnnnnnnnnnnnnnnnnnnnnnnnnnnnnnnnnnnnnnnnnnnnnnnnnnnnnnnnnnnnnnnnnnnnnnnnnnnnnnnnnnnnnnnnnnnnnnnnnnnnnnnnnnnnnnnnnnnnnnnnnnnnnnnnnnnnnnnnnnnnnnnnnnnnnnnnnnnnnnnnnnnnnnnnnnnnnnnnnnnnnnnnnnnnnnnnnnnnnnnnnnnnnnnnnnnnnnnnnnnnnnnnnnnnnnnnnnnnnnnnnnnnnnnnnnnnnnnnnnnnnnnnnnnnnnnnnnnnnnnnnnnnnnnnnnnnnnnnnnnnnnnnnnnnnnnnnnnnnnnnnnnnnnnnnnnnnnnnnnnnnnnnnnnnnnnnnnnnnnnnnnnnnnnnnnnnnnnnnnnnnnnnnnnnnnnnnnnnnnnnnnnnnnnnnnnnnnnnnnnnnnnnnnnnnnnnnnnnnnnnnnnnnnnnnnnnnnnnnnnnnnnnnnnnnnnnnnnnnnnnnnnnnnnnnnnnnnnnnnnnnnnnnnnnnnnnnnnnnnnnnnnnnnnnnnnnnnnnnnnnnnnnnnnnnnnnnnnnnnnnnnnnnnnnnnnnnnnnnnnnnnnnnnnnnnnnnnnnnnnnnnnnnnnnnnnnnnnnnnnnnnnnnnnnnnnnnnnnnnnnnnnnnnnnnnnnnnnnnnnnnnnnnnnnnnnnnnnnnnnnnnnnnnnnnnnnnnnnnnnnnnnnnnnnnnnnnnnnnnnnnnnnnnnnnnnnnnnnnnnnnnnnnnnnnnnnnnnnnnnnnnnnnnnnnnnnnnnnnnnnnnnnnnnnnnnnnnnnnnnnnnnnnnnnnnnnnnnnnnnnnnnnnnnnnnnnnnnnnnnnnnnnnnnnnnnnnnnnnnnnnnnnnnnnnnnnnnnnnnnnnnnnnnnnnnnnnnnnnnnnnnnnnnnnnnnnnnnnnnnnnnnnnnnnnnnnnnnnnnnnnnnnnnnnnnnnnnnnnnnnnnnnnnnnnnnnnnnnnnnnnnnnnnnnnnnnnnnnnnnnnnnnnnnnnnnnnnnnnnnnnnnnnnnnnnnnnnnnnnnnnnnnnnnnnnnnnnnnnnnnnnnnnnnnnnnnnnnnnnnnnnnnnnnnnnnnnnnnnnnnnnnnnnnnnnnnnnnnnnnnnnnnnnnnnnnnnnnnnnnnnnnnnnnnnnnnnnnnnnnnnnnnnnnnnnnnnnnnnnnnnnnnnnnnnnnnnnnnnnnnnnnnnnnnnnnnnnnnnnnnnnnnnnnnnnnnnnnnnnnnnnnnnnnnnnnnnnnnnnnnnnnnnnnnnnnnnnnnnnnnnnnnnnnnnnnnnnnnnnnnnnnnnnnnnnnnnnnnnnnnnnnnnnnnnnnnnnnnnnnnnnnnnnnnnnnnnnnnnnnnnnnnnnnnnnnnnnnnnnnnnnnnnnnnnnnnnnnnnnnnnnnnnnnnnnnnnnnnnnnnnnnnnnnnnnnnnnnnnnnnnnnnnnnnnnnnnnnnnnnnnnnnnnnnnnnnnnnnnnnnnnnnnnnnnnnnnnnnnnnnnnnnnnnnnnnnnnnnnnnnnnnnnnnnnnnnnnnnnnnnnnnnnnnnnnnnnnnnnnnnnnnnnnnnnnnnnnnnnnnnnnnnnnnnnnnnnnnnnnnnnnnnnnnnnnnnnnnnnnnnnnnnnnnnnnnnnnnnnnnnnnnnnnnnnnnnnnnnnnnnnnnnnnnnnnnnnnnnnnnnnnnnnnnnnnnnnnnnnnnnnnnnnnnnnnnnnnnnnnnnnnnnnnnnnnnnnnnnnnnnnnnnnnnnnnnnnnnnnnnnnnnnnnnnnnnnnnnnnnnnnnnnnnnnnnnnnnnnnnnnnnnnnnnnnnnnnnnnnnnnnnnnnnnnnnnnnnnnnnnnnnnnnnnnnnnnnnnnnnnnnnnnnnnnnnnnnnnnnnnnnnnnnnnnnnnnnnnnnnnnnnnnnnnnnnnnnnnnnnnnnnnnnnnnnnnnnnnnnnnnnnnnnnnnnnnnnnnnnnnnnnnnnnnnnnnnnnnnnnnnnnnnnnnnnnnnnnnnnnnnnnnnnnnnnnnnnnnnnnnnnnnnnnnnnnnnnnnnnnnnnnnnnnnnnnnnnnnnnnnnnnnnnnnnnnnnnnnnnnnnnnnnnnnnnnnnnnnnnnnnnnnnnnnnnnnnnnnnnnnnnnnnnnnnnnnnnnnnnnnnnnnnnnnnnnnnnnnnnnnnnnnnnnnnnnnnnnnnnnnnnnnnnnnnnnnnnnnnnnnnnnnnnnnnnnnnnnnnnnnnnnnnnnnnnnnnnnnnnnnnnnnnnnnnnnnnnnnnnnnnnnnnnnnnnnnnnnnnnnnnnnnnnnnnnnnnnnnnnnnnnnnnnnnnnnnnnnnnnnnnnnnnnnnnnnnnnnnnnnnnnnnnnnnnnnnnnnnnnnnnnnnnnnnnnnnnnnnnnnnnnnnnnnnnnnnnnnnnnnnnnnnnnnnnnnnnnnnnnnnnnnnnnnnnnnnnnnnnnnnnnnnnnnnnnnnnnnnnnnnnnnnnnnnnnnnnnnnnnnnnnnnnnnnnnnnnnnnnnnnnnnnnnnnnnnnnnnnnnnnnnnnnnnnnnnnnnnnnnnnnnnnnnnnnnnnnnnnnnnnnnnnnnnnnnnnnnnnnnnnnnnnnnnnnnnnnnnnnnnnnnnnnnnnnnnnnnnnnnnnnnnnnnnnnnnnnnnnnnnnnnnnnnnnnnnnnnnnnnnnnnnnnnnnnnnnnnnnnnnnnnnnnnnnnnnnnnnnnnnnnnnnnnnnnnnnnnnnnnnnnnnnnnnnnnnnnnnnnnnnnnnnnnnnnnnnnnnnnnnnnnnnnnnnnnnnnnnnnnnnnnnnnnnnnnnnnnnnnnnnnnnnnnnnnnnnnnnnnnnnnnnnnnnnnnnnnnnnnnnnnnnnnnnnnnnnnnnnnnnnnnnnnnnnnnnnnnnnnnnnnnnnnnnnnnnnnnnnnnnnnnnnnnnnnnnnnnnnnnnnnnnnnnnnnnnnnnnnnnnnnnnnnnnnnnnnnnnnnnnnnnnnnnnnnnnnnnnnnnnnnnnnnnnnnnnnnnnnnnnnnnnnnnnnnnnnnnnnnnnnnnnnnnnnnnnnnnnnnnnnnnnnnnnnnnnnnnnnnnnnnnnnnnnnnnnnnnnnnnnnnnnnnnnnnnnnnnnnnnnnnnnnnnnnnnnnnnnnnnnnnnnnnnnnnnnnnnnnnnnnnnnnnnnnnnnnnnnnnnnnnnnnnnnnnnnnnnnnnnnnnnnnnnnnnnnnnnnnnnnnnnnnnnnnnnnnnnnnnnnnnnnnnnnnnnnnnnnnnnnnnnnnnnnnnnnnnnnnnnnnnnnnnnnnnnnnnnnnnnnnnnnnnnnnnnnnnnnnnnnnnnnnnnnnnnnnnnnnnnnnnnnnnnnnnnnnnnnnnnnnnnnnnnnnnnnnnnnnnnnnnnnnnnnnnnnnnnnnnnnnnnnnnnnnnnnnnnnnnnnnnnnnnnnnnnnnnnnnnnnnnnnnnnnnnnnnnnnnnnnnnnnnnnnnnnnnnnnnnnnnnnnnnnnnnnnnnnnnnnnnnnnnnnnnnnnnnnnnnnnnnnnnnnnnnnnnnnnnnnnnnnnnnnnnnnnnnnnnnnnnnnnnnnnnnnnnnnnnnnnnnnnnnnnnnnnnnnnnnnnnnnnnnnnnnnnnnnnnnnnnnnnnnnnnnnnnnnnnnnnnnnnnnnnnnnnnnnnnnnnnnnnnnnnnnnnnnnnnnnnnnnnnnnnnnnnnnnnnnnnnnnnnnnnnnnnnnnnnnnnnnnnnnnnnnnnnnnnnnnnnnnnnnnnnnnnnnnnnnnnnnnnnnnnnnnnnnnnnnnnnnnnnnnnnnnnnnnnnnnnnnnnnnnnnnnnnnnnnnnnnnnnnnnnnnnnnnnnnnnnnnnnnnnnnnnnnnnnnnnnnnnnnnnnnnnnnnnnnnnnnnnnnnnnnnnnnnnnnnnnnnnnnnnnnnnnnnnnnnnnnnnnnnnnnnnnnnnnnnnnnnnnnnnnnnnnnnnnnnnnnnnnnnnnnnnnnnnnnnnnnnnnnnnnnnnnnnnnnnnnnnnnnnnnnnnnnnnnnnnnnnnnnnnnnnnnnnnnnnnnnnnnnnnnnnnnnnnnnnnnnnnnnnnnnnnnnnnnnnnnnnnnnnnnnnnnnnnnnnnnnnnnnnnnnnnnnnnnnnnnnnnnnnnnnnnnnnnnnnnnnnnnnnnnnnnnnnnnnnnnnnnnnnnnnnnnnnnnnnnnnnnnnnnnnnnnnnnnnnnnnnnnnnnnnnnnnnnnnnnnnnnnnnnnnnnnnnnnnnnngctctatcacaaaatgccaggacgattgctcaagagagtttccaattcaccaaatgtcgcgtttgtgagtgccacgctctccattggtgggaagtttgatgactttcggcgcgcaatgggaatcactgcgcaaagttccttgtccgcgatcattgagccaagccatcacggaaccctgaagttctttcacgcagcgcatcaggtttcttctgaggagtggttatccgccacacaagaagcaatcaacaaagcgcagaagccttgcttggtggtcactccaagtagtgagttatctcagatgttgggtcggttgttcccacaggcgattgttcgcacggctgaagagaagactgctgacgcgatcctccgactcacagatgaaagaaatattctcatcgcctcagctgcttgggcgggattggacacgccgattgagtggaagagcattgtgattccgcgcattccgtttctgcgcccacaggtgattgacggaaatgtggagagcagcttctttgactcacgcaacagcgctattcgccgaatgcgccaagtgatcggtcgtggactacgcaagcctgatgctgagtgtgaggtctacattcttgacgaacgcttggcgatgattgagtcattcatcccgtcaagatttcagcaagcgtggaccgcgcgtggaagggtggaaggagcaagaactgaacatacgctgtcaaaagcagagcgggatccacaggtccgcaagtcagcgctgaagcactttggtcggcgatgtatgtcttgcgacttcgttccgcgagtggacagtcagcttgaggttcatcatcttcatcccctagcgaatggcggtgaacgaatcacacggatccaaacggatgtcgcggtgctgtgtgcgaactgtcatcgcttggctcattcggcgacaccacctctcacggttgaggttcttaggggacttcaccaatcagtggggtcggagcaatgagccgaagccacgcgaacgagagttccaaaagggttccaaaaccctccgtataccctcgcttacctagccgctcacgccgctaatagccctcgagatttgagcgtatgaaacgctgttccaacgccacaccgaagcgtctgactgatcctcttcggcgacattcccttcttgtagagctcaacgatggcggctctggtcgagtcagtcacgctacttggacgcccaagtttctttccttccttccgagctcgctcaacaccaatccgaatccgctcacgaatcagatcccgctcaaactcagcgaacgatgaaaacacaccgaacatcagctttcctgatggggtggtggtgtcgatcgcctgttggtggaagtagagctgaacgccttgagcgtgaaggtcgttcacggtggtcacaaggtgctgaagggaacgcccaagacggtcaatgctccacacggcgatcagatcgaattcgcggcgagtggcggctttcaagagaccatcgagagcagggcgctgatcgcgtcccttggcgcctgagataccatcgtcacgataggtcgcgacgatgttccacccacgaagggctgcgatccgttcgagttcgtggagttgattgtcggcggtttggtgagcggtggagacgcgaagatagagagcggtacgcatttaggagcctccaagtcgttgaattagtaacctagcctctaagaaaactctagcgtatgattcttgtcttagaaatcgctgaaacccgaataaattcaggctcttatatcgttctctaaaggggttccgaatcgagctagtctcgatagtcccaaggatgcggcgagtgtgaaaattaccacccgtaaaaccgcagcggagcaaacgcttcatatctacacacgggtcagcaccgcagctcaacgggatgacggaacatccttacagacgcaactagagcaaggtaccgctcgcgccaagcaacttgggctgaagactcgacattgggatgaaggcgggaaaagttctcaccacgaagatctagccgctcgacctacactcgctgctctctaccaagccatcaaggatggtggggtcaagcacctgttcgtttacgatcaatcgcggttgtcacgaaacgacaatgtcgcctcaatttttcgatatgaatgtaacaagcagggtgtcacgctttacacgaaagacggacgctttgatctctccaatcctcaggacaagtttctaaaacagattcttgatgggctttcggaatttgataacgcgattcgcgcggaacgcacacgactaggaaaactaaatcgcgcacgatcaggcgggtggcacggcggtccacctcctttcggctacaagctcgtagaccgtcggctcacaatcgagccaaaagaatcaaaatgggtgaagcgaatattctcagaagcgttcaatggacaaagcccacagaagatcaaacagctacttgactcaaactcagtcagtccgagaaggggtgggctttggacgattggttctgtggctgcgttactgaaaaactctcactacatcgggaactacacattcaaggatcgtaagtctgatgaactagtgaccgttacttgccccgcgatagttgaccccgacctgtggaaagctgttcacctcaaacgcaaacgacaaaacagtcgagcggctcagaaaaacccaactaagcacttttatcttttgcgcgatctgatgtattgcggtcactgtgggcgaccgatttcaggtagacaaaaaccgagtaagcgagagcaactttactactgtcctaacaaagagcgcgaatgggcaaagcagggcggaagcaaaaccaaatggaagcgaggtctgggttgtggaatgagtcgcgctctcaatattgctcagactgacgagctcgtctttagtgcggtcttgaacactcacgacaagtctcacttactcaaggagcaggtgaagcgaagtgtcttatcagaggatggcgcatctaccatcaagtccgctacggagattgaggcgctcaactcaaagatgcgtcggcttgaaaagcggttagaacaagctcgtggtcttctcggtatcgctgagggtcatcgtgatctaggtaagatgagcaaatcgcaattcgaatctcgacggaaggtcattgagtctgagattgagttggttgaaaccgagctgaacaacttgaaactttcaatcaagggtcagcaaacccacaaaaagtgggatgcttggataaagcagtttggcgaaatgattgcgtccaaaatgaccttgagtcaggaagcaaagaggcagtacatcgcgggtctgttagaccgcattgaggttcgttacctaaaggcgaatgacgctcacgaactcaggcttcagttccgtctccccatcgtgaacgaccaattccaccgtaagggcattcgtcggaaaggggattggtatgatttgggtgaagggacgagggatttgctcctgagagtggacaaaaacccgagtaaaaaacagggaaaagcacttgcccccgagcaaaaccagaccgctactgtcgaatgacggttagatgggcaccgcctcgaggtcgtattcatctgaacttgtgatctttacgcgagcgaactcaccaacggtgagtttttcgccctgcttaatgcgtacaacgccatcaat

SEQ ID NO: 147 - DNA, 13620 bp, Artificial Sequence
  Synthetic Oligonucleotide
  misc_feature (1)..(7605): n is a, c, g, or t
nnnnnnnnnnnnnnnnnnnnnnnnnnnnnnnnnnnnnnnnnnnnnnnnnnnnnnnnnnnnnnnnnnnnnnnnnnnnnnnnnnnnnnnnnnnnnnnnnnnnnnnnnnnnnnnnnnnnnnnnnnnnnnnnnnnnnnnnnnnnnnnnnnnnnnnnnnnnnnnnnnnnnnnnnnnnnnnnnnnnnnnnnnnnnnnnnnnnnnnnnnnnnnnnnnnnnnnnnnnnnnnnnnnnnnnnnnnnnnnnnnnnnnnnnnnnnnnnnnnnnnnnnnnnnnnnnnnnnnnnnnnnnnnnnnnnnnnnnnnnnnnnnnnnnnnnnnnnnnnnnnnnnnnnnnnnnnnnnnnnnnnnnnnnnnnnnnnnnnnnnnnnnnnnnnnnnnnnnnnnnnnnnnnnnnnnnnnnnnnnnnnnnnnnnnnnnnnnnnnnnnnnnnnnnnnnnnnnnnnnnnnnnnnnnnnnnnnnnnnnnnnnnnnnnnnnnnnnnnnnnnnnnnnnnnnnnnnnnnnnnnnnnnnnnnnnnnnnnnnnnnnnnnnnnnnnnnnnnnnnnnnnnnnnnnnnnnnnnnnnnnnnnnnnnnnnnnnnnnnnnnnnnnnnnnnnnnnnnnnnnnnnnnnnnnnnnnnnnnnnnnnnnnnnnnnnnnnnnnnnnnnnnnnnnnnnnnnnnnnnnnnnnnnnnnnnnnnnnnnnnnnnnnnnnnnnnnnnnnnnnnnnnnnnnnnnnnnnnnnnnnnnnnnnnnnnnnnnnnnnnnnnnnnnnnnnnnnnnnnnnnnnnnnnnnnnnnnnnnnnnnnnnnnnnnnnnnnnnnnnnnnnnnnnnnnnnnnnnnnnnnnnnnnnnnnnnnnnnnnnnnnnnnnnnnnnnnnnnnnnnnnnnnnnnnnnnnnnnnnnnnnnnnnnnnnnnnnnnnnnnnnnnnnnnnnnnnnnnnnnnnnnnnnnnnnnnnnnnnnnnnnnnnnnnnnnnnnnnnnnnnnnnnnnnnnnnnnnnnnnnnnnnnnnnnnnnnnnnnnnnnnnnnnnnnnnnnnnnnnnnnnnnnnnnnnnnnnnnnnnnnnnnnnnnnnnnnnnnnnnnnnnnnnnnnnnnnnnnnnnnnnnnnnnnnnnnnnnnnnnnnnnnnnnnnnnnnnnnnnnnnnnnnnnnnnnnnnnnnnnnnnnnnnnnnnnnnnnnnnnnnnnnnnnnnnnnnnnnnnnnnnnnnnnnnnnnnnnnnnnnnnnnnnnnnnnnnnnnnnnnnnnnnnnnnnnnnnnnnnnnnnnnnnnnnnnnnnnnnnnnnnnnnnnnnnnnnnnnnnnnnnnnnnnnnnnnnnnnnnnnnnnnnnnnnnnnnnnnnnnnnnnnnnnnnnnnnnnnnnnnnnnnnnnnnnnnnnnnnnnnnnnnnnnnnnnnnnnnnnnnnnnnnnnnnnnnnnnnnnnnnnnnnnnnnnnnnnnnnnnnnnnnnnnnnnnnnnnnnnnnnnnnnnnnnnnnnnnnnnnnnnnnnnnnnnnnnnnnnnnnnnnnnnnnnnnnnnnnnnnnnnnnnnnnnnnnnnnnnnnnnnnnnnnnnnnnnnnnnnnnnnnnnnnnnnnnnnnnnnnnnnnnnnnnnnnnnnnnnnnnnnnnnnnnnnnnnnnnnnnnnnnnnnnnnnnnnnnnnnnnnnnnnnnnnnnnnnnnnnnnnnnnnnnnnnnnnnnnnnnnnnnnnnnnnnnnnnnnnnnnnnnnnnnnnnnnnnnnnnnnnnnnnnnnnnnnnnnnnnnnnnnnnnnnnnnnnnnnnnnnnnnnnnnnnnnnnnnnnnnnnnnnnnnnnnnnnnnnnnnnnnnnnnnnnnnnnnnnnnnnnnnnnnnnnnnnnnnnnnnnnnnnnnnnnnnnnnnnnnnnnnnnnnnnnnnnnnnnnnnnnnnnnnnnnnnnnnnnnnnnnnnnnnnnnnnnnnnnnnnnnnnnnnnnnnnnnnnnnnnnnnnnnnnnnnnnnnnnnnnnnnnnnnnnnnnnnnnnnnnnnnnnnnnnnnnnnnnnnnnnnnnnnnnnnnnnnnnnnnnnnnnnnnnnnnnnnnnnnnnnnnnnnnnnnnnnnnnnnnnnnnnnnnnnnnnnnnnnnnnnnnnnnnnnnnnnnnnnnnnnnnnnnnnnnnnnnnnnnnnnnnnnnnnnnnnnnnnnnnnnnnnnnnnnnnnnnnnnnnnnnnnnnnnnnnnnnnnnnnnnnnnnnnnnnnnnnnnnnnnnnnnnnnnnnnnnnnnnnnnnnnnnnnnnnnnnnnnnnnnnnnnnnnnnnnnnnnnnnnnnnnnnnnnnnnnnnnnnnnnnnnnnnnnnnnnnnnnnnnnnnnnnnnnnnnnnnnnnnnnnnnnnnnnnnnnnnnnnnnnnnnnnnnnnnnnnnnnnnnnnnnnnnnnnnnnnnnnnnnnnnnnnnnnnnnnnnnnnnnnnnnnnnnnnnnnnnnnnnnnnnnnnnnnnnnnnnnnnnnnnnnnnnnnnnnnnnnnnnnnnnnnnnnnnnnnnnnnnnnnnnnnnnnnnnnnnnnnnnnnnnnnnnnnnnnnnnnnnnnnnnnnnnnnnnnnnnnnnnnnnnnnnnnnnnnnnnnnnnnnnnnnnnnnnnnnnnnnnnnnnnnnnnnnnnnnnnnnnnnnnnnnnnnnnnnnnnnnnnnnnnnnnnnnnnnnnnnnnnnnnnnnnnnnnnnnnnnnnnnnnnnnnnnnnnnnnnnnnnnnnnnnnnnnnnnnnnnnnnnnnnnnnnnnnnnnnnnnnnnnnnnnnnnnnnnnnnnnnnnnnnnnnnnnnnnnnnnnnnnnnnnnnnnnnnnnnnnnnnnnnnnnnnnnnnnnnnnnnnnnnnnnnnnnnnnnnnnnnnnnnnnnnnnnnnnnnnnnnnnnnnnnnnnnnnnnnnnnnnnnnnnnnnnnnnnnnnnnnnnnnnnnnnnnnnnnnnnnnnnnnnnnnnnnnnnnnnnnnnnnnnnnnnnnnnnnnnnnnnnnnnnnnnnnnnnnnnnnnnnnnnnnnnnnnnnnnnnnnnnnnnnnnnnnnnnnnnnnnnnnnnnnnnnnnnnnnnnnnnnnnnnnnnnnnnnnnnnnnnnnnnnnnnnnnnnnnnnnnnnnnnnnnnnnnnnnnnnnnnnnnnnnnnnnnnnnnnnnnnnnnnnnnnnnnnnnnnnnnnnnnnnnnnnnnnnnnnnnnnnnnnnnnnnnnnnnnnnnnnnnnnnnnnnnnnnnnnnnnnnnnnnnnnnnnnnnnnnnnnnnnnnnnnnnnnnnnnnnnnnnnnnnnnnnnnnnnnnnnnnnnnnnnnnnnnnnnnnnnnnnnnnnnnnnnnnnnnnnnnnnnnnnnnnnnnnnnnnnnnnnnnnnnnnnnnnnnnnnnnnnnnnnnnnnnnnnnnnnnnnnnnnnnnnnnnnnnnnnnnnnnnnnnnnnnnnnnnnnnnnnnnnnnnnnnnnnnnnnnnnnnnnnnnnnnnnnnnnnnnnnnnnnnnnnnnnnnnnnnnnnnnnnnnnnnnnnnnnnnnnnnnnnnnnnnnnnnnnnnnnnnnnnnnnnnnnnnnnnnnnnnnnnnnnnnnnnnnnnnnnnnnnnnnnnnnnnnnnnnnnnnnnnnnnnnnnnnnnnnnnnnnnnnnnnnnnnnnnnnnnnnnnnnnnnnnnnnnnnnnnnnnnnnnnnnnnnnnnnnnnnnnnnnnnnnnnnnnnnnnnnnnnnnnnnnnnnnnnnnnnnnnnnnnnnnnnnnnnnnnnnnnnnnnnnnnnnnnnnnnnnnnnnnnnnnnnnnnnnnnnnnnnnnnnnnnnnnnnnnnnnnnnnnnnnnnnnnnnnnnnnnnnnnnnnnnnnnnnnnnnnnnnnnnnnnnnnnnnnnnnnnnnnnnnnnnnnnnnnnnnnnnnnnnnnnnnnnnnnnnnnnnnnnnnnnnnnnnnnnnnnnnnnnnnnnnnnnnnnnnnnnnnnnnnnnnnnnnnnnnnnnnnnnnnnnnnnnnnnnnnnnnnnnnnnnnnnnnnnnnnnnnnnnnnnnnnnnnnnnnnnnnnnnnnnnnnnnnnnnnnnnnnnnnnnnnnnnnnnnnnnnnnnnnnnnnnnnnnnnnnnnnnnnnnnnnnnnnnnnnnnnnnnnnnnnnnnnnnnnnnnnnnnnnnnnnnnnnnnnnnnnnnnnnnnnnnnnnnnnnnnnnnnnnnnnnnnnnnnnnnnnnnnnnnnnnnnnnnnnnnnnnnnnnnnnnnnnnnnnnnnnnnnnnnnnnnnnnnnnnnnnnnnnnnnnnnnnnnnnnnnnnnnnnnnnnnnnnnnnnnnnnnnnnnnnnnnnnnnnnnnnnnnnnnnnnnnnnnnnnnnnnnnnnnnnnnnnnnnnnnnnnnnnnnnnnnnnnnnnnnnnnnnnnnnnnnnnnnnnnnnnnnnnnnnnnnnnnnnnnnnnnnnnnnnnnnnnnnnnnnnnnnnnnnnnnnnnnnnnnnnnnnnnnnnnnnnnnnnnnnnnnnnnnnnnnnnnnnnnnnnnnnnnnnnnnnnnnnnnnnnnnnnnnnnnnnnnnnnnnnnnnnnnnnnnnnnnnnnnnnnnnnnnnnnnnnnnnnnnnnnnnnnnnnnnnnnnnnnnnnnnnnnnnnnnnnnnnnnnnnnnnnnnnnnnnnnnnnnnnnnnnnnnnnnnnnnnnnnnnnnnnnnnnnnnnnnnnnnnnnnnnnnnnnnnnnnnnnnnnnnnnnnnnnnnnnnnnnnnnnnnnnnnnnnnnnnnnnnnnnnnnnnnnnnnnnnnnnnnnnnnnnnnnnnnnnnnnnnnnnnnnnnnnnnnnnnnnnnnnnnnnnnnnnnnnnnnnnnnnnnnnnnnnnnnnnnnnnnnnnnnnnnnnnnnnnnnnnnnnnnnnnnnnnnnnnnnnnnnnnnnnnnnnnnnnnnnnnnnnnnnnnnnnnnnnnnnnnnnnnnnnnnnnnnnnnnnnnnnnnnnnnnnnnnnnnnnnnnnnnnnnnnnnnnnnnnnnnnnnnnnnnnnnnnnnnnnnnnnnnnnnnnnnnnnnnnnnnnnnnnnnnnnnnnnnnnnnnnnnnnnnnnnnnnnnnnnnnnnnnnnnnnnnnnnnnnnnnnnnnnnnnnnnnnnnnnnnnnnnnnnnnnnnnnnnnnnnnnnnnnnnnnnnnnnnnnnnnnnnnnnnnnnnnnnnnnnnnnnnnnnnnnnnnnnnnnnnnnnnnnnnnnnnnnnnnnnnnnnnnnnnnnnnnnnnnnnnnnnnnnnnnnnnnnnnnnnnnnnnnnnnnnnnnnnnnnnnnnnnnnnnnnnnnnnnnnnnnnnnnnnnnnnnnnnnnnnnnnnnnnnnnnnnnnnnnnnnnnnnnnnnnnnnnnnnnnnnnnnnnnnnnnnnnnnnnnnnnnnnnnnnnnnnnnnnnnnnnnnnnnnnnnnnnnnnnnnnnnnnnnnnnnnnnnnnnnnnnnnnnnnnnnnnnnnnnnnnnnnnnnnnnnnnnnnnnnnnnnnnnnnnnnnnnnnnnnnnnnnnnnnnnnnnnnnnnnnnnnnnnnnnnnnnnnnnnnnnnnnnnnnnnnnnnnnnnnnnnnnnnnnnnnnnnnnnnnnnnnnnnnnnnnnnnnnnnnnnnnnnnnnnnnnnnnnnnnnnnnnnnnnnnnnnnnnnnnnnnnnnnnnnnnnnnnnnnnnnnnnnnnnnnnnnnnnnnnnnnnnnnnnnnnnnnnnnnnnnnnnnnnnnnnnnnnnnnnnnnnnnnnnnnnnnnnnnnnnnnnnnnnnnnnnnnnnnnnnnnnnnnnnnnnnnnnnnnnnnnnnnnnnnnnnnnnnnnnnnnnnnnnnnnnnnnnnnnnnnnnnnnnnnnnnnnnnnnnnnnnnnnnnnnnnnnnnnnnnnnnnnnnnnnnnnnnnnnnnnnnnnnnnnnnnnnnnnnnnnnnnnnnnnnnnnnnnnnnnnnnnnnnnnnnnnnnnnnnnnnnnnnnnnnnnnnnnnnnnnnnnnnnnnnnnnnnnnnnnnnnnnnnnnnnnnnnnnnnnnnnnnnnnnnnnnnnnnnnnnnnnnnnnnnnnnnnnnnnnnnnnnnnnnnnnnnnnnnnnnnnnnnnnnnnnnnnnnnnnnnnnnnnnnnnnnnnnnnnnnnnnnnnnnnnnnnnnnnnnnnnnnnnnnnnnnnnnnnnnnnnnnnnnnnnnnnnnnnnnnnnnnnnnnnnnnnnnnnnnnnnnnnnnnnnnnnnnnnnnnnnnnnnnnnnnnnnnnnnnnnnnnnnnnnnnnnnnnnnnnnnnnnnnnnnnnnnnnnnnnnnnnnnnnnnnnnnnnnnnnnnnnnnnnnnnnnnnnnnnnnnnnnnnnnnnnnnnnnnnnnnnnnnnnnnnnnnnnnnnnnnnnnnnnnnnnnnnnnnnnnnnnnnnnnnnnnnnnnnnnnnnnnnnnnnnnnnnnnnnnnnnnnnnnnnnnnnnnnnnnnnnnnnnnnnnnnnnnnnnnnnnnnnnnnnnnnnnnnnnnnnnnnnnnnnnnnnnnnnnnnnnnnnnnnnnnnnnnnnnnnnnnnnnnnnnnnnnnnnnnnnnnnnnnnnnnnnnnnnnnnnnnnnnnnnnnnnnnnnnnnnnnnnnnnnnnnnnnnnnnnnnnnnnnnnnnnnnnnnnnnnnnnnnnnnnnnnnnnnnnnnnnnnnnnnnnnnnnnnnnnnnnnnnnnnnnnnnnnnnnnnnnnnnnnnnnnnnnnnnnnnnnnnnnnnnnnnnnnnnnnnnnnnnnnnnnnnnnnnnnnnnnnnnnnnnnnnnnnnnnnnnnnnnnnnnnnnnnnnnnnnnnnnnnnnnnnnnnnnnnnnnnnnnnnnnnnnnnnnnnnnnnnnnnnnnnnnnnnnnnnnnnnnnnnnnnnnnnnnnnnnnnnnnnnnnnnnnnnnnnnnnnnnnnnnnnnnnnnnnnnnnnnnnnnnnnnnnnnnnnnnnnnnnnnnnnnnnnnnnnnnnnnnnnnnnnnnnnnnnnnnnnnnnnnnnnnnnnnnnnnnnnnnnnnnnnnnnnnnnnnnnnnnnnnnnnnnnnnnnnnnnnnnnnnnnnnnnnnnnnnnnnnnnnnnnnnnnnnnnnnnnnnnnnnnnnnnnnnnnnnnnnnnnnnnnnnnnnnnnnnnnnnnnnnnnnnnnnnnnnnnnnnnnnnnnnnnnnnnnnnnnnnnnnnnnnnnnnnnnnnnnnnnnnnnnnnnnnnnnnnnnnnnnnnnnnnnnnnnnnnnnnnnnnnnnnnnnnnnnnnnnnnnnnnnnnnnnnnnnnnnnnnnnnnnnnnnnnnnnnnnnnnnnnnnnnnnnnnnnnnnnnnnnnnnnnnnnnnnnnnnnnnnnnnnnnnnnnnnnnnnnnnnnnnnnnnnnnnnnnnnnnnnnnnnnnnnnnnnnnnnnnnnnnnnnnnnnnnnnnnnnnnnnnnnnnnnnnnnnnnnnnnnnnnnnnnnnnnnnnnnnnnnnnnnnnnnnnnnnnnnnnnnnnnnnnnnnnnnnnnnnnnnnnnnnnnnnnnnnnnnnnnnnnnnnnnnnnnnnnnnnnnnnnnnnnnnnnnnnnnnnnnnnnnnnnnnnnnnnnnnnnnnnnnnnnnnnnnnnnnnnnnnnnnnnnnnnnnnnnnnnnnnnnnnnnnnnnnnnnnnnnnnnnnnnnnnnnnnnnnnnnnnnnnnnnnnnnnnnnnnnnnnnnnnnnnnnnnnnnnnnnnnnnnnnnnnnnnnnnnnnnnnnnnnnnnnnnnnnnnnnnnnnnnnnnnnnnnnnnnnnnnnnnnnnnnnnnnnnnnnnnnnnnnnnacctgctcctatgcgagcaggagttgtacttcgcaagtgccgggatcatggccgtcgggggcgcagcacaaaccgcctcatttgtggcgagcatgcggcccgagcacacatctgagtggcttgacgtcgtggcgcccaacaccgtcaacaccgatctgaccattccgagtagtgccaaggggcgtgcccgttacaacgacctgaggatcggcctgtccaggcagcgcgagtgcggcaacgtcatcagcagttacaccgctgtctcaggtgattcagtcgagtggtacgccacgggtgatgcacatgctgtcctcgatgcggtcaagtacgttccgttcataggcaaacgccgtgccgcaggctatggtgaggtggaaggctgggaggttgaggagggcgagcttgacggggtctgcggattcctgggggaaccattgcggccagttcctgtttcgcgctgggtccatggcggtaactggataccagttgaagctgcctggaaggctccgtactgggacgttcgtaaccgtgccaagtgcttcgttccggagatcgcatgaacggtgcagagttcttcatgaagcacgctggctatcgcctgctatcagccggcatgagcaccggggatgcagtcgacgatgcacggtcgctgttttccatctccttgcccctgaacacaggctcgacgctgaggctgtcgtcatgctggatggtggtgactccgcaatgggtggccacaagcttcaaagcattaccggaaactggattccgttcggggggtgatcgcgctggcgcaatcctggaggcgttgaggtcaggtgaaccctgtctgattctggctttggggaaacgctccctggagcctcgtgacctgtttgtgacctacgaccctcgggccacccgcatgtgctcagaaggcaccaccaagacctttgacgccacgaaggagaagtggtggacctcctgatcaacaaacctgcaagcgttcgtggctacgccctgcaccgtctggttgcagagtacctccaaggccgccctgcactgtgggcggatgaaggtggccaagtccgaatacgaccacgagacgccacgcctcctgcgtacgtcgccggcaccctgctggggttcaccgtccgcgcctgcgtttcacacagcaccaagaaccgccaccactatctgcctgtgggcgactggcgggggcgccgcacatggcttgaggccaaagctgcgccgaatgggttcgaggtggttgctgttcatgtcagtggtgacatggcactgatcgaagcacatgacggacgccgtttcacggtggacgcaaccgatttcactggcttgctgcgcgtgacagacccgcaggccttttctcgatgtcttgtcacgggggtgggcaaggttggcaaggcattcggcctgggcctgctcatcgtgcagtgatccattcacctgggaggacctacaaatgaatccggcattcatcctggccgatgtgctcatccatacggtccagccgctgacctacacccaccacagcgtcaaggatttgccgctgatgacccggggcgtcgatgcggaagggcgcctccaacggaccgtgtacctgcctgcaggccaattcagaggccgtttgcgccatgaagccgccatgtcggcactgcgcgccaagcctgagaaggtcagacttgaagacgcatatctcctggcgctgggccaggatctcgcccggcaagaagaagacgagcccgaggcagtgcgactcggtgaccagatcaagttccggcaagacaaccctctgctggacctgtttggcacctggaaagttgccagccgcctgtttgtttctcatctcatgccacaggtgaacgtcatgcccgaccgggtcagccacatcaggcgcgatctcgacagcagcgaggacttgatgggcatgctggcgggtgaagagcaggaccgcatgtatgaccgacaggccaaacaggcactggcctccaaagccgggactctgatcaagctggcggagggagaactcagggcggcacgtaaggcaaaggacacggcgctcattgatcagcttgaattgaagctgaaggaacttgaagaactgaagaagcagcacaagggggaagacgactccgacaacaccaagcacctcgtggagttgcaggtgattccggcaggaattgatctgctgggcaagatcaccgtacaagcgccacgacaaacagacatcgggttccttatccaggcacttcagggtgtgagcatgaagccgttgatgggtgcgcagcgcgctcgtggatgcggtgaaattcgaggccgagcatcgtttcgcatcccagatggcgaggtgctggcgaatgttgagttcggcggttttcagcctgcgaaggtcgaatggacggcggcgggccaagccttcatgggcccagtggcagcctgaacgttgcctgtgtgaacttccgcagcgcagagcaaaaggcctatgcccgcctgatcgaaggtgcgctgaagcctggaccacccctgctggctggggcagcaccgggtctgggcaagacacacgggttcaccttgcccttggtggcaagcgggcgccgcgttgcggtggccatgagcacccgtcaactcatccagcagtacctgacctgtgatgccatgcgcgctgcacaagcgctgcgccccgtgagcgtggttgcgcttcaaacccgccgagacttcagcaatgacgcctcctacagagcacacagggctgcggcgatgcaggctgacgtactggtggtcacccatgcggctgcgctgatcgacagttggcacccaggttacgcagacctgcgttcccgtgacgtggtggtgtttgatgaagcggacctgctggctgacgcagccgaccttcgcagcaccttcagcatcgatgcagaagttcaggaggaatgcggcgctgacaaactgggcctgctccaggctgtgcaggcggtaaagcagaaggcctcggcgacggaggatcgtgcagcagcgtcggccatcctctatgcgctggagcatccggcttggtacaaggttgtgggccgtgaagaagacgacactttgacgctgaagcacaggatgccggggcgaatgctgcgtcgtttggtcgaggaggcgccgcgttgcatcttcaccagcggaacgctgcaggtgggtggccgtttcgatcacttcgtgcaggcagtcggcttgaagtcgatggcgcccgagagccggcacattgacccggtaaaccatggtgacctgagggtggaactcgctgctgaagacatgagtccgcagcagatggcgctgcgcatccaggcagcagagcggcctgttctggtactgacgacgagtcatgccaccacacaaaccctgggcgagttgtgcacaggttcagtctggcgtgcgcagggcgaaacgctcggtgatgcattgaacggtgtgccagacgatggcatcttcatcgcagcaggtgcttggtcggggttggatgccccgcgcctgcggtggcgtaccgtggtgattccgaagactccctaccagaggccagccatcctggatgggcagcaggtcacgcggtatctggactcacgggtggtggctatccggcgtacaactcaaggcctgcaccgaggtctgagaacacctgacgcccgctgcaccctcatgctgcttgacccgcgcagcggtcgggatgaacttcgtgaagccatacctgcacggttccgggtggattggcagagttttgacgagggctcgccaaggatgcgtgcccatgtggcgggcgagaggcatcccgccctgcgtaacgctgccctgaaggcgctgggggcgcattgcagtcaccctggctgtcaagtcacggccctgcacctcctggacgtccatcacctgaaaccagttgctgaagggcagcgcaaaaccagcttggctgacatcgccgtgctttgcaaaaaccatcacgccgaggcccatcaccagatgcggcaggccgaaattcctgaggtcaaggaggaaggatcctgaacggaatcaagcacttgaaagaattgagatcaagccgcctgttagatgggcggttactggaacgtccaatcaggcgcgcggaacacgtgctttgatcaagccgcctgttagatgggcggttactggaacatgcaccacggcgcgcccctaagcccgcccgatcaagccgcctgttagatgggcggttactggaacgtgcctgctgccctgctgccggtatggaaggatcaagccgcctgttggatgggcggttactggaacaggaagtcgtccacgcctgccagcttgtggatcaagccgcctgttggatgggcggttactggaactacaaggtcaacgcagccgctacgttcggcgatcaagccgcctgttaggtgggcggttactggagcatcgatgacaagattgctgggcgcgcacacggggaacatgcaactgtaggttcggccatttctggcggagcccagatcaagttcagccatctgtcgatctgctcaggaattggccttccctgttcatctcgctcaacatggtgcaaccagaccgtgccttcggatgcagctaccttcatggtgtcggggctaaccagcccgcatgaaacaagtgttctgtgcatggcctagatcgtcgcgagatgacatatctggcgcaatcacccattggggaggtcaaagccccggaggccccggctcatcatctgtcccaggctcacgctcccacaaactgcatccatcagccggcatagcccttacttgggctgccccaggtgctctacatcgtgctgcgctgccaccgaaggccatggcatcgaaatggacgcaatgccagcatggccggcgttcgcagcgccaggggctgaagtgctcaatgaactgcatgccaatcatcttggcggtgcggtggctcagcaggtgatccagtctgaacacagtgcgactctgacaccgtcggcgatccctgatggcgccagcacgggcagatcattgcgctgtccgctcaaggcgatgcccatcgcaagttaagcccctgcctgcttgccctgggatcgctgtaaggcggcctgcgcgcccgtatcatcggaaacaggccgcgccccatgccgatctaagaccggtcatctccttggcccatcaaggccatcgcgcggtccacgagttcaccgggtgtcatcgacaacgcagtagccaatcgaaagatgagcgccaagctgggtgagtgggtgccgcgctcaatcttgcccatgtgagagcgctccacttgagccgcactcgccaactcttcctgggagattcccatctcctggcggcggcttctgatcaccgccccaaaggcttgcgccggcagcgggtcgaacgttttcgccccaagtggtctgcctgctctcggacgtcgacgctcctgcatttggcaagagcttgtcgatgtgagagactttaaaccacgttaaagataacccaaaagcgataagttgctactgacccttagcacacggagtgaaccatgaaccgcaagacagtttccttggcaatggtgaccgttcttcttctgatctcaggctgcgccacgcccgagcagcgttaccggcaagagcaacagcggatcgcagcccaaagggcggctgccgagaacctcaggcgagaccttgagagtaggtgccgtggatatggattccagcccggaacaaccccatttgcacaatgcttgatgcaactcgatcaggcggttcggcaagccgcggccgctcagcaggctcggaagcagcaggagggtcgatgttcagatatccaggcgcaggcctgcttgacgcctggaagaagtgactgcttcaccgcctaccaagcttgtatggccggcctcccaccccagcaaccgataaacataacttgtcgactcgttgggagcaatcaggtgcgctgcttcaacctttaacctgcttgattagaagcccgcctcagcagactcgtccagtgagccactgag

SEQ ID NO: 148 - DNA, 13551 bp, Artificial Sequence
  Synthetic Oligonucleotide
  misc_feature (1)..(9970): n is a, c, g, or t
nnnnnnnnnnnnnnnnnnnnnnnnnnnnnnnnnnnnnnnnnnnnnnnnnnnnnnnnnnnnnnnnnnnnnnnnnnnnnnnnnnnnnnnnnnnnnnnnnnnnnnnnnnnnnnnnnnnnnnnnnnnnnnnnnnnnnnnnnnnnnnnnnnnnnnnnnnnnnnnnnnnnnnnnnnnnnnnnnnnnnnnnnnnnnnnnnnnnnnnnnnnnnnnnnnnnnnnnnnnnnnnnnnnnnnnnnnnnnnnnnnnnnnnnnnnnnnnnnnnnnnnnnnnnnnnnnnnnnnnnnnnnnnnnnnnnnnnnnnnnnnnnnnnnnnnnnnnnnnnnnnnnnnnnnnnnnnnnnnnnnnnnnnnnnnnnnnnnnnnnnnnnnnnnnnnnnnnnnnnnnnnnnnnnnnnnnnnnnnnnnnnnnnnnnnnnnnnnnnnnnnnnnnnnnnnnnnnnnnnnnnnnnnnnnnnnnnnnnnnnnnnnnnnnnnnnnnnnnnnnnnnnnnnnnnnnnnnnnnnnnnnnnnnnnnnnnnnnnnnnnnnnnnnnnnnnnnnnnnnnnnnnnnnnnnnnnnnnnnnnnnnnnnnnnnnnnnnnnnnnnnnnnnnnnnnnnnnnnnnnnnnnnnnnnnnnnnnnnnnnnnnnnnnnnnnnnnnnnnnnnnnnnnnnnnnnnnnnnnnnnnnnnnnnnnnnnnnnnnnnnnnnnnnnnnnnnnnnnnnnnnnnnnnnnnnnnnnnnnnnnnnnnnnnnnnnnnnnnnnnnnnnnnnnnnnnnnnnnnnnnnnnnnnnnnnnnnnnnnnnnnnnnnnnnnnnnnnnnnnnnnnnnnnnnnnnnnnnnnnnnnnnnnnnnnnnnnnnnnnnnnnnnnnnnnnnnnnnnnnnnnnnnnnnnnnnnnnnnnnnnnnnnnnnnnnnnnnnnnnnnnnnnnnnnnnnnnnnnnnnnnnnnnnnnnnnnnnnnnnnnnnnnnnnnnnnnnnnnnnnnnnnnnnnnnnnnnnnnnnnnnnnnnnnnnnnnnnnnnnnnnnnnnnnnnnnnnnnnnnnnnnnnnnnnnnnnnnnnnnnnnnnnnnnnnnnnnnnnnnnnnnnnnnnnnnnnnnnnnnnnnnnnnnnnnnnnnnnnnnnnnnnnnnnnnnnnnnnnnnnnnnnnnnnnnnnnnnnnnnnnnnnnnnnnnnnnnnnnnnnnnnnnnnnnnnnnnnnnnnnnnnnnnnnnnnnnnnnnnnnnnnnnnnnnnnnnnnnnnnnnnnnnnnnnnnnnnnnnnnnnnnnnnnnnnnnnnnnnnnnnnnnnnnnnnnnnnnnnnnnnnnnnnnnnnnnnnnnnnnnnnnnnnnnnnnnnnnnnnnnnnnnnnnnnnnnnnnnnnnnnnnnnnnnnnnnnnnnnnnnnnnnnnnnnnnnnnnnnnnnnnnnnnnnnnnnnnnnnnnnnnnnnnnnnnnnnnnnnnnnnnnnnnnnnnnnnnnnnnnnnnnnnnnnnnnnnnnnnnnnnnnnnnnnnnnnnnnnnnnnnnnnnnnnnnnnnnnnnnnnnnnnnnnnnnnnnnnnnnnnnnnnnnnnnnnnnnnnnnnnnnnnnnnnnnnnnnnnnnnnnnnnnnnnnnnnnnnnnnnnnnnnnnnnnnnnnnnnnnnnnnnnnnnnnnnnnnnnnnnnnnnnnnnnnnnnnnnnnnnnnnnnnnnnnnnnnnnnnnnnnnnnnnnnnnnnnnnnnnnnnnnnnnnnnnnnnnnnnnnnnnnnnnnnnnnnnnnnnnnnnnnnnnnnnnnnnnnnnnnnnnnnnnnnnnnnnnnnnnnnnnnnnnnnnnnnnnnnnnnnnnnnnnnnnnnnnnnnnnnnnnnnnnnnnnnnnnnnnnnnnnnnnnnnnnnnnnnnnnnnnnnnnnnnnnnnnnnnnnnnnnnnnnnnnnnnnnnnnnnnnnnnnnnnnnnnnnnnnnnnnnnnnnnnnnnnnnnnnnnnnnnnnnnnnnnnnnnnnnnnnnnnnnnnnnnnnnnnnnnnnnnnnnnnnnnnnnnnnnnnnnnnnnnnnnnnnnnnnnnnnnnnnnnnnnnnnnnnnnnnnnnnnnnnnnnnnnnnnnnnnnnnnnnnnnnnnnnnnnnnnnnnnnnnnnnnnnnnnnnnnnnnnnnnnnnnnnnnnnnnnnnnnnnnnnnnnnnnnnnnnnnnnnnnnnnnnnnnnnnnnnnnnnnnnnnnnnnnnnnnnnnnnnnnnnnnnnnnnnnnnnnnnnnnnnnnnnnnnnnnnnnnnnnnnnnnnnnnnnnnnnnnnnnnnnnnnnnnnnnnnnnnnnnnnnnnnnnnnnnnnnnnnnnnnnnnnnnnnnnnnnnnnnnnnnnnnnnnnnnnnnnnnnnnnnnnnnnnnnnnnnnnnnnnnnnnnnnnnnnnnnnnnnnnnnnnnnnnnnnnnnnnnnnnnnnnnnnnnnnnnnnnnnnnnnnnnnnnnnnnnnnnnnnnnnnnnnnnnnnnnnnnnnnnnnnnnnnnnnnnnnnnnnnnnnnnnnnnnnnnnnnnnnnnnnnnnnnnnnnnnnnnnnnnnnnnnnnnnnnnnnnnnnnnnnnnnnnnnnnnnnnnnnnnnnnnnnnnnnnnnnnnnnnnnnnnnnnnnnnnnnnnnnnnnnnnnnnnnnnnnnnnnnnnnnnnnnnnnnnnnnnnnnnnnnnnnnnnnnnnnnnnnnnnnnnnnnnnnnnnnnnnnnnnnnnnnnnnnnnnnnnnnnnnnnnnnnnnnnnnnnnnnnnnnnnnnnnnnnnnnnnnnnnnnnnnnnnnnnnnnnnnnnnnnnnnnnnnnnnnnnnnnnnnnnnnnnnnnnnnnnnnnnnnnnnnnnnnnnnnnnnnnnnnnnnnnnnnnnnnnnnnnnnnnnnnnnnnnnnnnnnnnnnnnnnnnnnnnnnnnnnnnnnnnnnnnnnnnnnnnnnnnnnnnnnnnnnnnnnnnnnnnnnnnnnnnnnnnnnnnnnnnnnnnnnnnnnnnnnnnnnnnnnnnnnnnnnnnnnnnnnnnnnnnnnnnnnnnnnnnnnnnnnnnnnnnnnnnnnnnnnnnnnnnnnnnnnnnnnnnnnnnnnnnnnnnnnnnnnnnnnnnnnnnnnnnnnnnnnnnnnnnnnnnnnnnnnnnnnnnnnnnnnnnnnnnnnnnnnnnnnnnnnnnnnnnnnnnnnnnnnnnnnnnnnnnnnnnnnnnnnnnnnnnnnnnnnnnnnnnnnnnnnnnnnnnnnnnnnnnnnnnnnnnnnnnnnnnnnnnnnnnnnnnnnnnnnnnnnnnnnnnnnnnnnnnnnnnnnnnnnnnnnnnnnnnnnnnnnnnnnnnnnnnnnnnnnnnnnnnnnnnnnnnnnnnnnnnnnnnnnnnnnnnnnnnnnnnnnnnnnnnnnnnnnnnnnnnnnnnnnnnnnnnnnnnnnnnnnnnnnnnnnnnnnnnnnnnnnnnnnnnnnnnnnnnnnnnnnnnnnnnnnnnnnnnnnnnnnnnnnnnnnnnnnnnnnnnnnnnnnnnnnnnnnnnnnnnnnnnnnnnnnnnnnnnnnnnnnnnnnnnnnnnnnnnnnnnnnnnnnnnnnnnnnnnnnnnnnnnnnnnnnnnnnnnnnnnnnnnnnnnnnnnnnnnnnnnnnnnnnnnnnnnnnnnnnnnnnnnnnnnnnnnnnnnnnnnnnnnnnnnnnnnnnnnnnnnnnnnnnnnnnnnnnnnnnnnnnnnnnnnnnnnnnnnnnnnnnnnnnnnnnnnnnnnnnnnnnnnnnnnnnnnnnnnnnnnnnnnnnnnnnnnnnnnnnnnnnnnnnnnnnnnnnnnnnnnnnnnnnnnnnnnnnnnnnnnnnnnnnnnnnnnnnnnnnnnnnnnnnnnnnnnnnnnnnnnnnnnnnnnnnnnnnnnnnnnnnnnnnnnnnnnnnnnnnnnnnnnnnnnnnnnnnnnnnnnnnnnnnnnnnnnnnnnnnnnnnnnnnnnnnnnnnnnnnnnnnnnnnnnnnnnnnnnnnnnnnnnnnnnnnnnnnnnnnnnnnnnnnnnnnnnnnnnnnnnnnnnnnnnnnnnnnnnnnnnnnnnnnnnnnnnnnnnnnnnnnnnnnnnnnnnnnnnnnnnnnnnnnnnnnnnnnnnnnnnnnnnnnnnnnnnnnnnnnnnnnnnnnnnnnnnnnnnnnnnnnnnnnnnnnnnnnnnnnnnnnnnnnnnnnnnnnnnnnnnnnnnnnnnnnnnnnnnnnnnnnnnnnnnnnnnnnnnnnnnnnnnnnnnnnnnnnnnnnnnnnnnnnnnnnnnnnnnnnnnnnnnnnnnnnnnnnnnnnnnnnnnnnnnnnnnnnnnnnnnnnnnnnnnnnnnnnnnnnnnnnnnnnnnnnnnnnnnnnnnnnnnnnnnnnnnnnnnnnnnnnnnnnnnnnnnnnnnnnnnnnnnnnnnnnnnnnnnnnnnnnnnnnnnnnnnnnnnnnnnnnnnnnnnnnnnnnnnnnnnnnnnnnnnnnnnnnnnnnnnnnnnnnnnnnnnnnnnnnnnnnnnnnnnnnnnnnnnnnnnnnnnnnnnnnnnnnnnnnnnnnnnnnnnnnnnnnnnnnnnnnnnnnnnnnnnnnnnnnnnnnnnnnnnnnnnnnnnnnnnnnnnnnnnnnnnnnnnnnnnnnnnnnnnnnnnnnnnnnnnnnnnnnnnnnnnnnnnnnnnnnnnnnnnnnnnnnnnnnnnnnnnnnnnnnnnnnnnnnnnnnnnnnnnnnnnnnnnnnnnnnnnnnnnnnnnnnnnnnnnnnnnnnnnnnnnnnnnnnnnnnnnnnnnnnnnnnnnnnnnnnnnnnnnnnnnnnnnnnnnnnnnnnnnnnnnnnnnnnnnnnnnnnnnnnnnnnnnnnnnnnnnnnnnnnnnnnnnnnnnnnnnnnnnnnnnnnnnnnnnnnnnnnnnnnnnnnnnnnnnnnnnnnnnnnnnnnnnnnnnnnnnnnnnnnnnnnnnnnnnnnnnnnnnnnnnnnnnnnnnnnnnnnnnnnnnnnnnnnnnnnnnnnnnnnnnnnnnnnnnnnnnnnnnnnnnnnnnnnnnnnnnnnnnnnnnnnnnnnnnnnnnnnnnnnnnnnnnnnnnnnnnnnnnnnnnnnnnnnnnnnnnnnnnnnnnnnnnnnnnnnnnnnnnnnnnnnnnnnnnnnnnnnnnnnnnnnnnnnnnnnnnnnnnnnnnnnnnnnnnnnnnnnnnnnnnnnnnnnnnnnnnnnnnnnnnnnnnnnnnnnnnnnnnnnnnnnnnnnnnnnnnnnnnnnnnnnnnnnnnnnnnnnnnnnnnnnnnnnnnnnnnnnnnnnnnnnnnnnnnnnnnnnnnnnnnnnnnnnnnnnnnnnnnnnnnnnnnnnnnnnnnnnnnnnnnnnnnnnnnnnnnnnnnnnnnnnnnnnnnnnnnnnnnnnnnnnnnnnnnnnnnnnnnnnnnnnnnnnnnnnnnnnnnnnnnnnnnnnnnnnnnnnnnnnnnnnnnnnnnnnnnnnnnnnnnnnnnnnnnnnnnnnnnnnnnnnnnnnnnnnnnnnnnnnnnnnnnnnnnnnnnnnnnnnnnnnnnnnnnnnnnnnnnnnnnnnnnnnnnnnnnnnnnnnnnnnnnnnnnnnnnnnnnnnnnnnnnnnnnnnnnnnnnnnnnnnnnnnnnnnnnnnnnnnnnnnnnnnnnnnnnnnnnnnnnnnnnnnnnnnnnnnnnnnnnnnnnnnnnnnnnnnnnnnnnnnnnnnnnnnnnnnnnnnnnnnnnnnnnnnnnnnnnnnnnnnnnnnnnnnnnnnnnnnnnnnnnnnnnnnnnnnnnnnnnnnnnnnnnnnnnnnnnnnnnnnnnnnnnnnnnnnnnnnnnnnnnnnnnnnnnnnnnnnnnnnnnnnnnnnnnnnnnnnnnnnnnnnnnnnnnnnnnnnnnnnnnnnnnnnnnnnnnnnnnnnnnnnnnnnnnnnnnnnnnnnnnnnnnnnnnnnnnnnnnnnnnnnnnnnnnnnnnnnnnnnnnnnnnnnnnnnnnnnnnnnnnnnnnnnnnnnnnnnnnnnnnnnnnnnnnnnnnnnnnnnnnnnnnnnnnnnnnnnnnnnnnnnnnnnnnnnnnnnnnnnnnnnnnnnnnnnnnnnnnnnnnnnnnnnnnnnnnnnnnnnnnnnnnnnnnnnnnnnnnnnnnnnnnnnnnnnnnnnnnnnnnnnnnnnnnnnnnnnnnnnnnnnnnnnnnnnnnnnnnnnnnnnnnnnnnnnnnnnnnnnnnnnnnnnnnnnnnnnnnnnnnnnnnnnnnnnnnnnnnnnnnnnnnnnnnnnnnnnnnnnnnnnnnnnnnnnnnnnnnnnnnnnnnnnnnnnnnnnnnnnnnnnnnnnnnnnnnnnnnnnnnnnnnnnnnnnnnnnnnnnnnnnnnnnnnnnnnnnnnnnnnnnnnnnnnnnnnnnnnnnnnnnnnnnnnnnnnnnnnnnnnnnnnnnnnnnnnnnnnnnnnnnnnnnnnnnnnnnnnnnnnnnnnnnnnnnnnnnnnnnnnnnnnnnnnnnnnnnnnnnnnnnnnnnnnnnnnnnnnnnnnnnnnnnnnnnnnnnnnnnnnnnnnnnnnnnnnnnnnnnnnnnnnnnnnnnnnnnnnnnnnnnnnnnnnnnnnnnnnnnnnnnnnnnnnnnnnnnnnnnnnnnnnnnnnnnnnnnnnnnnnnnnnnnnnnnnnnnnnnnnnnnnnnnnnnnnnnnnnnnnnnnnnnnnnnnnnnnnnnnnnnnnnnnnnnnnnnnnnnnnnnnnnnnnnnnnnnnnnnnnnnnnnnnnnnnnnnnnnnnnnnnnnnnnnnnnnnnnnnnnnnnnnnnnnnnnnnnnnnnnnnnnnnnnnnnnnnnnnnnnnnnnnnnnnnnnnnnnnnnnnnnnnnnnnnnnnnnnnnnnnnnnnnnnnnnnnnnnnnnnnnnnnnnnnnnnnnnnnnnnnnnnnnnnnnnnnnnnnnnnnnnnnnnnnnnnnnnnnnnnnnnnnnnnnnnnnnnnnnnnnnnnnnnnnnnnnnnnnnnnnnnnnnnnnnnnnnnnnnnnnnnnnnnnnnnnnnnnnnnnnnnnnnnnnnnnnnnnnnnnnnnnnnnnnnnnnnnnnnnnnnnnnnnnnnnnnnnnnnnnnnnnnnnnnnnnnnnnnnnnnnnnnnnnnnnnnnnnnnnnnnnnnnnnnnnnnnnnnnnnnnnnnnnnnnnnnnnnnnnnnnnnnnnnnnnnnnnnnnnnnnnnnnnnnnnnnnnnnnnnnnnnnnnnnnnnnnnnnnnnnnnnnnnnnnnnnnnnnnnnnnnnnnnnnnnnnnnnnnnnnnnnnnnnnnnnnnnnnnnnnnnnnnnnnnnnnnnnnnnnnnnnnnnnnnnnnnnnnnnnnnnnnnnnnnnnnnnnnnnnnnnnnnnnnnnnnnnnnnnnnnnnnnnnnnnnnnnnnnnnnnnnnnnnnnnnnnnnnnnnnnnnnnnnnnnnnnnnnnnnnnnnnnnnnnnnnnnnnnnnnnnnnnnnnnnnnnnnnnnnnnnnnnnnnnnnnnnnnnnnnnnnnnnnnnnnnnnnnnnnnnnnnnnnnnnnnnnnnnnnnnnnnnnnnnnnnnnnnnnnnnnnnnnnnnnnnnnnnnnnnnnnnnnnnnnnnnnnnnnnnnnnnnnnnnnnnnnnnnnnnnnnnnnnnnnnnnnnnnnnnnnnnnnnnnnnnnnnnnnnnnnnnnnnnnnnnnnnnnnnnnnnnnnnnnnnnnnnnnnnnnnnnnnnnnnnnnnnnnnnnnnnnnnnnnnnnnnnnnnnnnnnnnnnnnnnnnnnnnnnnnnnnnnnnnnnnnnnnnnnnnnnnnnnnnnnnnnnnnnnnnnnnnnnnnnnnnnnnnnnnnnnnnnnnnnnnnnnnnnnnnnnnnnnnnnnnnnnnnnnnnnnnnnnnnnnnnnnnnnnnnnnnnnnnnnnnnnnnnnnnnnnnnnnnnnnnnnnnnnnnnnnnnnnnnnnnnnnnnnnnnnnnnnnnnnnnnnnnnnnnnnnnnnnnnnnnnnnnnnnnnnnnnnnnnnnnnnnnnnnnnnnnnnnnnnnnnnnnnnnnnnnnnnnnnnnnnnnnnnnnnnnnnnnnnnnnnnnnnnnnnnnnnnnnnnnnnnnnnnnnnnnnnnnnnnnnnnnnnnnnnnnnnnnnnnnnnnnnnnnnnnnnnnnnnnnnnnnnnnnnnnnnnnnnnnnnnnnnnnnnnnnnnnnnnnnnnnnnnnnnnnnnnnnnnnnnnnnnnnnnnnnnnnnnnnnnnnnnnnnnnnnnnnnnnnnnnnnnnnnnnnnnnnnnnnnnnnnnnnnnnnnnnnnnnnnnnnnnnnnnnnnnnnnnnnnnnnnnnnnnnnnnnnnnnnnnnnnnnnnnnnnnnnnnnnnnnnnnnnnnnnnnnnnnnnnnnnnnnnnnnnnnnnnnnnnnnnnnnnnnnnnnnnnnnnnnnnnnnnnnnnnnnnnnnnnnnnnnnnnnnnnnnnnnnnnnnnnnnnnnnnnnnnnnnnnnnnnnnnnnnnnnnnnnnnnnnnnnnnnnnnnnnnnnnnnnnnnnnnnnnnnnnnnnnnnnnnnnnnnnnnnnnnnnnnnnnnnnnnnnnnnnnnnnnnnnnnnnnnnnnnnnnnnnnnnnnnnnnnnnnnnnnnnnnnnnnnnnnnnnnnnnnnnnnnnnnnnnnnnnnnnnnnnnnnnnnnnnnnnnnnnnnnnnnnnnnnnnnnnnnnnnnnnnnnnnnnnnnnnnnnnnnnnnnnnnnnnnnnnnnnnnnnnnnnnnnnnnnnnnnnnnnnnnnnnnnnnnnnnnnnnnnnnnnnnnnnnnnnnnnnnnnnnnnnnnnnnnnnnnnnnnnnnnnnnnnnnnnnnnnnnnnnnnnnnnnnnnnnnnnnnnnnnnnnnnnnnnnnnnnnnnnnnnnnnnnnnnnnnnnnnnnnnnnnnnnnnnnnnnnnnnnnnnnnnnnnnnnnnnnnnnnnnnnnnnnnnnnnnnnnnnnnnnnnnnnnnnnnnnnnnnnnnnnnnnnnnnnnnnnnnnnnnnnnnnnnnnnnnnnnnnnnnnnnnnnnnnnnnnnnnnnnnnnnnnnnnnnnnnnnnnnnnnnnnnnnnnnnnnnnnnnnnnnnnnnnnnnnnnnnnnnnnnnnnnnnnnnnnnnnnnnnnnnnnnnnnnnnnnnnnnnnnnnnnnnnnnnnnnnnnnnnnnnnnnnnnnnnnnnnnnnnnnnnnnnnnnnnnnnnnnnnnnnnnnnnnnnnnnnnnnnnnnnnnnnnnnnnnnnnnnnnnnnnnnnnnnnnnnnnnnnnnnnnnnnnnnnnnnnnnnnnnnnnnnnnnnnnnnnnnnnnnnnnnnnnnnnnnnnnnnnnnnnnnnnnnnnnnnnnnnnnnnnnnnnnnnnnnnnnnnnnnnnnnnnnnnnnnnnnnnnnnnnnnnnnnnnnnnnnnnnnnnnnnnnnnnnnnnnnnnnnnnnnnnnnnnnnnnnnnnnnnnnnnnnnnnnnnnnnnnnnnnnnnnnnnnnnnnnnnnnnnnnnnnnnnnnnnnnnnnnnnnnnnnnnnnnnnnnnnnnnnnnnnnnnnnnnnnnnnnnnnnnnnnnnnnnnnnnnnnnnnnnnnnnnnnnnnnnnnnnnnnnnnnnnnnnnnnnnnnnnnnnnnnnnnnnnnnnnnnnnnnnnnnnnnnnnnnnnnnnnnnnnnnnnnnnnnnnnnnnnnnnnnnnnnnnnnnnnnnnnnnnnnnnnnnnnnnnnnnnnnnnnnnnnnnnnnnnnnnnnnnnnnnnnnnnnnnnnnnnnnnnnnnnnnnnnnnnnnnnnnnnnnnnnnnnnnnnnnnnnnnnnnnnnnnnnnnnnnnnnnnnnnnnnnnnnnnnnnnnnnnnnnnnnnnnnnnnnnnnnnnnnnnnnnnnnnnnnnnnnnnnnnnnnnnnnnnnnnnnnnnnnnnnnnnnnnnnnnnnnnnnnnnnnnnnnnnnnnnnnnnnnnnnnnnnnnnnnnnnnnnnnnnnnnnnnnnnnnnnnnnnnnnnnnnnnnnnnnnnnnnnnnnnnnnnnnnnnnnnnnnnnnnnnnnnnnnnnnnnnnnnnnnnnnnnnnnnnnnnnnnnnnnnnnnnnnnnnnnnnnnnnnnnnnnnnnnnnnnnnnnnnnnnnnnnnnnnnnnnnnnnnnnnnnnnnnnnnnnnnnnnnnnnnnnnnnnnnnnnnnnnnnnnnnnnnnnnnnnnnnnnnnnnnnnnggtctcggtggttcaagccgccttgctttgtgcggctacttttgaacatggctaccgccagcaacaagccgttgctcgcggtagctggtaataaatacgaggtgaacccaatgtttcgttcgcaagaacaagccaatttttccgcgctgcttgccatgcacatggtgcaggccgatggcccgctgctgcttgaaggcggcaccgggctgggcaagacgcgcgcttatctggcggcgatcatggatgccgctgcgcggggtgtgcgggtggctattgccttgcccagccaccagttggtggaccagctgctcgcatcgtcggatgtggcggctacccggcgcgcgggggtggagctgcgggcgtttcgcccggctaggtggttcaacaaccgccaagattattctgcgcagcggcaggcggcgatggacgccgccgtcatggtgtgcaccagcgcctcggtcatcatcgaccagcggctgggcggcggctacaacggcgccacccagcgcgcctatgtgttgtttgatgaggccgaccaactgccggccgctgccgccctgcaaagcgactgcgagatcagcgcgcagcagcttcaggcgctgggcattagcgccaccacggcgcagcaggcggcgcaaggcgtgctcaggcacaaagaggccagcccggagatacgggccgctgccttgatgatcctcgaaaccatcgccgagccggcgtggtttcataaagtcggctttaccgacgatggcagcctggtgttgtggcacaaactgccggggcggctgctgaagaaggtggctaatggcaaccatgtggcctttgtgagcgccacactttccattgccgaccgctttgacgacttttgccgcgccatgggcattgcccgccaaagcgcgctgtcgtgcatcgtggaaccggcgcagcacggccatttgcggtttgaggtgtctgatctcgaagtcgatacgccgcagtggctggcgcaggtgcaggctgcggtggccagggctgagcgcccggccttggtcgccaccccaagccatggtttggcccaactcttgggcggcttgattgcgcagtccacagtgcgccaaagcgatgaaaccgccacccaggcggtcgcccgcatgggcagcaacacggtgttgattgccgcaggcgcctgggccgggctggacacgcccacgcactgggccagcgtggtggtgccccgcattccgtttgagcgccccgtggtgctggacgcgcaagtggaaagcagctttttggacgcccgcaacgcggcgctgcgccgcatgcgccaagtggtaggccggggcctgcgcacgccgcaggcggtttgcagcgtctatatcttggacgggcggtacaagaatttgcaggccttcgtgccccagcgctttcggcaggcgtggaacgacaagctagtgctcgaaggcgggcgggtggaagtgctgctgtccaaactggagcgcgacccttcggtgcgcaagcgggcgctcgcgcactacggcgcgctttgccagggctgcggctttagccccaaggtgccgtcccaacttgatgtgcaccacctgcgccccttggccgacggcggcgaacgcctgaccggtctgcaagacctggccgtgctgtgcgccaattgccaccgcctggcccacgctgcgcatccacccttggcggtggaggcgattcgggcgcttcacgcaattgagtagggcttgggctcgtccttgcgttggcaagtccccaggctagcgaccaaaagcaaaaggccgcaaccctttagcaggactgcggcctatgtgacgaaggcgccggcgtttgccatgaccttcggctgcggttcgcgcccgggtaaatcgcttacttgcgcgccacccccaccaatcccaccggcaacaccaccccccgcgttgcagcctgcgccagtttgaagaacacgtcggtgttgtcaatcacgccggtgaacgaataagcgccggggccaaaggccgacaggggaatgtcggtggcggtgtgcaccgcgctgtcgccgggcacttggccggtcaccatgtacttgccttcggcgtcacgcgccatggggccggccgggtaggcggccaggggctcttttttcacgaagggctgctggctgtcttgcagggggcgctcgttggtgcggaagtcttccatgcggtctgagttagcgccatagcccaccagcaggcggttgtcgatgtccaccgtctcggggtagccgtcagcggcgatgcggtattttggaaagccggcctgttcatagacgcccaccaccgcgtcgcgcagcgcggtgccgccgccttcgcgcaccagcgcttgcaggcgtgcgtcgctcaccttcgatccgccaatcagtgccacaccggcgcattcatggtcggcagtgacgatcaccagcgtgtccttgtgcttcgcggcataggcctgggccagggcgacggcgcggtcaaattcgagtgtgtcgagcatccagcgctcgctgtccatggcgtgggcttgtttgtcgatcgaggcgccttcgaccatcagcacaaagccttttttctggcggtcgagcacgcgcaaggccttagcggtcatctcgtcgagcatgggctggtcaggaaaaccgtagtcgtccaccacccggcctgtgacgccacgggccttgttgcgccggccgtccatcttgtccagcgccacgttcatgttggagtgggcaaacaggccgagcaaacgctcggtcttgtcgccgtcgatggcgtccatgctggttttgtcgctggcgtattgaaagccagcgcgctgaaagtcgcccagcaggtcgcggtctttgtcgagcgcgcccgcagtcgcgccccagcctttgacgatgtcagccgtgtgcgcgtcggtggcagaaaacgcatagtcgctgcggtcgccgcgcgccgatccgggcgtggtcgagggcatgaaccatttgcgtccgccgcccatcagcaccgtgaggcccgtcagatgccggtcgtccagaaactggtccacgatgccggtgcccgcgccgcggctgctggtgtgcactgcgttgccggccggggtggcgtcaaacacgtcagaggtggtcaccaggcccagtgccttgccctgagtgcggtgcaggtattcgctcaggtattcgatgcgcggattgtcaaaaggatcggtggtgtcgtcgggaaagacgccttcttcattgttgttgtttttgttgcccgagacataagccgtcatgccgggtgccgagtcggtcaccactgaattgagcgaggcggtcttgaccatgccggtcaccgggaaggtgtccatggccagcggcgtgatgactttgccttgcgcgtagcccccggccacgatgcgtgcggccgtgcgctgcgcggcacccatgccgtcgcccagcagaatgatgatgttcttgaccttttggccgccgggcaccagcggcacgatctcgaagttaccgctagcggtcaccgtctggccgtcgctttgggtggcggtcaccgtcaactggtgcacgccgggtttgtccacgctcacagcgcgcacgctggcca

SEQ ID NO: 149 - DNA, 13470 bp, Artificial Sequence
  Synthetic Oligonucleotide
  misc_feature (1)..(9889): n is a, c, g, or t
nnnnnnnnnnnnnnnnnnnnnnnnnnnnnnnnnnnnnnnnnnnnnnnnnnnnnnnnnnnnnnnnnnnnnnnnnnnnnnnnnnnnnnnnnnnnnnnnnnnnnnnnnnnnnnnnnnnnnnnnnnnnnnnnnnnnnnnnnnnnnnnnnnnnnnnnnnnnnnnnnnnnnnnnnnnnnnnnnnnnnnnnnnnnnnnnnnnnnnnnnnnnnnnnnnnnnnnnnnnnnnnnnnnnnnnnnnnnnnnnnnnnnnnnnnnnnnnnnnnnnnnnnnnnnnnnnnnnnnnnnnnnnnnnnnnnnnnnnnnnnnnnnnnnnnnnnnnnnnnnnnnnnnnnnnnnnnnnnnnnnnnnnnnnnnnnnnnnnnnnnnnnnnnnnnnnnnnnnnnnnnnnnnnnnnnnnnnnnnnnnnnnnnnnnnnnnnnnnnnnnnnnnnnnnnnnnnnnnnnnnnnnnnnnnnnnnnnnnnnnnnnnnnnnnnnnnnnnnnnnnnnnnnnnnnnnnnnnnnnnnnnnnnnnnnnnnnnnnnnnnnnnnnnnnnnnnnnnnnnnnnnnnnnnnnnnnnnnnnnnnnnnnnnnnnnnnnnnnnnnnnnnnnnnnnnnnnnnnnnnnnnnnnnnnnnnnnnnnnnnnnnnnnnnnnnnnnnnnnnnnnnnnnnnnnnnnnnnnnnnnnnnnnnnnnnnnnnnnnnnnnnnnnnnnnnnnnnnnnnnnnnnnnnnnnnnnnnnnnnnnnnnnnnnnnnnnnnnnnnnnnnnnnnnnnnnnnnnnnnnnnnnnnnnnnnnnnnnnnnnnnnnnnnnnnnnnnnnnnnnnnnnnnnnnnnnnnnnnnnnnnnnnnnnnnnnnnnnnnnnnnnnnnnnnnnnnnnnnnnnnnnnnnnnnnnnnnnnnnnnnnnnnnnnnnnnnnnnnnnnnnnnnnnnnnnnnnnnnnnnnnnnnnnnnnnnnnnnnnnnnnnnnnnnnnnnnnnnnnnnnnnnnnnnnnnnnnnnnnnnnnnnnnnnnnnnnnnnnnnnnnnnnnnnnnnnnnnnnnnnnnnnnnnnnnnnnnnnnnnnnnnnnnnnnnnnnnnnnnnnnnnnnnnnnnnnnnnnnnnnnnnnnnnnnnnnnnnnnnnnnnnnnnnnnnnnnnnnnnnnnnnnnnnnnnnnnnnnnnnnnnnnnnnnnnnnnnnnnnnnnnnnnnnnnnnnnnnnnnnnnnnnnnnnnnnnnnnnnnnnnnnnnnnnnnnnnnnnnnnnnnnnnnnnnnnnnnnnnnnnnnnnnnnnnnnnnnnnnnnnnnnnnnnnnnnnnnnnnnnnnnnnnnnnnnnnnnnnnnnnnnnnnnnnnnnnnnnnnnnnnnnnnnnnnnnnnnnnnnnnnnnnnnnnnnnnnnnnnnnnnnnnnnnnnnnnnnnnnnnnnnnnnnnnnnnnnnnnnnnnnnnnnnnnnnnnnnnnnnnnnnnnnnnnnnnnnnnnnnnnnnnnnnnnnnnnnnnnnnnnnnnnnnnnnnnnnnnnnnnnnnnnnnnnnnnnnnnnnnnnnnnnnnnnnnnnnnnnnnnnnnnnnnnnnnnnnnnnnnnnnnnnnnnnnnnnnnnnnnnnnnnnnnnnnnnnnnnnnnnnnnnnnnnnnnnnnnnnnnnnnnnnnnnnnnnnnnnnnnnnnnnnnnnnnnnnnnnnnnnnnnnnnnnnnnnnnnnnnnnnnnnnnnnnnnnnnnnnnnnnnnnnnnnnnnnnnnnnnnnnnnnnnnnnnnnnnnnnnnnnnnnnnnnnnnnnnnnnnnnnnnnnnnnnnnnnnnnnnnnnnnnnnnnnnnnnnnnnnnnnnnnnnnnnnnnnnnnnnnnnnnnnnnnnnnnnnnnnnnnnnnnnnnnnnnnnnnnnnnnnnnnnnnnnnnnnnnnnnnnnnnnnnnnnnnnnnnnnnnnnnnnnnnnnnnnnnnnnnnnnnnnnnnnnnnnnnnnnnnnnnnnnnnnnnnnnnnnnnnnnnnnnnnnnnnnnnnnnnnnnnnnnnnnnnnnnnnnnnnnnnnnnnnnnnnnnnnnnnnnnnnnnnnnnnnnnnnnnnnnnnnnnnnnnnnnnnnnnnnnnnnnnnnnnnnnnnnnnnnnnnnnnnnnnnnnnnnnnnnnnnnnnnnnnnnnnnnnnnnnnnnnnnnnnnnnnnnnnnnnnnnnnnnnnnnnnnnnnnnnnnnnnnnnnnnnnnnnnnnnnnnnnnnnnnnnnnnnnnnnnnnnnnnnnnnnnnnnnnnnnnnnnnnnnnnnnnnnnnnnnnnnnnnnnnnnnnnnnnnnnnnnnnnnnnnnnnnnnnnnnnnnnnnnnnnnnnnnnnnnnnnnnnnnnnnnnnnnnnnnnnnnnnnnnnnnnnnnnnnnnnnnnnnnnnnnnnnnnnnnnnnnnnnnnnnnnnnnnnnnnnnnnnnnnnnnnnnnnnnnnnnnnnnnnnnnnnnnnnnnnnnnnnnnnnnnnnnnnnnnnnnnnnnnnnnnnnnnnnnnnnnnnnnnnnnnnnnnnnnnnnnnnnnnnnnnnnnnnnnnnnnnnnnnnnnnnnnnnnnnnnnnnnnnnnnnnnnnnnnnnnnnnnnnnnnnnnnnnnnnnnnnnnnnnnnnnnnnnnnnnnnnnnnnnnnnnnnnnnnnnnnnnnnnnnnnnnnnnnnnnnnnnnnnnnnnnnnnnnnnnnnnnnnnnnnnnnnnnnnnnnnnnnnnnnnnnnnnnnnnnnnnnnnnnnnnnnnnnnnnnnnnnnnnnnnnnnnnnnnnnnnnnnnnnnnnnnnnnnnnnnnnnnnnnnnnnnnnnnnnnnnnnnnnnnnnnnnnnnnnnnnnnnnnnnnnnnnnnnnnnnnnnnnnnnnnnnnnnnnnnnnnnnnnnnnnnnnnnnnnnnnnnnnnnnnnnnnnnnnnnnnnnnnnnnnnnnnnnnnnnnnnnnnnnnnnnnnnnnnnnnnnnnnnnnnnnnnnnnnnnnnnnnnnnnnnnnnnnnnnnnnnnnnnnnnnnnnnnnnnnnnnnnnnnnnnnnnnnnnnnnnnnnnnnnnnnnnnnnnnnnnnnnnnnnnnnnnnnnnnnnnnnnnnnnnnnnnnnnnnnnnnnnnnnnnnnnnnnnnnnnnnnnnnnnnnnnnnnnnnnnnnnnnnnnnnnnnnnnnnnnnnnnnnnnnnnnnnnnnnnnnnnnnnnnnnnnnnnnnnnnnnnnnnnnnnnnnnnnnnnnnnnnnnnnnnnnnnnnnnnnnnnnnnnnnnnnnnnnnnnnnnnnnnnnnnnnnnnnnnnnnnnnnnnnnnnnnnnnnnnnnnnnnnnnnnnnnnnnnnnnnnnnnnnnnnnnnnnnnnnnnnnnnnnnnnnnnnnnnnnnnnnnnnnnnnnnnnnnnnnnnnnnnnnnnnnnnnnnnnnnnnnnnnnnnnnnnnnnnnnnnnnnnnnnnnnnnnnnnnnnnnnnnnnnnnnnnnnnnnnnnnnnnnnnnnnnnnnnnnnnnnnnnnnnnnnnnnnnnnnnnnnnnnnnnnnnnnnnnnnnnnnnnnnnnnnnnnnnnnnnnnnnnnnnnnnnnnnnnnnnnnnnnnnnnnnnnnnnnnnnnnnnnnnnnnnnnnnnnnnnnnnnnnnnnnnnnnnnnnnnnnnnnnnnnnnnnnnnnnnnnnnnnnnnnnnnnnnnnnnnnnnnnnnnnnnnnnnnnnnnnnnnnnnnnnnnnnnnnnnnnnnnnnnnnnnnnnnnnnnnnnnnnnnnnnnnnnnnnnnnnnnnnnnnnnnnnnnnnnnnnnnnnnnnnnnnnnnnnnnnnnnnnnnnnnnnnnnnnnnnnnnnnnnnnnnnnnnnnnnnnnnnnnnnnnnnnnnnnnnnnnnnnnnnnnnnnnnnnnnnnnnnnnnnnnnnnnnnnnnnnnnnnnnnnnnnnnnnnnnnnnnnnnnnnnnnnnnnnnnnnnnnnnnnnnnnnnnnnnnnnnnnnnnnnnnnnnnnnnnnnnnnnnnnnnnnnnnnnnnnnnnnnnnnnnnnnnnnnnnnnnnnnnnnnnnnnnnnnnnnnnnnnnnnnnnnnnnnnnnnnnnnnnnnnnnnnnnnnnnnnnnnnnnnnnnnnnnnnnnnnnnnnnnnnnnnnnnnnnnnnnnnnnnnnnnnnnnnnnnnnnnnnnnnnnnnnnnnnnnnnnnnnnnnnnnnnnnnnnnnnnnnnnnnnnnnnnnnnnnnnnnnnnnnnnnnnnnnnnnnnnnnnnnnnnnnnnnnnnnnnnnnnnnnnnnnnnnnnnnnnnnnnnnnnnnnnnnnnnnnnnnnnnnnnnnnnnnnnnnnnnnnnnnnnnnnnnnnnnnnnnnnnnnnnnnnnnnnnnnnnnnnnnnnnnnnnnnnnnnnnnnnnnnnnnnnnnnnnnnnnnnnnnnnnnnnnnnnnnnnnnnnnnnnnnnnnnnnnnnnnnnnnnnnnnnnnnnnnnnnnnnnnnnnnnnnnnnnnnnnnnnnnnnnnnnnnnnnnnnnnnnnnnnnnnnnnnnnnnnnnnnnnnnnnnnnnnnnnnnnnnnnnnnnnnnnnnnnnnnnnnnnnnnnnnnnnnnnnnnnnnnnnnnnnnnnnnnnnnnnnnnnnnnnnnnnnnnnnnnnnnnnnnnnnnnnnnnnnnnnnnnnnnnnnnnnnnnnnnnnnnnnnnnnnnnnnnnnnnnnnnnnnnnnnnnnnnnnnnnnnnnnnnnnnnnnnnnnnnnnnnnnnnnnnnnnnnnnnnnnnnnnnnnnnnnnnnnnnnnnnnnnnnnnnnnnnnnnnnnnnnnnnnnnnnnnnnnnnnnnnnnnnnnnnnnnnnnnnnnnnnnnnnnnnnnnnnnnnnnnnnnnnnnnnnnnnnnnnnnnnnnnnnnnnnnnnnnnnnnnnnnnnnnnnnnnnnnnnnnnnnnnnnnnnnnnnnnnnnnnnnnnnnnnnnnnnnnnnnnnnnnnnnnnnnnnnnnnnnnnnnnnnnnnnnnnnnnnnnnnnnnnnnnnnnnnnnnnnnnnnnnnnnnnnnnnnnnnnnnnnnnnnnnnnnnnnnnnnnnnnnnnnnnnnnnnnnnnnnnnnnnnnnnnnnnnnnnnnnnnnnnnnnnnnnnnnnnnnnnnnnnnnnnnnnnnnnnnnnnnnnnnnnnnnnnnnnnnnnnnnnnnnnnnnnnnnnnnnnnnnnnnnnnnnnnnnnnnnnnnnnnnnnnnnnnnnnnnnnnnnnnnnnnnnnnnnnnnnnnnnnnnnnnnnnnnnnnnnnnnnnnnnnnnnnnnnnnnnnnnnnnnnnnnnnnnnnnnnnnnnnnnnnnnnnnnnnnnnnnnnnnnnnnnnnnnnnnnnnnnnnnnnnnnnnnnnnnnnnnnnnnnnnnnnnnnnnnnnnnnnnnnnnnnnnnnnnnnnnnnnnnnnnnnnnnnnnnnnnnnnnnnnnnnnnnnnnnnnnnnnnnnnnnnnnnnnnnnnnnnnnnnnnnnnnnnnnnnnnnnnnnnnnnnnnnnnnnnnnnnnnnnnnnnnnnnnnnnnnnnnnnnnnnnnnnnnnnnnnnnnnnnnnnnnnnnnnnnnnnnnnnnnnnnnnnnnnnnnnnnnnnnnnnnnnnnnnnnnnnnnnnnnnnnnnnnnnnnnnnnnnnnnnnnnnnnnnnnnnnnnnnnnnnnnnnnnnnnnnnnnnnnnnnnnnnnnnnnnnnnnnnnnnnnnnnnnnnnnnnnnnnnnnnnnnnnnnnnnnnnnnnnnnnnnnnnnnnnnnnnnnnnnnnnnnnnnnnnnnnnnnnnnnnnnnnnnnnnnnnnnnnnnnnnnnnnnnnnnnnnnnnnnnnnnnnnnnnnnnnnnnnnnnnnnnnnnnnnnnnnnnnnnnnnnnnnnnnnnnnnnnnnnnnnnnnnnnnnnnnnnnnnnnnnnnnnnnnnnnnnnnnnnnnnnnnnnnnnnnnnnnnnnnnnnnnnnnnnnnnnnnnnnnnnnnnnnnnnnnnnnnnnnnnnnnnnnnnnnnnnnnnnnnnnnnnnnnnnnnnnnnnnnnnnnnnnnnnnnnnnnnnnnnnnnnnnnnnnnnnnnnnnnnnnnnnnnnnnnnnnnnnnnnnnnnnnnnnnnnnnnnnnnnnnnnnnnnnnnnnnnnnnnnnnnnnnnnnnnnnnnnnnnnnnnnnnnnnnnnnnnnnnnnnnnnnnnnnnnnnnnnnnnnnnnnnnnnnnnnnnnnnnnnnnnnnnnnnnnnnnnnnnnnnnnnnnnnnnnnnnnnnnnnnnnnnnnnnnnnnnnnnnnnnnnnnnnnnnnnnnnnnnnnnnnnnnnnnnnnnnnnnnnnnnnnnnnnnnnnnnnnnnnnnnnnnnnnnnnnnnnnnnnnnnnnnnnnnnnnnnnnnnnnnnnnnnnnnnnnnnnnnnnnnnnnnnnnnnnnnnnnnnnnnnnnnnnnnnnnnnnnnnnnnnnnnnnnnnnnnnnnnnnnnnnnnnnnnnnnnnnnnnnnnnnnnnnnnnnnnnnnnnnnnnnnnnnnnnnnnnnnnnnnnnnnnnnnnnnnnnnnnnnnnnnnnnnnnnnnnnnnnnnnnnnnnnnnnnnnnnnnnnnnnnnnnnnnnnnnnnnnnnnnnnnnnnnnnnnnnnnnnnnnnnnnnnnnnnnnnnnnnnnnnnnnnnnnnnnnnnnnnnnnnnnnnnnnnnnnnnnnnnnnnnnnnnnnnnnnnnnnnnnnnnnnnnnnnnnnnnnnnnnnnnnnnnnnnnnnnnnnnnnnnnnnnnnnnnnnnnnnnnnnnnnnnnnnnnnnnnnnnnnnnnnnnnnnnnnnnnnnnnnnnnnnnnnnnnnnnnnnnnnnnnnnnnnnnnnnnnnnnnnnnnnnnnnnnnnnnnnnnnnnnnnnnnnnnnnnnnnnnnnnnnnnnnnnnnnnnnnnnnnnnnnnnnnnnnnnnnnnnnnnnnnnnnnnnnnnnnnnnnnnnnnnnnnnnnnnnnnnnnnnnnnnnnnnnnnnnnnnnnnnnnnnnnnnnnnnnnnnnnnnnnnnnnnnnnnnnnnnnnnnnnnnnnnnnnnnnnnnnnnnnnnnnnnnnnnnnnnnnnnnnnnnnnnnnnnnnnnnnnnnnnnnnnnnnnnnnnnnnnnnnnnnnnnnnnnnnnnnnnnnnnnnnnnnnnnnnnnnnnnnnnnnnnnnnnnnnnnnnnnnnnnnnnnnnnnnnnnnnnnnnnnnnnnnnnnnnnnnnnnnnnnnnnnnnnnnnnnnnnnnnnnnnnnnnnnnnnnnnnnnnnnnnnnnnnnnnnnnnnnnnnnnnnnnnnnnnnnnnnnnnnnnnnnnnnnnnnnnnnnnnnnnnnnnnnnnnnnnnnnnnnnnnnnnnnnnnnnnnnnnnnnnnnnnnnnnnnnnnnnnnnnnnnnnnnnnnnnnnnnnnnnnnnnnnnnnnnnnnnnnnnnnnnnnnnnnnnnnnnnnnnnnnnnnnnnnnnnnnnnnnnnnnnnnnnnnnnnnnnnnnnnnnnnnnnnnnnnnnnnnnnnnnnnnnnnnnnnnnnnnnnnnnnnnnnnnnnnnnnnnnnnnnnnnnnnnnnnnnnnnnnnnnnnnnnnnnnnnnnnnnnnnnnnnnnnnnnnnnnnnnnnnnnnnnnnnnnnnnnnnnnnnnnnnnnnnnnnnnnnnnnnnnnnnnnnnnnnnnnnnnnnnnnnnnnnnnnnnnnnnnnnnnnnnnnnnnnnnnnnnnnnnnnnnnnnnnnnnnnnnnnnnnnnnnnnnnnnnnnnnnnnnnnnnnnnnnnnnnnnnnnnnnnnnnnnnnnnnnnnnnnnnnnnnnnnnnnnnnnnnnnnnnnnnnnnnnnnnnnnnnnnnnnnnnnnnnnnnnnnnnnnnnnnnnnnnnnnnnnnnnnnnnnnnnnnnnnnnnnnnnnnnnnnnnnnnnnnnnnnnnnnnnnnnnnnnnnnnnnnnnnnnnnnnnnnnnnnnnnnnnnnnnnnnnnnnnnnnnnnnnnnnnnnnnnnnnnnnnnnnnnnnnnnnnnnnnnnnnnnnnnnnnnnnnnnnnnnnnnnnnnnnnnnnnnnnnnnnnnnnnnnnnnnnnnnnnnnnnnnnnnnnnnnnnnnnnnnnnnnnnnnnnnnnnnnnnnnnnnnnnnnnnnnnnnnnnnnnnnnnnnnnnnnnnnnnnnnnnnnnnnnnnnnnnnnnnnnnnnnnnnnnnnnnnnnnnnnnnnnnnnnnnnnnnnnnnnnnnnnnnnnnnnnnnnnnnnnnnnnnnnnnnnnnnnnnnnnnnnnnnnnnnnnnnnnnnnnnnnnnnnnnnnnnnnnnnnnnnnnnnnnnnnnnnnnnnnnnnnnnnnnnnnnnnnnnnnnnnnnnnnnnnnnnnnnnnnnnnnnnnnnnnnnnnnnnnnnnnnnnnnnnnnnnnnnnnnnnnnnnnnnnnnnnnnnnnnnnnnnnnnnnnnnnnnnnnnnnnnnnnnnnnnnnnnnnnnnnnnnnnnnnnnnnnnnnnnnnnnnnnnnnnnnnnnnnnnnnnnnnnnnnnnnnnnnnnnnnnnnnnnnnnnnnnnnnnnnnnnnnnnnnnnnnnnnnnnnnnnnnnnnnnnnnnnnnnnnnnnnnnnnnnnnnnnnnnnnnnnnnnnnnnnnnnnnnnnnnnnnnnnnnnnnnnnnnnnnnnnnnnnnnnnnnnnnnnnnnnnnnnnnnnnnnnnnnnnnnnnnnnnnnnnnnnnnnnnnnnnnnnnnnnnnnnnnnnnnnnnnnnnnnnnnnnnnnnnnnnnnnnnnnnnnnnnnnnnnnnnnnnnnnnnnnnnnnnnnnnnnnnnnnnnnnnnnnnnnnnnnnnnnnnnnnnnnnnnnnnnnnnnnnnnnnnnnnnnnnnnnnnnnnnnnnnnnnnnnnnnnnnnnnnnnnnnnnnnnnnnnnnnnnnnnnnnnnnnnnnnnnnnnnnnnnnnnnnnnnnnnnnnnnnnnnnnnnnnnnnnnnnnnnnnnnnnnnnnnnnnnnnnnnnnnnnnnnnnnnnnnnnnnnnnnnnnnnnnnnnnnnnnnnnnnnnnnnnnnnnnnnnnnnnnnnnnnnnnnnnnnnnnnnnnnnnnnnnnnnnnnnnnnnnnnnnnnnnnnnnnnnnnnnnnnnnnnnnnnnnnnnnnnnnnnnnnnnnnnnnnnnnnnnnnnnnnnnnnnnnnnnnnnnnnnnnnnnnnnnnnnnnnnnnnnnnnnnnnnnnnnnnnnnnnnnnnnnnnnnnnnnnnnnnnnnnnnnnnnnnnnnnnnnnnnnnnnnnnnnnnnnnnnnnnnnnnnnnnnnnnnnnnnnnnnnnnnnnnnnnnnnnnnnnnnnnnnnnnnnnnnnnnnnnnnnnnnnnnnnnnnnnnnnnnnnnnnnnnnnnnnnnnnnnnnnnnnnnnnnnnnnnnnnnnnnnnnnnnnnnnnnnnnnnnnnnnnnnnnnnnnnnnnnnnnnnnnnnnnnnnnnnnnnnnnnnnnnnnnnnnnnnnnnnnnnnnnnnnnnnnnnnnnnnnnnnnnnnnnnnnnnnnnnnnnnnnnnnnnnnnnnnnnnnnnnnnnnnnnnnnnnnnnnnnnnnnnnnnnnnnnnnnnnnnnnnnnnnnnnnnnnnnnnnnnnnnnnnnnnnnnnnnnnnnnnnnnnnnnnnnnnnnnnnnnnnnnnnnnnnnnnnnnnnnnnnnnnnnnnnnnnnnnnnnnnnnnnnnnnnnnnnnnnnnnnnnnnnnnnnnnnnnnnnnnnnnnnnnnnnnnnnnnnnnnnnnnnnnnnnnnnnnnnnnnnnnnnnnnnnnnnnnnnnnnnnnnnnnnnnnnnnnnnnnnnnnnnnnnnnnnnnnnnnnnnnnnnnnnnnnnnnnnnnnnnnnnnnnnnnnnnnnnnnnnnnnnnnnnnnnnnnnnnnnnnnnnnnnnnnnnnnnnnnnnnnnnnnnnnnnnnnnnnnnnnnnnnnnnnnnnnnnnnnnnnnnnnnnnnnnnnnnnnnnnnnnnnnnnnnnnnnnnnnnnnnnnnnnnnnnnnnnnnnnnnnnnnnnnnnnnnnnnnnnnnnnnnnnnnnnnnnnnnnnnnnnnnnnnnnnnnnnnnnnnnnnnnnnnnnnnnnnnnnnnnnnnnnnnnnnnnnnnnnnnnnnnnnnnnnnnnnnnnnnnnnnnnnnnnnnnnnnggtctcggtggttcaagccgccttgctttgtgcggctacttttgaacatggctaccgccagcaacaagccgttgctcgcggtagctggtaataaatacgaggtgaacccaatgtttcgttcgcaagaacaagccaatttttccgcgctgcttgccatgcacatggtgcaggccgatggcccgctgctgcttgaaggcggcaccgggctgggcaagacgcgcgcttatctggcggcgatcatggatgccgctgcgcggggtgtgcgggtggctattgccttgcccagccaccagttggtggaccagctgctcgcatcgtcggatgtggcggctacccggcgcgcgggggtggagctgcgggcgtttcgcccggctaggtggttcaacaaccgccaagattattctgcgcagcggcaggcggcgatggacgccgccgtcatggtgtgcaccagcgcctcggtcatcatcgaccagcggctgggcggcggctacaacggcgccacccagcgcgcctatgtgttgtttgatgaggccgaccaactgccggccgctgccgccctgcaaagcgactgcgagatcagcgcgcagcagcttcaggcgctgggcattagcgccaccacggcgcagcaggcggcgcaaggcgtgctcaggcacaaagaggccagcccggagatacgggccgctgccttgatgatcctcgaaaccatcgccgagccggcgtggtttcataaagtcggctttaccgacgatggcagcctggtgttgtggcacaaactgccggggcggctgctgaagaaggtggctaatggcaaccatgtggcctttgtgagcgccacactttccattgccgaccgctttgacgacttttgccgcgccatgggcattgcccgccaaagcgcgctgtcgtgcatcgtggaaccggcgcagcacggccatttgcggtttgaggtgtctgatctcgaagtcgatacgccgcagtggctggcgcaggtgcaggctgcggtggccagggctgagcgcccggccttggtcgccaccccaagccatggtttggcccaactcttgggcggcttgattgcgcagtccacagtgcgccaaagcgatgaaaccgccacccaggcggtcgcccgcatgggcagcaacacggtgttgattgccgcaggcgcctgggccgggctggacacgcccacgcactgggccagcgtggtggtgccccgcattccgtttgagcgccccgtggtgctggacgcgcaagtggaaagcagctttttggacgcccgcaacgcggcgctgcgccgcatgcgccaagtggtaggccggggcctgcgcacgccgcaggcggtttgcagcgtctatatcttggacgggcggtacaagaatttgcaggccttcgtgccccagcgctttcggcaggcgtggaacgacaagctagtgctcgaaggcgggcgggtggaagtgctgctgtccaaactggagcgcgacccttcggtgcgcaagcgggcgctcgcgcactacggcgcgctttgccagggctgcggctttagccccaaggtgccgtcccaacttgatgtgcaccacctgcgccccttggccgacggcggcgaacgcctgaccggtctgcaagacctggccgtgctgtgcgccaattgccaccgcctggcccacgctgcgcatccacccttggcggtggaggcgattcgggcgcttcacgcaattgagtagggcttgggctcgtccttgcgttggcaagtccccaggctagcgaccaaaagcaaaaggccgcaaccctttagcaggactgcggcctatgtgacgaaggcgccggcgtttgccatgaccttcggctgcggttcgcgcccgggtaaatcgcttacttgcgcgccacccccaccaatcccaccggcaacaccaccccccgcgttgcagcctgcgccagtttgaagaacacgtcggtgttgtcaatcacgccggtgaacgaataagcgccggggccaaaggccgacaggggaatgtcggtggcggtgtgcaccgcgctgtcgccgggcacttggccggtcaccatgtacttgccttcggcgtcacgcgccatggggccggccgggtaggcggccaggggctcttttttcacgaagggctgctggctgtcttgcagggggcgctcgttggtgcggaagtcttccatgcggtctgagttagcgccatagcccaccagcaggcggttgtcgatgtccaccgtctcggggtagccgtcagcggcgatgcggtattttggaaagccggcctgttcatagacgcccaccaccgcgtcgcgcagcgcggtgccgccgccttcgcgcaccagcgcttgcaggcgtgcgtcgctcaccttcgatccgccaatcagtgccacaccggcgcattcatggtcggcagtgacgatcaccagcgtgtccttgtgcttcgcggcataggcctgggccagggcgacggcgcggtcaaattcgagtgtgtcgagcatccagcgctcgctgtccatggcgtgggcttgtttgtcgatcgaggcgccttcgaccatcagcacaaagccttttttctggcggtcgagcacgcgcaaggccttagcggtcatctcgtcgagcatgggctggtcaggaaaaccgtagtcgtccaccacccggcctgtgacgccacgggccttgttgcgccggccgtccatcttgtccagcgccacgttcatgttggagtgggcaaacaggccgagcaaacgctcggtcttgtcgccgtcgatggcgtccatgctggttttgtcgctggcgtattgaaagccagcgcgctgaaagtcgcccagcaggtcgcggtctttgtcgagcgcgcccgcagtcgcgccccagcctttgacgatgtcagccgtgtgcgcgtcggtggcagaaaacgcatagtcgctgcggtcgccgcgcgccgatccgggcgtggtcgagggcatgaaccatttgcgtccgccgcccatcagcaccgtgaggcccgtcagatgccggtcgtccagaaactggtccacgatgccggtgcccgcgccgcggctgctggtgtgcactgcgttgccggccggggtggcgtcaaacacgtcagaggtggtcaccaggcccagtgccttgccctgagtgcggtgcaggtattcgctcaggtattcgatgcgcggattgtcaaaaggatcggtggtgtcgtcgggaaagacgccttcttcattgttgttgtttttgttgcccgagacataagccgtcatgccgggtgccgagtcggtcaccactgaattgagcgaggcggtcttgaccatgccggtcaccgggaaggtgtccatggccagcggcgtgatgactttgccttgcgcgtagcccccggccacgatgcgtgcggccgtgcgctgcgcggcacccatgccgtcgcccagcagaatgatgatgttcttgaccttttggccgccgggcaccagcggcacgatctcgaagttaccgctagcggtcaccgtctggccgtcgctttgggtggcggtcaccgtcaactggtgcacgccgggtttgtccacgctcacagcgcgcacgctggcca

SEQ ID NO: 150 - DNA, 13414 bp, Artificial Sequence
  Synthetic Oligonucleotide
  misc_feature (1)..(8517): n is a, c, g, or t
nnnnnnnnnnnnnnnnnnnnnnnnnnnnnnnnnnnnnnnnnnnnnnnnnnnnnnnnnnnnnnnnnnnnnnnnnnnnnnnnnnnnnnnnnnnnnnnnnnnnnnnnnnnnnnnnnnnnnnnnnnnnnnnnnnnnnnnnnnnnnnnnnnnnnnnnnnnnnnnnnnnnnnnnnnnnnnnnnnnnnnnnnnnnnnnnnnnnnnnnnnnnnnnnnnnnnnnnnnnnnnnnnnnnnnnnnnnnnnnnnnnnnnnnnnnnnnnnnnnnnnnnnnnnnnnnnnnnnnnnnnnnnnnnnnnnnnnnnnnnnnnnnnnnnnnnnnnnnnnnnnnnnnnnnnnnnnnnnnnnnnnnnnnnnnnnnnnnnnnnnnnnnnnnnnnnnnnnnnnnnnnnnnnnnnnnnnnnnnnnnnnnnnnnnnnnnnnnnnnnnnnnnnnnnnnnnnnnnnnnnnnnnnnnnnnnnnnnnnnnnnnnnnnnnnnnnnnnnnnnnnnnnnnnnnnnnnnnnnnnnnnnnnnnnnnnnnnnnnnnnnnnnnnnnnnnnnnnnnnnnnnnnnnnnnnnnnnnnnnnnnnnnnnnnnnnnnnnnnnnnnnnnnnnnnnnnnnnnnnnnnnnnnnnnnnnnnnnnnnnnnnnnnnnnnnnnnnnnnnnnnnnnnnnnnnnnnnnnnnnnnnnnnnnnnnnnnnnnnnnnnnnnnnnnnnnnnnnnnnnnnnnnnnnnnnnnnnnnnnnnnnnnnnnnnnnnnnnnnnnnnnnnnnnnnnnnnnnnnnnnnnnnnnnnnnnnnnnnnnnnnnnnnnnnnnnnnnnnnnnnnnnnnnnnnnnnnnnnnnnnnnnnnnnnnnnnnnnnnnnnnnnnnnnnnnnnnnnnnnnnnnnnnnnnnnnnnnnnnnnnnnnnnnnnnnnnnnnnnnnnnnnnnnnnnnnnnnnnnnnnnnnnnnnnnnnnnnnnnnnnnnnnnnnnnnnnnnnnnnnnnnnnnnnnnnnnnnnnnnnnnnnnnnnnnnnnnnnnnnnnnnnnnnnnnnnnnnnnnnnnnnnnnnnnnnnnnnnnnnnnnnnnnnnnnnnnnnnnnnnnnnnnnnnnnnnnnnnnnnnnnnnnnnnnnnnnnnnnnnnnnnnnnnnnnnnnnnnnnnnnnnnnnnnnnnnnnnnnnnnnnnnnnnnnnnnnnnnnnnnnnnnnnnnnnnnnnnnnnnnnnnnnnnnnnnnnnnnnnnnnnnnnnnnnnnnnnnnnnnnnnnnnnnnnnnnnnnnnnnnnnnnnnnnnnnnnnnnnnnnnnnnnnnnnnnnnnnnnnnnnnnnnnnnnnnnnnnnnnnnnnnnnnnnnnnnnnnnnnnnnnnnnnnnnnnnnnnnnnnnnnnnnnnnnnnnnnnnnnnnnnnnnnnnnnnnnnnnnnnnnnnnnnnnnnnnnnnnnnnnnnnnnnnnnnnnnnnnnnnnnnnnnnnnnnnnnnnnnnnnnnnnnnnnnnnnnnnnnnnnnnnnnnnnnnnnnnnnnnnnnnnnnnnnnnnnnnnnnnnnnnnnnnnnnnnnnnnnnnnnnnnnnnnnnnnnnnnnnnnnnnnnnnnnnnnnnnnnnnnnnnnnnnnnnnnnnnnnnnnnnnnnnnnnnnnnnnnnnnnnnnnnnnnnnnnnnnnnnnnnnnnnnnnnnnnnnnnnnnnnnnnnnnnnnnnnnnnnnnnnnnnnnnnnnnnnnnnnnnnnnnnnnnnnnnnnnnnnnnnnnnnnnnnnnnnnnnnnnnnnnnnnnnnnnnnnnnnnnnnnnnnnnnnnnnnnnnnnnnnnnnnnnnnnnnnnnnnnnnnnnnnnnnnnnnnnnnnnnnnnnnnnnnnnnnnnnnnnnnnnnnnnnnnnnnnnnnnnnnnnnnnnnnnnnnnnnnnnnnnnnnnnnnnnnnnnnnnnnnnnnnnnnnnnnnnnnnnnnnnnnnnnnnnnnnnnnnnnnnnnnnnnnnnnnnnnnnnnnnnnnnnnnnnnnnnnnnnnnnnnnnnnnnnnnnnnnnnnnnnnnnnnnnnnnnnnnnnnnnnnnnnnnnnnnnnnnnnnnnnnnnnnnnnnnnnnnnnnnnnnnnnnnnnnnnnnnnnnnnnnnnnnnnnnnnnnnnnnnnnnnnnnnnnnnnnnnnnnnnnnnnnnnnnnnnnnnnnnnnnnnnnnnnnnnnnnnnnnnnnnnnnnnnnnnnnnnnnnnnnnnnnnnnnnnnnnnnnnnnnnnnnnnnnnnnnnnnnnnnnnnnnnnnnnnnnnnnnnnnnnnnnnnnnnnnnnnnnnnnnnnnnnnnnnnnnnnnnnnnnnnnnnnnnnnnnnnnnnnnnnnnnnnnnnnnnnnnnnnnnnnnnnnnnnnnnnnnnnnnnnnnnnnnnnnnnnnnnnnnnnnnnnnnnnnnnnnnnnnnnnnnnnnnnnnnnnnnnnnnnnnnnnnnnnnnnnnnnnnnnnnnnnnnnnnnnnnnnnnnnnnnnnnnnnnnnnnnnnnnnnnnnnnnnnnnnnnnnnnnnnnnnnnnnnnnnnnnnnnnnnnnnnnnnnnnnnnnnnnnnnnnnnnnnnnnnnnnnnnnnnnnnnnnnnnnnnnnnnnnnnnnnnnnnnnnnnnnnnnnnnnnnnnnnnnnnnnnnnnnnnnnnnnnnnnnnnnnnnnnnnnnnnnnnnnnnnnnnnnnnnnnnnnnnnnnnnnnnnnnnnnnnnnnnnnnnnnnnnnnnnnnnnnnnnnnnnnnnnnnnnnnnnnnnnnnnnnnnnnnnnnnnnnnnnnnnnnnnnnnnnnnnnnnnnnnnnnnnnnnnnnnnnnnnnnnnnnnnnnnnnnnnnnnnnnnnnnnnnnnnnnnnnnnnnnnnnnnnnnnnnnnnnnnnnnnnnnnnnnnnnnnnnnnnnnnnnnnnnnnnnnnnnnnnnnnnnnnnnnnnnnnnnnnnnnnnnnnnnnnnnnnnnnnnnnnnnnnnnnnnnnnnnnnnnnnnnnnnnnnnnnnnnnnnnnnnnnnnnnnnnnnnnnnnnnnnnnnnnnnnnnnnnnnnnnnnnnnnnnnnnnnnnnnnnnnnnnnnnnnnnnnnnnnnnnnnnnnnnnnnnnnnnnnnnnnnnnnnnnnnnnnnnnnnnnnnnnnnnnnnnnnnnnnnnnnnnnnnnnnnnnnnnnnnnnnnnnnnnnnnnnnnnnnnnnnnnnnnnnnnnnnnnnnnnnnnnnnnnnnnnnnnnnnnnnnnnnnnnnnnnnnnnnnnnnnnnnnnnnnnnnnnnnnnnnnnnnnnnnnnnnnnnnnnnnnnnnnnnnnnnnnnnnnnnnnnnnnnnnnnnnnnnnnnnnnnnnnnnnnnnnnnnnnnnnnnnnnnnnnnnnnnnnnnnnnnnnnnnnnnnnnnnnnnnnnnnnnnnnnnnnnnnnnnnnnnnnnnnnnnnnnnnnnnnnnnnnnnnnnnnnnnnnnnnnnnnnnnnnnnnnnnnnnnnnnnnnnnnnnnnnnnnnnnnnnnnnnnnnnnnnnnnnnnnnnnnnnnnnnnnnnnnnnnnnnnnnnnnnnnnnnnnnnnnnnnnnnnnnnnnnnnnnnnnnnnnnnnnnnnnnnnnnnnnnnnnnnnnnnnnnnnnnnnnnnnnnnnnnnnnnnnnnnnnnnnnnnnnnnnnnnnnnnnnnnnnnnnnnnnnnnnnnnnnnnnnnnnnnnnnnnnnnnnnnnnnnnnnnnnnnnnnnnnnnnnnnnnnnnnnnnnnnnnnnnnnnnnnnnnnnnnnnnnnnnnnnnnnnnnnnnnnnnnnnnnnnnnnnnnnnnnnnnnnnnnnnnnnnnnnnnnnnnnnnnnnnnnnnnnnnnnnnnnnnnnnnnnnnnnnnnnnnnnnnnnnnnnnnnnnnnnnnnnnnnnnnnnnnnnnnnnnnnnnnnnnnnnnnnnnnnnnnnnnnnnnnnnnnnnnnnnnnnnnnnnnnnnnnnnnnnnnnnnnnnnnnnnnnnnnnnnnnnnnnnnnnnnnnnnnnnnnnnnnnnnnnnnnnnnnnnnnnnnnnnnnnnnnnnnnnnnnnnnnnnnnnnnnnnnnnnnnnnnnnnnnnnnnnnnnnnnnnnnnnnnnnnnnnnnnnnnnnnnnnnnnnnnnnnnnnnnnnnnnnnnnnnnnnnnnnnnnnnnnnnnnnnnnnnnnnnnnnnnnnnnnnnnnnnnnnnnnnnnnnnnnnnnnnnnnnnnnnnnnnnnnnnnnnnnnnnnnnnnnnnnnnnnnnnnnnnnnnnnnnnnnnnnnnnnnnnnnnnnnnnnnnnnnnnnnnnnnnnnnnnnnnnnnnnnnnnnnnnnnnnnnnnnnnnnnnnnnnnnnnnnnnnnnnnnnnnnnnnnnnnnnnnnnnnnnnnnnnnnnnnnnnnnnnnnnnnnnnnnnnnnnnnnnnnnnnnnnnnnnnnnnnnnnnnnnnnnnnnnnnnnnnnnnnnnnnnnnnnnnnnnnnnnnnnnnnnnnnnnnnnnnnnnnnnnnnnnnnnnnnnnnnnnnnnnnnnnnnnnnnnnnnnnnnnnnnnnnnnnnnnnnnnnnnnnnnnnnnnnnnnnnnnnnnnnnnnnnnnnnnnnnnnnnnnnnnnnnnnnnnnnnnnnnnnnnnnnnnnnnnnnnnnnnnnnnnnnnnnnnnnnnnnnnnnnnnnnnnnnnnnnnnnnnnnnnnnnnnnnnnnnnnnnnnnnnnnnnnnnnnnnnnnnnnnnnnnnnnnnnnnnnnnnnnnnnnnnnnnnnnnnnnnnnnnnnnnnnnnnnnnnnnnnnnnnnnnnnnnnnnnnnnnnnnnnnnnnnnnnnnnnnnnnnnnnnnnnnnnnnnnnnnnnnnnnnnnnnnnnnnnnnnnnnnnnnnnnnnnnnnnnnnnnnnnnnnnnnnnnnnnnnnnnnnnnnnnnnnnnnnnnnnnnnnnnnnnnnnnnnnnnnnnnnnnnnnnnnnnnnnnnnnnnnnnnnnnnnnnnnnnnnnnnnnnnnnnnnnnnnnnnnnnnnnnnnnnnnnnnnnnnnnnnnnnnnnnnnnnnnnnnnnnnnnnnnnnnnnnnnnnnnnnnnnnnnnnnnnnnnnnnnnnnnnnnnnnnnnnnnnnnnnnnnnnnnnnnnnnnnnnnnnnnnnnnnnnnnnnnnnnnnnnnnnnnnnnnnnnnnnnnnnnnnnnnnnnnnnnnnnnnnnnnnnnnnnnnnnnnnnnnnnnnnnnnnnnnnnnnnnnnnnnnnnnnnnnnnnnnnnnnnnnnnnnnnnnnnnnnnnnnnnnnnnnnnnnnnnnnnnnnnnnnnnnnnnnnnnnnnnnnnnnnnnnnnnnnnnnnnnnnnnnnnnnnnnnnnnnnnnnnnnnnnnnnnnnnnnnnnnnnnnnnnnnnnnnnnnnnnnnnnnnnnnnnnnnnnnnnnnnnnnnnnnnnnnnnnnnnnnnnnnnnnnnnnnnnnnnnnnnnnnnnnnnnnnnnnnnnnnnnnnnnnnnnnnnnnnnnnnnnnnnnnnnnnnnnnnnnnnnnnnnnnnnnnnnnnnnnnnnnnnnnnnnnnnnnnnnnnnnnnnnnnnnnnnnnnnnnnnnnnnnnnnnnnnnnnnnnnnnnnnnnnnnnnnnnnnnnnnnnnnnnnnnnnnnnnnnnnnnnnnnnnnnnnnnnnnnnnnnnnnnnnnnnnnnnnnnnnnnnnnnnnnnnnnnnnnnnnnnnnnnnnnnnnnnnnnnnnnnnnnnnnnnnnnnnnnnnnnnnnnnnnnnnnnnnnnnnnnnnnnnnnnnnnnnnnnnnnnnnnnnnnnnnnnnnnnnnnnnnnnnnnnnnnnnnnnnnnnnnnnnnnnnnnnnnnnnnnnnnnnnnnnnnnnnnnnnnnnnnnnnnnnnnnnnnnnnnnnnnnnnnnnnnnnnnnnnnnnnnnnnnnnnnnnnnnnnnnnnnnnnnnnnnnnnnnnnnnnnnnnnnnnnnnnnnnnnnnnnnnnnnnnnnnnnnnnnnnnnnnnnnnnnnnnnnnnnnnnnnnnnnnnnnnnnnnnnnnnnnnnnnnnnnnnnnnnnnnnnnnnnnnnnnnnnnnnnnnnnnnnnnnnnnnnnnnnnnnnnnnnnnnnnnnnnnnnnnnnnnnnnnnnnnnnnnnnnnnnnnnnnnnnnnnnnnnnnnnnnnnnnnnnnnnnnnnnnnnnnnnnnnnnnnnnnnnnnnnnnnnnnnnnnnnnnnnnnnnnnnnnnnnnnnnnnnnnnnnnnnnnnnnnnnnnnnnnnnnnnnnnnnnnnnnnnnnnnnnnnnnnnnnnnnnnnnnnnnnnnnnnnnnnnnnnnnnnnnnnnnnnnnnnnnnnnnnnnnnnnnnnnnnnnnnnnnnnnnnnnnnnnnnnnnnnnnnnnnnnnnnnnnnnnnnnnnnnnnnnnnnnnnnnnnnnnnnnnnnnnnnnnnnnnnnnnnnnnnnnnnnnnnnnnnnnnnnnnnnnnnnnnnnnnnnnnnnnnnnnnnnnnnnnnnnnnnnnnnnnnnnnnnnnnnnnnnnnnnnnnnnnnnnnnnnnnnnnnnnnnnnnnnnnnnnnnnnnnnnnnnnnnnnnnnnnnnnnnnnnnnnnnnnnnnnnnnnnnnnnnnnnnnnnnnnnnnnnnnnnnnnnnnnnnnnnnnnnnnnnnnnnnnnnnnnnnnnnnnnnnnnnnnnnnnnnnnnnnnnnnnnnnnnnnnnnnnnnnnnnnnnnnnnnnnnnnnnnnnnnnnnnnnnnnnnnnnnnnnnnnnnnnnnnnnnnnnnnnnnnnnnnnnnnnnnnnnnnnnnnnnnnnnnnnnnnnnnnnnnnnnnnnnnnnnnnnnnnnnnnnnnnnnnnnnnnnnnnnnnnnnnnnnnnnnnnnnnnnnnnnnnnnnnnnnnnnnnnnnnnnnnnnnnnnnnnnnnnnnnnnnnnnnnnnnnnnnnnnnnnnnnnnnnnnnnnnnnnnnnnnnnnnnnnnnnnnnnnnnnnnnnnnnnnnnnnnnnnnnnnnnnnnnnnnnnnnnnnnnnnnnnnnnnnnnnnnnnnnnnnnnnnnnnnnnnnnnnnnnnnnnnnnnnnnnnnnnnnnnnnnnnnnnnnnnnnnnnnnnnnnnnnnnnnnnnnnnnnnnnnnnnnnnnnnnnnnnnnnnnnnnnnnnnnnnnnnnnnnnnnnnnnnnnnnnnnnnnnnnnnnnnnnnnnnnnnnnnnnnnnnnnnnnnnnnnnnnnnnnnnnnnnnnnnnnnnnnnnnnnnnnnnnnnnnnnnnnnnnnnnnnnnnnnnnnnnnnnnnnnnnnnnnnnnnnnnnnnnnnnnnnnnnnnnnnnnnnnnnnnnnnnnnnnnnnnnnnnnnnnnnnnnnnnnnnnnnnnnnnnnnnnnnnnnnnnnnnnnnnnnnnnnnnnnnnnnnnnnnnnnnnnnnnnnnnnnnnnnnnnnnnnnnnnnnnnnnnnnnnnnnnnnnnnnnnnnnnnnnnnnnnnnnnnnnnnnnnnnnnnnnnnnnnnnnnnnnnnnnnnnnnnnnnnnnnnnnnnnnnnnnnnnnnnnnnnnnnnnnnnnnnnnnnnnnnnnnnnnnnnnnnnnnnnnnnnnnnnnnnnnnnnnnnnnnnnnnnnnnnnnnnnnnnnnnnnnnnnnnnnnnnnnnnnnnnnnnnnnnnnnnnnnnnnnnnnnnnnnnnnnnnnnnnnnnnnnnnnnnnnnnnnnnnnnnnnnnnnnnnnnnnnnnnnnnnnnnnnnnnnnnnnnnnnnnnnnnnnnnnnnnnnnnnnnnnnnnnnnnnnnnnnnnnnnnnnnnnnnnnnnnnnnnnnnnnnnnnnnnnnnnnnnnnnnnnnnnnnnnnnnnnnnnnnnnnnnnnnnnnnnnnnnnnnnnnnnnnnnnnnnnnnnnnnnnnnnnnnnnnnnnnnnnnnnnnnnnnnnnnnnnnnnnnnnnnnnnnnnnnnnnnnnnnnnnnnnnnnnnnnnnnnnnnnnnnnnnnnnnnnnnnnnnnnnnnnnnnnnnnnnnnnnnnnnnnnnnnnnnnnnnnnnnnnnnnnnnnnnnnnnnnnnnnnnnnnnnnnnnnnnnnnnnnnnnnnnnnnnnnnnnnnnnnnnnnnnnnnnnnnnnnnnnnnnnnnnnnnnnnnnnnnnnnnnnnnnnnnnnnnnnnnnnnnnnnnnnnnnnnnnnnnnnnnnnnnnnnnnnnnnnnnnnnnnnnnnnnnnnnnnnnnnnnnnnnnnnnnnnnnnnnnnnnnnnnnnnnnnnnnnnnnnnnnnnnnnnnnnnnnnnnnnnnnnnnnnnnnnnnnnnnnnnnnnnnnnnnnnnnnnnnnnnnnnnnnnnnnnnnnnnnnnnnnnnnnnnnnnnnnnnnnnnnnnnnnnnnnnnnnnnnnnnnnnnnnnnnnnnnnnnnnnnnnnnnnnnnnnnnnnnnnnnnnnnnnnnnnnnnnnnnnnnnnnnnnnnnnnnnnnnnnnnnnnnnnnnnnnnnnnnnnnnnnnnnnnnnnnnnnnnnnnnnnnnnnnnnnnnnnnnnnnnnnnnnnnnnnnnnnnnnnnnnnnnnnnnnnnnnnnnnnnnnnnnnnnnnnnnnnnnnnnnnnnnnnnnnnnnnnnnnnnnnnnnnnnnnnnnnnnnnnnnnnnnnnnnnnnnnnnnnnnnnnnnnnnnnnnnnnnnnnnnnnnnnnnnnnnnnnnnnnnnnnnnnnnnnnnnnnnnnnnnnnnnnnnnnnnnnnnnnnnnnnnnnnnnnnnnnnnnnnnnnnngcttcctgcgccgtgccgtcacgttgcgcaacatgcgcagcgcggccgaggcgggcaggccctaccggctgccacaggtctacagcgaaatgatcgggcaggacgccgaaagcgagaagcaggcaggtgatatcgatctgctggcgcttcgcaaggcgcgcgaagcaagccccgtgttggacttgttcggcagcgggctgggcatcaagtcaaggctgaaagtcagccatttcctgccgcaggtgaacgtgctgccagaggtgttcactggggtaagaaaagatctggacgacacggaagaagccttggatctgatggacaagtccgacatggcaacctttctcggtcgcagcgaaagcaacaacaaacgggcagccgccgctgcggtggtcaagcaactggagggtcaagtcaggcgacttgagaagaagggggaagccgtccccgacgacgtggccaaggcgctggctgtcgccaaggcggagtttgacaaacacaagggggatatgggcgacatgcagaacagcacccgtaccatcgtgcagcactatgccttgccggcggggctggagctatcgggccgcatcgtggtcgagaacgtccgcgacacggacatggagttgctggactatgcgctggaacagttcagcctgaaaccggttctgggcgcccacagcgcgcgagggtgcggagaactggccggcacatttcggttcttcgacggggatggcaagctgttgaaaacggtggtggttggggactacaaaccctcacgcgtgatgcttttttctccagatgaatagcaaaaagtaaaaaaattcaaggacttaagatcgttcggatcaagccgcccttgaatggggtggctactagaagggcaaccacatgctccagtccacctctgcggatcaagccgcccttgaatggggtggctactagaagtcgaacgcctggacccaggtggcccgtgacgatcaagccgcccttgaatggggtggctactagaagaagtgcgggaagtcgccgccctcagtgaaggatcaagccgcccttgaatggggtggctactagaagtagaacagctggatgggcgcggcgcccttggatcaagccgcccttgaatggggtggctaatagaagtgcagatccgtcacgcgcccatcgcggtaggatcaagccgcccctgaatggggtggctactagaagggcacggtgatcgacggcaatctgttggtcaatcaagccgcccggtaatggggtggctactagaaacaggtcatgaccgcgcaagcgatccgcaatggtcaagccgcccggtagttgggtggctactagaagatcgttgaccaggctacggacgtggcagagggtcaagccgcccagcatttgggtggctgatggattccgtggccgatcacggagattggcttcccggtaagccactcggacagggaaagccttgattgatcaaaatgggttcgaatgcccgggatgaaatgttcccgcgcggatgcagatcggacaggaagaccaatgtttcgctcaactgaacaagcgaatttcagcgccatcgtcgcaaggcacatggcgagcccggacggccccttgctcatggagggagcgacgggtctgggcaagacgcgcgcctacctcgctgcggtcatgagggtggctgctgcaggcaggcgcgttgcgatagcaatgcctagtcaccagttgatcgatcaattgttgacgtctgccgatctggctgccacccaggtggatagtgtgcgagttctggcctttcggccctctcgtttcttggacgacaaaaaggaataccagacccaacgcaccgccacgttggaagccgaagtgatggtctgcaccagcgcgtcggtcatcatcgaccagcgcctgaagggaggctacaacggcgccaccgagcgggattacctagtgttcgatgaagcggatcagttgcccgatgctgctgcgttgcaaagcgactgcgaaatcagtgcacagcaattgagtgacctcggggttgcggtgcaaagcgcacagcaggctgccaccgaagttttgatgaagaaggggctggaacccgaggtccgggccgccgccctgatgattctggaagccgtccaggaaccggcgtggtaccacaaggcaggggtgaccgatgacggcggcatcgcgctgtttcacaagatgcccggtcgattgctcaagcgcattgccaaccgcaaccaagtggccttcatcagcgcaacgctcacagtcggggacaggtttgatgatttcaagcgggcacttggcatccagaagcagagcgacttgtcgtccatcatcgagcctcagcggcacgggcaactcacgtttgttgtcgccgatgcagaggtcgatacgccagagtggcgtggcctgacgcaggcgaccatcaatcaggccgcaggaaagggcacagtgctggtggtgacgcccagccattcactggcgcaggaactgggacaactggtggacggagccactgtgcggagcgccgccgagaccgcaaccgaggcagcagcacgcatgggggacagcaacgttctgatcgcagccggtgcttgggcagggctggacacgcccattcgctggaaatccatcgtggtgccccgtgtgccttacgaacgccctgtgatccttgacggcgaggttgaaagcagctttctggatacacgaaatacggctgtgcgtcgcttgcgtcaggtcatcggccgtggcctccgaacgcccgaagccgaatgcacgatctacgtgctggaccgtcgctaccgcaacgtggaggcgtttattcccaagcggtttcgcgcacagtgggcgggtcgcttgtatctggaggggcgccgcaacgaagtcacgctgtcgaagatcgagcgcgacccgtcggtacgcaaggcggcgttaaagcattacggcctgaagtgcatgggctgcggattcattccaagggtcgagagccagcttgacgtgcatcacctgaatccggtggcaggaggcgagcgcctgacgggaatcagggacgtcgccgtcctgtgtgccaactgtcaccggctggtgcattcgactgatcccccgatggcagtagagacgcttggggacctaggtgcaacggggggctcggcatgagccataagacctgacagcgatggcgggacaagggagctaagccggtctgttcgtctacggctacacggctacttcacagcgctggtctacgatcaaccatcctcgttcccgtccatgggggcctccacagggacccatttcgacaagtctggccgttttcgtgctctgcgaacggtgccgacaaagattgccttaggctttctaggcgccggagccaccatctgggccatcgcttggtcgttcagaactttgagcagtgcttctcgcgggaacatccacgaagttccgtacttgactccggggagcttatgagcccgcgccttgctctcaaccgtgcaggtgctgcaggacagtagattcgcgacctcttgagtggtaagtaccaacggcggaatggccgcgtcgtgcggcataggccgggaatgtatttcgtcgttcacggggagtccttcttgggtgtgacctgcccctgacagcggtacaaggctgacagggggcggtcaggtcggcgggaggcgtctgtcagtccgtcatagcctattggcagatggcgcccagccactttcgcactggtggcgcgctcacgacacgtgccaatggtgcccgcgtcgggctcaggtccctaaaagtaatatctccaaaactagttccaggcggcgagccagagtcagtctggcatccaaatggatgttcatccgggtgagctcattgaggaaaccggttttgtcgtgactcccagtcactcaaactcaaccccgataaactgaaacagcctattggaccttcataaggtggctcgcccaccacgccattagagcccgacgcttgtctagaaattcattcttgtcatagatgccacgaacccgatcagcgggcgcgtgtgagaggctgtactcaatggcttccgtcctgttcggcccatggtagggccacccgtcgtgcgcaactgtgctgaagaccttgcgcagtccgtgggcggtcagttcttcgccccagcccatgcgctgcaacaggtcattgaccgcgttttcgctgagcatgcgccctttgtagttgccgtcaatgtgaacgaacaccagcccagccttgacgtcgcgcagggcttgcccggcctctcgttgccactcccgaacctgccgcagaacctctgccgcctcgtggctcagtgggatcgtccaaggaaccctgcgcttcattctgtttgccgggaccctgacgatgggcgtatccccttccagtccctcgacttcatcccatcgcagtgccctgagttcaagggttcgcgcagctgtcagggtcagcagacgcagcaactgcgctgtcaccgggtagcgttcgccagtgtctgccttgagcactgaccgccagaagtcaggcaatctggcgacgtcaaagaaccgacgtccttctacctttggcttgtccagaaaggtgcgcgcggccgtgacagggtttacgcctgcgaaccaccccttgctggcagcgaaggcgagggcgcgctcaaggtccgcgcttgagcggcgcagggtttctgctccgctgaatccggccccctcgcgtttgccccgcgcgcgcattgccttgcgcatcttgtcgaacgcatccgctacgtcggcaaccgtgagactctcgacgggggtgtctccgaggtgggggaagtagtcctccagccggcgcaggcgctgggcgcggtacttgtcgctagacagcctgcccgctgtcgccgtgtgccactccacgc

SEQ ID NO: 151 - DNA, 13373 bp, Artificial Sequence
  Synthetic Oligonucleotide
  misc_feature (1)..(3817): n is a, c, g, or t
nnnnnnnnnnnnnnnnnnnnnnnnnnnnnnnnnnnnnnnnnnnnnnnnnnnnnnnnnnnnnnnnnnnnnnnnnnnnnnnnnnnnnnnnnnnnnnnnnnnnnnnnnnnnnnnnnnnnnnnnnnnnnnnnnnnnnnnnnnnnnnnnnnnnnnnnnnnnnnnnnnnnnnnnnnnnnnnnnnnnnnnnnnnnnnnnnnnnnnnnnnnnnnnnnnnnnnnnnnnnnnnnnnnnnnnnnnnnnnnnnnnnnnnnnnnnnnnnnnnnnnnnnnnnnnnnnnnnnnnnnnnnnnnnnnnnnnnnnnnnnnnnnnnnnnnnnnnnnnnnnnnnnnnnnnnnnnnnnnnnnnnnnnnnnnnnnnnnnnnnnnnnnnnnnnnnnnnnnnnnnnnnnnnnnnnnnnnnnnnnnnnnnnnnnnnnnnnnnnnnnnnnnnnnnnnnnnnnnnnnnnnnnnnnnnnnnnnnnnnnnnnnnnnnnnnnnnnnnnnnnnnnnnnnnnnnnnnnnnnnnnnnnnnnnnnnnnnnnnnnnnnnnnnnnnnnnnnnnnnnnnnnnnnnnnnnnnnnnnnnnnnnnnnnnnnnnnnnnnnnnnnnnnnnnnnnnnnnnnnnnnnnnnnnnnnnnnnnnnnnnnnnnnnnnnnnnnnnnnnnnnnnnnnnnnnnnnnnnnnnnnnnnnnnnnnnnnnnnnnnnnnnnnnnnnnnnnnnnnnnnnnnnnnnnnnnnnnnnnnnnnnnnnnnnnnnnnnnnnnnnnnnnnnnnnnnnnnnnnnnnnnnnnnnnnnnnnnnnnnnnnnnnnnnnnnnnnnnnnnnnnnnnnnnnnnnnnnnnnnnnnnnnnnnnnnnnnnnnnnnnnnnnnnnnnnnnnnnnnnnnnnnnnnnnnnnnnnnnnnnnnnnnnnnnnnnnnnnnnnnnnnnnnnnnnnnnnnnnnnnnnnnnnnnnnnnnnnnnnnnnnnnnnnnnnnnnnnnnnnnnnnnnnnnnnnnnnnnnnnnnnnnnnnnnnnnnnnnnnnnnnnnnnnnnnnnnnnnnnnnnnnnnnnnnnnnnnnnnnnnnnnnnnnnnnnnnnnnnnnnnnnnnnnnnnnnnnnnnnnnnnnnnnnnnnnnnnnnnnnnnnnnnnnnnnnnnnnnnnnnnnnnnnnnnnnnnnnnnnnnnnnnnnnnnnnnnnnnnnnnnnnnnnnnnnnnnnnnnnnnnnnnnnnnnnnnnnnnnnnnnnnnnnnnnnnnnnnnnnnnnnnnnnnnnnnnnnnnnnnnnnnnnnnnnnnnnnnnnnnnnnnnnnnnnnnnnnnnnnnnnnnnnnnnnnnnnnnnnnnnnnnnnnnnnnnnnnnnnnnnnnnnnnnnnnnnnnnnnnnnnnnnnnnnnnnnnnnnnnnnnnnnnnnnnnnnnnnnnnnnnnnnnnnnnnnnnnnnnnnnnnnnnnnnnnnnnnnnnnnnnnnnnnnnnnnnnnnnnnnnnnnnnnnnnnnnnnnnnnnnnnnnnnnnnnnnnnnnnnnnnnnnnnnnnnnnnnnnnnnnnnnnnnnnnnnnnnnnnnnnnnnnnnnnnnnnnnnnnnnnnnnnnnnnnnnnnnnnnnnnnnnnnnnnnnnnnnnnnnnnnnnnnnnnnnnnnnnnnnnnnnnnnnnnnnnnnnnnnnnnnnnnnnnnnnnnnnnnnnnnnnnnnnnnnnnnnnnnnnnnnnnnnnnnnnnnnnnnnnnnnnnnnnnnnnnnnnnnnnnnnnnnnnnnnnnnnnnnnnnnnnnnnnnnnnnnnnnnnnnnnnnnnnnnnnnnnnnnnnnnnnnnnnnnnnnnnnnnnnnnnnnnnnnnnnnnnnnnnnnnnnnnnnnnnnnnnnnnnnnnnnnnnnnnnnnnnnnnnnnnnnnnnnnnnnnnnnnnnnnnnnnnnnnnnnnnnnnnnnnnnnnnnnnnnnnnnnnnnnnnnnnnnnnnnnnnnnnnnnnnnnnnnnnnnnnnnnnnnnnnnnnnnnnnnnnnnnnnnnnnnnnnnnnnnnnnnnnnnnnnnnnnnnnnnnnnnnnnnnnnnnnnnnnnnnnnnnnnnnnnnnnnnnnnnnnnnnnnnnnnnnnnnnnnnnnnnnnnnnnnnnnnnnnnnnnnnnnnnnnnnnnnnnnnnnnnnnnnnnnnnnnnnnnnnnnnnnnnnnnnnnnnnnnnnnnnnnnnnnnnnnnnnnnnnnnnnnnnnnnnnnnnnnnnnnnnnnnnnnnnnnnnnnnnnnnnnnnnnnnnnnnnnnnnnnnnnnnnnnnnnnnnnnnnnnnnnnnnnnnnnnnnnnnnnnnnnnnnnnnnnnnnnnnnnnnnnnnnnnnnnnnnnnnnnnnnnnnnnnnnnnnnnnnnnnnnnnnnnnnnnnnnnnnnnnnnnnnnnnnnnnnnnnnnnnnnnnnnnnnnnnnnnnnnnnnnnnnnnnnnnnnnnnnnnnnnnnnnnnnnnnnnnnnnnnnnnnnnnnnnnnnnnnnnnnnnnnnnnnnnnnnnnnnnnnnnnnnnnnnnnnnnnnnnnnnnnnnnnnnnnnnnnnnnnnnnnnnnnnnnnnnnnnnnnnnnnnnnnnnnnnnnnnnnnnnnnnnnnnnnnnnnnnnnnnnnnnnnnnnnnnnnnnnnnnnnnnnnnnnnnnnnnnnnnnnnnnnnnnnnnnnnnnnnnnnnnnnnnnnnnnnnnnnnnnnnnnnnnnnnnnnnnnnnnnnnnnnnnnnnnnnnnnnnnnnnnnnnnnnnnnnnnnnnnnnnnnnnnnnnnnnnnnnnnnnnnnnnnnnnnnnnnnnnnnnnnnnnnnnnnnnnnnnnnnnnnnnnnnnnnnnnnnnnnnnnnnnnnnnnnnnnnnnnnnnnnnnnnnnnnnnnnnnnnnnnnnnnnnnnnnnnnnnnnnnnnnnnnnnnnnnnnnnnnnnnnnnnnnnnnnnnnnnnnnnnnnnnnnnnnnnnnnnnnnnnnnnnnnnnnnnnnnnnnnnnnnnnnnnnnnnnnnnnnnnnnnnnnnnnnnnnnnnnnnnnnnnnnnnnnnnnnnnnnnnnnnnnnnnnnnnnnnnnnnnnnnnnnnnnnnnnnnnnnnnnnnnnnnnnnnnnnnnnnnnnnnnnnnnnnnnnnnnnnnnnnnnnnnnnnnnnnnnnnnnnnnnnnnnnnnnnnnnnnnnnnnnnnnnnnnnnnnnnnnnnnnnnnnnnnnnnnnnnnnnnnnnnnnnnnnnnnnnnnnnnnnnnnnnnnnnnnnnnnnnnnnnnnnnnnnnnnnnnnnnnnnnnnnnnnnnnnnnnnnnnnnnnnnnnnnnnnnnnnnnnnnnnnnnnnnnnnnnnnnnnnnnnnnnnnnnnnnnnnnnnnnnnnnnnnnnnnnnnnnnnnnnnnnnnnnnnnnnnnnnnnnnnnnnnnnnnnnnnnnnnnnnnnnnnnnnnnnnnnnnnnnnnnnnnnnnnnnnnnnnnnnnnnnnnnnnnnnnnnnnnnnnnnnnnnnnnnnnnnnnnnnnnnnnnnnnnnnnnnnnnnnnnnnnnnnnnnnnnnnnnnnnnnnnnnnnnnnnnnnnnnnnnnnnnnnnnnnnnnnnnnnnnnnnnnnnnnnnnnnnnnnnnnnnnnnnnnnnnnnnnnnnnnnnnnnnnnnnnnnnnnnnnnnnnnnnnnnnnnnnnnnnnnnnnnnnnnnnnnnnnnnnnnnnnnnnnnnnnnnnnnnnnnnnnnnnnnnnnnnnnnnnnnnnnnnnnnnnnnnnnnnnnnnnnnnnnnnnnnnnnnnnnnnnnnnnnnnnnnnnnnnnnnnnnnnnnnnnnnnnnnnnnnnnnnnnnnnnnnnnnnnnnnnnnnnnnnnnnnnnnnnnnnnnnnnnnnnnnnnnnnnnnnnnnnnnnnnnnnnnnnnnnnnnnnnnnnnnnnnnnnnnnngtaccaaatgtatttatacaccaagttgaatttgaatttgtaaattaggggaccaaaacgggaccaaatcgcatatttcgaattgtttgtgaattaacagggggccccatttcatttcatagttctcctgaccccaccgtaaccccatctcctaaaacggccgcatttgattgggctggtatacatagtattttgctcaaagggttttgtgggattgtattagtactactcggccgtaactgtaaatatgtcgggtagttgtaaataagggtgtcccagattgaatttctattctgaaaacacgaagaagctctaccttccaatgagcattaacactgttaatggtgaaataaaaaaatttctcattctctaaattgagcagtatatctttcccctgattcatttttggaaatataaccttggggactaggtttcttgtaagttgggagattcttacggtaacctagtactgtcatcttcgagtaaagccaatatttggtgaaatcttttatatgggggaccaattggcactgcaatcaatagtggaacaggagctggttttaactaccctccggccgtaaccgtaaaaatgtcgggaagttgtaaataagggtatcccagattgaatttctattgtgaaaacacgtagaagttctaccttgtgacaaggggctaacactgttagcctgttgggaaaaaattaaataccctccagagtactatttgtagctatttatggttttatgcttgttcacggatcaaaatttttctgcaaccttcttaatgaatttagcggaatcgatgcctatggcttggcagtaattgataaattcaacaatatctattgatcgttctcctgactcaatcttggagatataactttgaggacgatgaagtaacttagctagctctttctgcagtaaaccagaagataaccgagcttttttgagttcggctcggaataattcatatttttgtctttccagcatgaaaacatgctaaattctattttagaatatcccatttcaggatatataaacaaggcataagttaaaacctaaaataaaggtgagtttttaataaccatggaaattaggactacaggtgtttaaaaatatatttaaaggtaaagctaggacaatgattgaactagcggaaactgctgaaatttatccggcaatggaagatggaaattacaaggcattcattgttcaaatattagagagtaatacatattttgcttctgtcttgaaaaaagaagggcgtgacgaagggattaataaatttgttgacgttgttgaaaatagaatatcaagtaaaaattttgatgatccattggcagtagttgaaaaaatgtatggtgctgatccaaatataagaaaaaattggaatgctgaacgtattgttatctgccgtgatgagaaacatttgtttggttggatcccagaggattaaaaattaaaatatgggctatgaattagttgctttttctccaagtggtattctagcccccattagattactagccgttatggttccggttggagaggttactcaaaatatctggttagatgctttatctactcgtgtttgcaatatggtaaaactagaatctgatcctgtagaagcttcgaattgggcctgtaaagaactagattgtccaccttgcgataatccaaggcagttggggcaattcttggttgagcataatttaaacctacaaacttggattaatagttcaatcattaatgacgaagatcctttttcggcatatgctacagcagataaccctaaagctctgaaggcaattcaaagcaccagtttaaagacatgggtaagacaggctaaaaaattaatgactggtgaagcattagaaaactatatgagatctcataactatggatagtaacttcataacaaaagttgcctattatccaaaagaactcacacttccaagaagaattctttatgtaatggttccaaagggagaagtcacaatggatatatggcttgattgccttattgatcgtgtgcagatgatgtttgagaggaaaagatggtttcgtaggagatatgccaacaagatatgtaagattttgagaattccagcctgtgaagatctagataaccttgggcgatatattattaattacaaatccgattacaccattggttttaattctgatttcgaaagatggatcaatgcattcctgccaagaaaaaaactatttcctaaattagtaatggagcaggacgaggaggtatataaagatatccaagacactgatttagaaacttgggctgggttagtcaggttgatgacaagtggaaggctttcatatgaccatgatctgcacaaagagtatgggttaaataagtatttttttgaaaacaataaaaaaaatcagcttaagtagccttgaaggtacccccaattatttcctgtattccaaaccccaccgtacccccaccccctaaaagcacccattgtttttaggctaggcatacatagtattttgctctatcaattcttttgatgccaaagtgaggggtttaacactgttaacctccaatatgaccttcaggaaaataattactaaccattatttggaaagcgaaatattaattaggagacaccccttatttatggtagattagacatcaatcatcaggtaatcaactaagtaaggacttgtagtaactttggtaaaaattaaccgttacaaaaaataaaatatggaaaaaattaaagttacagcaacaatgaaaagtccttttattaaagttggctatatgacactggatgctcttttagcagcactaaaatttgatgaattacaaaatgtagagcaagctcaccaatctatacccatcaagcagactaaagggctgtttcatgccagcgctgctttttttgaaccaatagacaaaggaaaagaggtttttattgctgcccttcatccagaacacacaatcgatcctcatttaattcttaaaaacaaaaaaggtcaaattcatcgaaagtttgataattcgtttactaatgtcttgaatacttaccccaagattactgcgtcacatattacttggtatgccgagggtgatgctgatgaaattaaaaaactactttaccctgttcattttattggaaaaagacgggctagtggctttggcgaagttgaagaatggaatattgaagcgaatgagttagatggtattttaggtaattttggtgagccacttaggccaattcctattgatttatacaatggggataaatcatatcctgtaactgatgctgcatggcgtccagcgtactggaatattttaaatagaactgcgtgttatgcaccatctgaataggtccttatgaacgtattagacttatttaatcaaagcatgggatgccatttggtggagcaaacagccaatgtggttgacaatgcccaaagggctttatcgtctggtcatacgatgttaaagggggggaatcctcaacgcatctcttctgggtgggctattgttcaacctcaacgaactactatgcagtttaagttggcagccaagggaattatttacagtgaaattactcgttatgaggcctttcaagaactgctacataattggaatggaacaccatctatattaatagtttttgataaaaaacctgttccagtaacaaatttattcatcacatatgatgttcgctgtgtgagagtttgctcgccaaagggcgttgaaacttttgattacactcaagagcctcagagagatggctgtatgacacataaagtactgtttaagcagcgaggtaaatatgtttgactatattgtgccgaaaacaatgcatttgagtttttacgctttacatcaaatgactgctaaattagtcaatggagaaaaagttcttttcacagattacggagatcatttagttctgagaacggatgttgtcttaaattttgaaatcttaccaacaaaatctttcttattaaatgatgttttagtgttcgaattgagagccagtgtaggaacaaaagtcaaagggaagcaccgatattttcatacaagtgattggagaagtaggcatgattggcttactcaaaaagcatccgagaatggctttgaattattgtcagtaagttgctcagctgagattgccgaagttcaaaaagggcctcaaaaatttaccattgataagacggacttttcagggggattaaagattattgatattgaaaaatttaaaacggctatttattttggaattggtaataaggctaaagcatatggctttggcatgttaaatatttaattaggagaatcacatgacaaccattgttattaaatctgttattaatacggaagctccattatcgattgcccttccagttgcagaaggggctatggcaaataaatttggaaatttccccattatgactagaggcgttgatgatgatggtaataaattacaaacagcctatttaccatccaccacaattcgaggattccttaggagagcaattgttatagacgcaatgcgaatcgctgcagctaatggtaaacattacactttacaaaaagcttatgaggatctgattgggcaagacgctgctagtgaatctgcccaagaaattgatttattaaaattattagcgcagcgtgaagcaaacccaattattgatttatttggtattggtttaacactacgatccagattattagtcagtcactttgtaccccaagtaaatattcttccagatgtttttacaggagttcgaaaggatttggacgatacggaaggagttttagaagcccttaatagttcagatcgtgatgagtttttaggccgctcggatgcaaactcaaggagagctttagctaaatcaacagtagatgatttagaaagaaaaatcagaaaaggtaaaaaagataattcaaatgttgaagattttgaaaaagccctcatatccgcaaaggaattaaaagaaaagtatgagagtgcaatggggtctatgcaaaatacttctagaacattagtaagtcattttgctttagcggctggaatatcattaaaaggaaaaattattattgagaacgcaagagatagagatttacctatgatcgagttagctttgaatactttaagtaatcggccgctattgggtgctcaaattgcccgaggatgtggggaaatatctgccatatttgatgttcatgttgatggtaatttaacaaaaaaaataagtattggtgagtggaaacctgcaattattaccgaattaaatcagggaaatgctaactaatatgtttattaatcatgactttattaaaggtcagatcaagccacctagattctgggtggctactagaactatcaccggactagtcacccgattagtgaagatcaagccacctagattctgggtggctactagaacttgtaaataccgtccaactcaggcgcacaagatcaagctacctagattctgggtggctactagaacggtaataaacccatcatcagtctgacttgcggatcaagccacctagatgttgggtggctactagaactgaagatggtctacagattacagaagatatgatcaagccacctagatgttgggtggctacttgaacataatcggcagttcgactgtatccgttcaggatcaagccacctagattctgggtggctactagaacgttggagtatcttcaatctttaagacaaagatcaagccacctagattctgggtggctactagaactagtgatatgaatatgaaatatttttaatcgatcaagccacctagattatgggtggctactagaacttgtctactactccttgcatccttgcacagagatcaagccacctagattatgggtggttactagaactcgtggacgtgaagtactacatcatccagcgatcaagccacctagattctgggtggctactagaactaatctactgtaatggcgttgcgtttgagtgatcaagccacctagaatttgggtggctactagaacaaggacggcacagagtataaacgcccaaaagatcaagccacctaggttgtgtggctactagcggggctagttagaatatagctagctccactggatattcagatcgtacattggattgaatgtagaatcagttactacttcaaaatatgattatgtttagatctcaagaacaaaaaaatttctcttctatcattgctgcacatatacaagtgcatgatgccccattattgctcgaaggtggcacaggattgggtaagactcgagcgtatttgtttgctttagtcgaggctgcgaaaaaagggaaaaaaattgcgattgttttaccaactcatcagttaattgatcaattactagtttctagcgatctaattgcgacaaaagatgaagttgtcatcgactcctttcggccacaaagcatgtttgatacacgccaaagttatgaactcaataaaaaagttgcgcttgaagcacaaattatgatctgtacgatggcaagcgtaattattgatcagagattaaatggtgaatataacggagtgatacatagagattacatcttatttgatgaggcggatcagcttccagatatgacagctttgcagtccgattttcaaattacgattgaagatcttaaagctttagatattaaggtaggctcagcaatcgaggcgctgaataagatcctaggaaagccaaatagagttgtcgagcctgaaattaaagctgcggcaaaagtcattcttgaggcgattgaagagccggcttggtatcaaaaaggtggctatgatgatgaaggtaacattgttttgacccataaactaccgggaagattattaaaaaagattagtaaccaaagtcatgtagcttttatttctgcaactttgagcgttaatgaatcttttgatgatttccaatttgcaatgggtattaaagaccgaagcatactctcagactttattgagccagaaaagcacggggagttgatttttaatattcaaccttttgatattgataaagataaatctgaatggttaatagcaaccataaaaacgatcaacgaagctccaaaaccgtgccttgtaattacaacatcccacgaaagctccctctctttgggatcatctattcctcaggcaactgtccgtattagtgaggaaactactaccgaatctgcaaaaagaatgacgaacgaaattctaattgctgcaggagcatgggctgggttagatactccaattcaatgggcttctgtagttataccaagagtgccttttggacagcctaatgtcatcgaaggcgaaatttttactaaatatttagatgcaagaaataccgctgtaaggagattacgacaagcaattggtagaggtatccgaagaccagattctaaatgtgctatttttatactagatggtcgagttaaaaaattacccaactttatacctaaaagatttcagtcttcttggaatagtcaaacttttacagagggtaatcgagtagaaatcacatattcgaaagctgagcgagatccatctgtaaggaaagctgcattaaaacattatggaaatcagtgcatgtcctgcggctatctacccaaagtgatcagccaactagatgtacatcatataaacccaatatcagagggagaaagaaataccaccctaaatgagttggttgttttatgcgctaattgtcatcgtctggcgcactctactaatccacctttagttttagaattcctaagatcgttggtgaaccaagaaactactgattagatagaagaatttgcactaaaaataagttttcttttgtgctagcattgcttaaaatatatgcagatcacttcacaaggatttgccatgaaaaatttcatatttccacgattaccaagaggcttaactcaaaaagaactccgcaaagaaatccgtagaagaatgaagattatggatgaaattggtttgattaaaaaatgatttgtagtgctaaaaatcgatctggtgtaccgtgccaaaagcattcactagatggtaagactagatgtcgactccatggaggattatccctcgctggcaaggatagtcctcgatacatccacggtagaaggtctaaagcatacattgaaaacaccagaagggtaagggctgagctaaggctattcgagcaactgggcaaggaatatggctggtttgtggggtagagggaatataccgagactgctcaaaaggtggcatatttttctaaaatagcgttactctatgaatatttgttaaatggttgccaattctctaacagtaacttgctaaaagtttattgctggatgatgcaatagatgaattagatattgatacaactactatatctgctgtacgaatagattccgttgttttttgtaaattaaagcttgataacttacttatgcatttcatatattgcctcttaatatgctacaaaaaacgatatatattaaaaaagtaataccgccaaagaaaagtttatttcaagctgaaatagatttattggttagtcaggtgaatgaggctacagggcgaaaaaataaaccttcattggagacggtttctaagcgtacacaagccgccaatatactaatccaagggttgtatcggtgtcatgttagtttttcatcagggattgcgttggcagttccacaccatcctagcgcttataaattaggcgatgaaaataagattcatgatattgggttcaaaatcgttatttctgtagtcgagacgatgatgaaattaggctggatcaaaagacgtcttggttatagaacatcagcagatgccggtgagactacgattttgcttgctacaggagatttatcaaaaaagtttgaaaaaataggtttggtttgggaggagatagaaacgattccagacgttctagtgctaagaaattatgatgcgaatactaaaaaaaagtacagacagaatgtcccagatagtgatttatttagaagaatggctgcgaatctcagaaaaattaataagtatttggtcaagcaagctatttgcgtatttgtttcaaataatacctatcaaagactaggtaatgaaatgacatttggtcagaaaaatacgctttatgactttaatcatcagggtaaatatcctcgttacctagatttcacaatggtccagttgaggcgaattttttcaagggataacatgaaactgggtggcaggttttatggagggtggtggcaatttatccctaaaaaataccgagtgcatattacgattaattctcagccaacaatcgaaattgattattctggtctgcatccgtgcatgatgtaccacctggagggtttaaagccaccagcaggcgatatgtatgacattggagtatggagcagtcctgaagaaatggaagtgaagcgtcccatcattaaagagttttttaatgcgattgtgaatgatgagtatggcgaatataagatgcctaagagttcacgaacgataatagggctatccaacaaaaaactaagagctaagat

SEQ ID NO: 152 - DNA, 13369 bp, Artificial Sequence
  Synthetic Oligonucleotide
  misc_feature (1)..(9849): n is a, c, g, or t
nnnnnnnnnnnnnnnnnnnnnnnnnnnnnnnnnnnnnnnnnnnnnnnnnnnnnnnnnnnnnnnnnnnnnnnnnnnnnnnnnnnnnnnnnnnnnnnnnnnnnnnnnnnnnnnnnnnnnnnnnnnnnnnnnnnnnnnnnnnnnnnnnnnnnnnnnnnnnnnnnnnnnnnnnnnnnnnnnnnnnnnnnnnnnnnnnnnnnnnnnnnnnnnnnnnnnnnnnnnnnnnnnnnnnnnnnnnnnnnnnnnnnnnnnnnnnnnnnnnnnnnnnnnnnnnnnnnnnnnnnnnnnnnnnnnnnnnnnnnnnnnnnnnnnnnnnnnnnnnnnnnnnnnnnnnnnnnnnnnnnnnnnnnnnnnnnnnnnnnnnnnnnnnnnnnnnnnnnnnnnnnnnnnnnnnnnnnnnnnnnnnnnnnnnnnnnnnnnnnnnnnnnnnnnnnnnnnnnnnnnnnnnnnnnnnnnnnnnnnnnnnnnnnnnnnnnnnnnnnnnnnnnnnnnnnnnnnnnnnnnnnnnnnnnnnnnnnnnnnnnnnnnnnnnnnnnnnnnnnnnnnnnnnnnnnnnnnnnnnnnnnnnnnnnnnnnnnnnnnnnnnnnnnnnnnnnnnnnnnnnnnnnnnnnnnnnnnnnnnnnnnnnnnnnnnnnnnnnnnnnnnnnnnnnnnnnnnnnnnnnnnnnnnnnnnnnnnnnnnnnnnnnnnnnnnnnnnnnnnnnnnnnnnnnnnnnnnnnnnnnnnnnnnnnnnnnnnnnnnnnnnnnnnnnnnnnnnnnnnnnnnnnnnnnnnnnnnnnnnnnnnnnnnnnnnnnnnnnnnnnnnnnnnnnnnnnnnnnnnnnnnnnnnnnnnnnnnnnnnnnnnnnnnnnnnnnnnnnnnnnnnnnnnnnnnnnnnnnnnnnnnnnnnnnnnnnnnnnnnnnnnnnnnnnnnnnnnnnnnnnnnnnnnnnnnnnnnnnnnnnnnnnnnnnnnnnnnnnnnnnnnnnnnnnnnnnnnnnnnnnnnnnnnnnnnnnnnnnnnnnnnnnnnnnnnnnnnnnnnnnnnnnnnnnnnnnnnnnnnnnnnnnnnnnnnnnnnnnnnnnnnnnnnnnnnnnnnnnnnnnnnnnnnnnnnnnnnnnnnnnnnnnnnnnnnnnnnnnnnnnnnnnnnnnnnnnnnnnnnnnnnnnnnnnnnnnnnnnnnnnnnnnnnnnnnnnnnnnnnnnnnnnnnnnnnnnnnnnnnnnnnnnnnnnnnnnnnnnnnnnnnnnnnnnnnnnnnnnnnnnnnnnnnnnnnnnnnnnnnnnnnnnnnnnnnnnnnnnnnnnnnnnnnnnnnnnnnnnnnnnnnnnnnnnnnnnnnnnnnnnnnnnnnnnnnnnnnnnnnnnnnnnnnnnnnnnnnnnnnnnnnnnnnnnnnnnnnnnnnnnnnnnnnnnnnnnnnnnnnnnnnnnnnnnnnnnnnnnnnnnnnnnnnnnnnnnnnnnnnnnnnnnnnnnnnnnnnnnnnnnnnnnnnnnnnnnnnnnnnnnnnnnnnnnnnnnnnnnnnnnnnnnnnnnnnnnnnnnnnnnnnnnnnnnnnnnnnnnnnnnnnnnnnnnnnnnnnnnnnnnnnnnnnnnnnnnnnnnnnnnnnnnnnnnnnnnnnnnnnnnnnnnnnnnnnnnnnnnnnnnnnnnnnnnnnnnnnnnnnnnnnnnnnnnnnnnnnnnnnnnnnnnnnnnnnnnnnnnnnnnnnnnnnnnnnnnnnnnnnnnnnnnnnnnnnnnnnnnnnnnnnnnnnnnnnnnnnnnnnnnnnnnnnnnnnnnnnnnnnnnnnnnnnnnnnnnnnnnnnnnnnnnnnnnnnnnnnnnnnnnnnnnnnnnnnnnnnnnnnnnnnnnnnnnnnnnnnnnnnnnnnnnnnnnnnnnnnnnnnnnnnnnnnnnnnnnnnnnnnnnnnnnnnnnnnnnnnnnnnnnnnnnnnnnnnnnnnnnnnnnnnnnnnnnnnnnnnnnnnnnnnnnnnnnnnnnnnnnnnnnnnnnnnnnnnnnnnnnnnnnnnnnnnnnnnnnnnnnnnnnnnnnnnnnnnnnnnnnnnnnnnnnnnnnnnnnnnnnnnnnnnnnnnnnnnnnnnnnnnnnnnnnnnnnnnnnnnnnnnnnnnnnnnnnnnnnnnnnnnnnnnnnnnnnnnnnnnnnnnnnnnnnnnnnnnnnnnnnnnnnnnnnnnnnnnnnnnnnnnnnnnnnnnnnnnnnnnnnnnnnnnnnnnnnnnnnnnnnnnnnnnnnnnnnnnnnnnnnnnnnnnnnnnnnnnnnnnnnnnnnnnnnnnnnnnnnnnnnnnnnnnnnnnnnnnnnnnnnnnnnnnnnnnnnnnnnnnnnnnnnnnnnnnnnnnnnnnnnnnnnnnnnnnnnnnnnnnnnnnnnnnnnnnnnnnnnnnnnnnnnnnnnnnnnnnnnnnnnnnnnnnnnnnnnnnnnnnnnnnnnnnnnnnnnnnnnnnnnnnnnnnnnnnnnnnnnnnnnnnnnnnnnnnnnnnnnnnnnnnnnnnnnnnnnnnnnnnnnnnnnnnnnnnnnnnnnnnnnnnnnnnnnnnnnnnnnnnnnnnnnnnnnnnnnnnnnnnnnnnnnnnnnnnnnnnnnnnnnnnnnnnnnnnnnnnnnnnnnnnnnnnnnnnnnnnnnnnnnnnnnnnnnnnnnnnnnnnnnnnnnnnnnnnnnnnnnnnnnnnnnnnnnnnnnnnnnnnnnnnnnnnnnnnnnnnnnnnnnnnnnnnnnnnnnnnnnnnnnnnnnnnnnnnnnnnnnnnnnnnnnnnnnnnnnnnnnnnnnnnnnnnnnnnnnnnnnnnnnnnnnnnnnnnnnnnnnnnnnnnnnnnnnnnnnnnnnnnnnnnnnnnnnnnnnnnnnnnnnnnnnnnnnnnnnnnnnnnnnnnnnnnnnnnnnnnnnnnnnnnnnnnnnnnnnnnnnnnnnnnnnnnnnnnnnnnnnnnnnnnnnnnnnnnnnnnnnnnnnnnnnnnnnnnnnnnnnnnnnnnnnnnnnnnnnnnnnnnnnnnnnnnnnnnnnnnnnnnnnnnnnnnnnnnnnnnnnnnnnnnnnnnnnnnnnnnnnnnnnnnnnnnnnnnnnnnnnnnnnnnnnnnnnnnnnnnnnnnnnnnnnnnnnnnnnnnnnnnnnnnnnnnnnnnnnnnnnnnnnnnnnnnnnnnnnnnnnnnnnnnnnnnnnnnnnnnnnnnnnnnnnnnnnnnnnnnnnnnnnnnnnnnnnnnnnnnnnnnnnnnnnnnnnnnnnnnnnnnnnnnnnnnnnnnnnnnnnnnnnnnnnnnnnnnnnnnnnnnnnnnnnnnnnnnnnnnnnnnnnnnnnnnnnnnnnnnnnnnnnnnnnnnnnnnnnnnnnnnnnnnnnnnnnnnnnnnnnnnnnnnnnnnnnnnnnnnnnnnnnnnnnnnnnnnnnnnnnnnnnnnnnnnnnnnnnnnnnnnnnnnnnnnnnnnnnnnnnnnnnnnnnnnnnnnnnnnnnnnnnnnnnnnnnnnnnnnnnnnnnnnnnnnnnnnnnnnnnnnnnnnnnnnnnnnnnnnnnnnnnnnnnnnnnnnnnnnnnnnnnnnnnnnnnnnnnnnnnnnnnnnnnnnnnnnnnnnnnnnnnnnnnnnnnnnnnnnnnnnnnnnnnnnnnnnnnnnnnnnnnnnnnnnnnnnnnnnnnnnnnnnnnnnnnnnnnnnnnnnnnnnnnnnnnnnnnnnnnnnnnnnnnnnnnnnnnnnnnnnnnnnnnnnnnnnnnnnnnnnnnnnnnnnnnnnnnnnnnnnnnnnnnnnnnnnnnnnnnnnnnnnnnnnnnnnnnnnnnnnnnnnnnnnnnnnnnnnnnnnnnnnnnnnnnnnnnnnnnnnnnnnnnnnnnnnnnnnnnnnnnnnnnnnnnnnnnnnnnnnnnnnnnnnnnnnnnnnnnnnnnnnnnnnnnnnnnnnnnnnnnnnnnnnnnnnnnnnnnnnnnnnnnnnnnnnnnnnnnnnnnnnnnnnnnnnnnnnnnnnnnnnnnnnnnnnnnnnnnnnnnnnnnnnnnnnnnnnnnnnnnnnnnnnnnnnnnnnnnnnnnnnnnnnnnnnnnnnnnnnnnnnnnnnnnnnnnnnnnnnnnnnnnnnnnnnnnnnnnnnnnnnnnnnnnnnnnnnnnnnnnnnnnnnnnnnnnnnnnnnnnnnnnnnnnnnnnnnnnnnnnnnnnnnnnnnnnnnnnnnnnnnnnnnnnnnnnnnnnnnnnnnnnnnnnnnnnnnnnnnnnnnnnnnnnnnnnnnnnnnnnnnnnnnnnnnnnnnnnnnnnnnnnnnnnnnnnnnnnnnnnnnnnnnnnnnnnnnnnnnnnnnnnnnnnnnnnnnnnnnnnnnnnnnnnnnnnnnnnnnnnnnnnnnnnnnnnnnnnnnnnnnnnnnnnnnnnnnnnnnnnnnnnnnnnnnnnnnnnnnnnnnnnnnnnnnnnnnnnnnnnnnnnnnnnnnnnnnnnnnnnnnnnnnnnnnnnnnnnnnnnnnnnnnnnnnnnnnnnnnnnnnnnnnnnnnnnnnnnnnnnnnnnnnnnnnnnnnnnnnnnnnnnnnnnnnnnnnnnnnnnnnnnnnnnnnnnnnnnnnnnnnnnnnnnnnnnnnnnnnnnnnnnnnnnnnnnnnnnnnnnnnnnnnnnnnnnnnnnnnnnnnnnnnnnnnnnnnnnnnnnnnnnnnnnnnnnnnnnnnnnnnnnnnnnnnnnnnnnnnnnnnnnnnnnnnnnnnnnnnnnnnnnnnnnnnnnnnnnnnnnnnnnnnnnnnnnnnnnnnnnnnnnnnnnnnnnnnnnnnnnnnnnnnnnnnnnnnnnnnnnnnnnnnnnnnnnnnnnnnnnnnnnnnnnnnnnnnnnnnnnnnnnnnnnnnnnnnnnnnnnnnnnnnnnnnnnnnnnnnnnnnnnnnnnnnnnnnnnnnnnnnnnnnnnnnnnnnnnnnnnnnnnnnnnnnnnnnnnnnnnnnnnnnnnnnnnnnnnnnnnnnnnnnnnnnnnnnnnnnnnnnnnnnnnnnnnnnnnnnnnnnnnnnnnnnnnnnnnnnnnnnnnnnnnnnnnnnnnnnnnnnnnnnnnnnnnnnnnnnnnnnnnnnnnnnnnnnnnnnnnnnnnnnnnnnnnnnnnnnnnnnnnnnnnnnnnnnnnnnnnnnnnnnnnnnnnnnnnnnnnnnnnnnnnnnnnnnnnnnnnnnnnnnnnnnnnnnnnnnnnnnnnnnnnnnnnnnnnnnnnnnnnnnnnnnnnnnnnnnnnnnnnnnnnnnnnnnnnnnnnnnnnnnnnnnnnnnnnnnnnnnnnnnnnnnnnnnnnnnnnnnnnnnnnnnnnnnnnnnnnnnnnnnnnnnnnnnnnnnnnnnnnnnnnnnnnnnnnnnnnnnnnnnnnnnnnnnnnnnnnnnnnnnnnnnnnnnnnnnnnnnnnnnnnnnnnnnnnnnnnnnnnnnnnnnnnnnnnnnnnnnnnnnnnnnnnnnnnnnnnnnnnnnnnnnnnnnnnnnnnnnnnnnnnnnnnnnnnnnnnnnnnnnnnnnnnnnnnnnnnnnnnnnnnnnnnnnnnnnnnnnnnnnnnnnnnnnnnnnnnnnnnnnnnnnnnnnnnnnnnnnnnnnnnnnnnnnnnnnnnnnnnnnnnnnnnnnnnnnnnnnnnnnnnnnnnnnnnnnnnnnnnnnnnnnnnnnnnnnnnnnnnnnnnnnnnnnnnnnnnnnnnnnnnnnnnnnnnnnnnnnnnnnnnnnnnnnnnnnnnnnnnnnnnnnnnnnnnnnnnnnnnnnnnnnnnnnnnnnnnnnnnnnnnnnnnnnnnnnnnnnnnnnnnnnnnnnnnnnnnnnnnnnnnnnnnnnnnnnnnnnnnnnnnnnnnnnnnnnnnnnnnnnnnnnnnnnnnnnnnnnnnnnnnnnnnnnnnnnnnnnnnnnnnnnnnnnnnnnnnnnnnnnnnnnnnnnnnnnnnnnnnnnnnnnnnnnnnnnnnnnnnnnnnnnnnnnnnnnnnnnnnnnnnnnnnnnnnnnnnnnnnnnnnnnnnnnnnnnnnnnnnnnnnnnnnnnnnnnnnnnnnnnnnnnnnnnnnnnnnnnnnnnnnnnnnnnnnnnnnnnnnnnnnnnnnnnnnnnnnnnnnnnnnnnnnnnnnnnnnnnnnnnnnnnnnnnnnnnnnnnnnnnnnnnnnnnnnnnnnnnnnnnnnnnnnnnnnnnnnnnnnnnnnnnnnnnnnnnnnnnnnnnnnnnnnnnnnnnnnnnnnnnnnnnnnnnnnnnnnnnnnnnnnnnnnnnnnnnnnnnnnnnnnnnnnnnnnnnnnnnnnnnnnnnnnnnnnnnnnnnnnnnnnnnnnnnnnnnnnnnnnnnnnnnnnnnnnnnnnnnnnnnnnnnnnnnnnnnnnnnnnnnnnnnnnnnnnnnnnnnnnnnnnnnnnnnnnnnnnnnnnnnnnnnnnnnnnnnnnnnnnnnnnnnnnnnnnnnnnnnnnnnnnnnnnnnnnnnnnnnnnnnnnnnnnnnnnnnnnnnnnnnnnnnnnnnnnnnnnnnnnnnnnnnnnnnnnnnnnnnnnnnnnnnnnnnnnnnnnnnnnnnnnnnnnnnnnnnnnnnnnnnnnnnnnnnnnnnnnnnnnnnnnnnnnnnnnnnnnnnnnnnnnnnnnnnnnnnnnnnnnnnnnnnnnnnnnnnnnnnnnnnnnnnnnnnnnnnnnnnnnnnnnnnnnnnnnnnnnnnnnnnnnnnnnnnnnnnnnnnnnnnnnnnnnnnnnnnnnnnnnnnnnnnnnnnnnnnnnnnnnnnnnnnnnnnnnnnnnnnnnnnnnnnnnnnnnnnnnnnnnnnnnnnnnnnnnnnnnnnnnnnnnnnnnnnnnnnnnnnnnnnnnnnnnnnnnnnnnnnnnnnnnnnnnnnnnnnnnnnnnnnnnnnnnnnnnnnnnnnnnnnnnnnnnnnnnnnnnnnnnnnnnnnnnnnnnnnnnnnnnnnnnnnnnnnnnnnnnnnnnnnnnnnnnnnnnnnnnnnnnnnnnnnnnnnnnnnnnnnnnnnnnnnnnnnnnnnnnnnnnnnnnnnnnnnnnnnnnnnnnnnnnnnnnnnnnnnnnnnnnnnnnnnnnnnnnnnnnnnnnnnnnnnnnnnnnnnnnnnnnnnnnnnnnnnnnnnnnnnnnnnnnnnnnnnnnnnnnnnnnnnnnnnnnnnnnnnnnnnnnnnnnnnnnnnnnnnnnnnnnnnnnnnnnnnnnnnnnnnnnnnnnnnnnnnnnnnnnnnnnnnnnnnnnnnnnnnnnnnnnnnnnnnnnnnnnnnnnnnnnnnnnnnnnnnnnnnnnnnnnnnnnnnnnnnnnnnnnnnnnnnnnnnnnnnnnnnnnnnnnnnnnnnnnnnnnnnnnnnnnnnnnnnnnnnnnnnnnnnnnnnnnnnnnnnnnnnnnnnnnnnnnnnnnnnnnnnnnnnnnnnnnnnnnnnnnnnnnnnnnnnnnnnnnnnnnnnnnnnnnnnnnnnnnnnnnnnnnnnnnnnnnnnnnnnnnnnnnnnnnnnnnnnnnnnnnnnnnnnnnnnnnnnnnnnnnnnnnnnnnnnnnnnnnnnnnnnnnnnnnnnnnnnnnnnnnnnnnnnnnnnnnnnnnnnnnnnnnnnnnnnnnnnnnnnnnnnnnnnnnnnnnnnnnnnnnnnnnnnnnnnnnnnnnnnnnnnnnnnnnnnnnnnnnnnnnnnnnnnnnnnnnnnnnnnnnnnnnnnnnnnnnnnnnnnnnnnnnnnnnnnnnnnnnnnnnnnnnnnnnnnnnnnnnnnnnnnnnnnnnnnnnnnnnnnnnnnnnnnnnnnnnnnnnnnnnnnnnnnnnnnnnnnnnnnnnnnnnnnnnnnnnnnnnnnnnnnnnnnnnnnnnnnnnnnnnnnnnnnnnnnnnnnnnnnnnnnnnnnnnnnnnnnnnnnnnnnnnnnnnnnnnnnnnnnnnnnnnnnnnnnnnnnnnnnnnnnnnnnnnnnnnnnnnnnnnnnnnnnnnnnnnnnnnnnnnnnnnnnnnnnnnnnnnnnnnnnnnnnnnnnnnnnnnnnnnnnnnnnnnnnnnnnnnnnnnnnnnnnnnnnnnnnnnnnnnnnnnnnnnnnnnnnnnnnnnnnnnnnnnnnnnnnnnnnnnnnnnnnnnnnnnnnnnnnnnnnnnnnnnnnnnnnnnnnnnnnnnnnnnnnnnnnnnnnnnnnnnnnnnnnnnnnnnnnnnnnnnnnnnnnnnnnnnnnnnnnnnnnnnnnnnnnnnnnnnnnnnnnnnnnnnnnnnnnnnnnnnnnnnnnnnnnnnnnnnnnnnnnnnnnnnnnnnnnnnnnnnnnnnnnnnnnnnnnnnnnnnnnnnnnnnnnnnnnnnnnnnnnnnnnnnnnnnnnnnnnnnnnnnnnnnnnnnnnnnnnnnnnnnnnnnnnnnnnnnnnnnnnnnnnnnnnnnnnnnnnnnnnnnnnnnnnnnnnnnnnnnnnnnnnnnnnnnnnnnnnnnnnnnnnnnnnnnnnnnnnnnnnnnnnnnnnnnnnnnnnnnnnnnnnnnnnnnnnnnnnnnnnnnnnnnnnnnnnnnnnnnnnnnnnnnnnnnnnnnnnnnnnnnnnnnnnnnnnnnnnnnnnnnnnnnnnnnnnnnnnnnnnnnnnnnnnnnnnnnnnnnnnnnnnnnnnnnnnnnnnnnnnnnnnnnnnnnnnnnnnnnnnnnnnnnnnnnnnnnnnnnnnnnnnnnnnnnnnnnnnnnnnnnnnnnnnnnnnnnnnnnnnnnnnnnnnnnnnnnnnnnnnnnnnnnnnnnnnnnnnnnnnnnnnnnnnnnnnnnnnnnnnnnnnnnnnnnnnnnnnnnnnnnnnnnnnnnnnnnnnnnnnnnnnnnnnnnnnnnnnnnnnnnnnnnnnnnnnnnnnnnnnnnnnnnnnnnnnnnnnnnnnnnnnnnnnnnnnnnnnnnnnnnnnnnnnnnnnnnnnnnnnnnnnnnnnnnnnnnnnnnnnnnnnnnnnnnnnnnnnnnnnnnnnnnnnnnnnnnnnnnnnnnnnnnnnnnnnnnnnnnnnnnnnnnnnnnnnnnnnnnnnnnnnnnnnnnnnnnnnnnnnnnnnnnnnnnnnnnnnnnnnnnnnnnnnnnnnnnnnnnnnnnnnnnnnnnnnnnnnnnnnnnnnnnnnnnnnnnnnnnnnnnnnnnnnnnnnnnnnnnnnnnnnnnnnnnnnnnnnnnnnnnnnnnnnnnnnnnnnnnnnnnnnnnnnnnnnnnnnnnnnnnnnnnnnnnnnnnnnnnnnnnnnnnnnnnnnnnnnnnnnnnnnnnnnnnnnnnnnnnnnnnnnnnnnnnnnnnnnnnnnnnnnnnnnnnnnnnnnnnnnnnnnnnnnnnnnnnnnnnnnnnnnnnnnnnnnnnnnnnnnnnnnnnnnnnnnnnnnnnnnnnnnnnnnnnnnnnnnnnnnnnnnnnnnnnnnnnnnnnnnnnnnnnnnnnnnnnnnnnnnnnnnnnnnnnnnnnnnnnnnnnnnnnnnnnnnnnnnnnnnnnnnnnnnnnnnnnnnnnnnnnnnnnnnnnnnnnnnnnnnnnnnnnnnnnnnnnnnnnnnnnnnnnnnnnnnnnnnnnnnnnnnnnnnnnnnnnnnnnnnnnnnnnnnnnnnnnnnnnnnnnnnnnnnnnnnnnnnnnnnnnnnnnnnnnnnnnnnnnnnnnnnnnnnnnnnnnnnnnnnnnnnnnnnnnnnnnnnnnnnnnnnnnnnnnnnnnnnnnnnnnnnnnnnnnnnnnnnnnnnnnnnnnnnnnnnnnnnnnnnnnnnnnnnnnnnnnnnnnnnnnnnnnnnnnnnnnnnnnnnnnnnnnnnnnnnnnnnnnnnnnnnnnnnnnnnnnnnnnnnnnnnnnnnnnnnnnnnnnnnnnnnnnnnnnnnnnnnnnnnnnnnnnnnnnnnnnnnnnnnnnnnnnnnnnnnnnnnnnnnnnnnnnnnnnnnnnnnnnnnnnnnnnnnnnnnnnnnnnnnnnnnnnnnnnnnnnnnnnnnnnnnnnnnnnnnnnnnnnnnnnnnnnnnnnnnnnnnnnnnnnnnnnnnnnnnnnnnnnnnnnnnnnnnnnnnnnnnnnnnnnnnnnnnnntacataatcgtgttttgccatcggtacagccaccctctttttgggtggttaatgagaggaagcggaatgggaattatttcccattccgcaaccactaggatggggttacgctaaactatttgtaagacaattatagatatgtgcagataaatggatttgtttcgatcggaagaacaacggcgatttaaccagtacataacccgtcatctcgccgagctcgacgggccccttcttattgaaggaggaactggtattgggaaaacacgggcatatcttgctgcaatcaaggaaagcgacaaacggatagcgattgtacttcccagctatcagctaattgaccaactccttaactcggaagacgtcgttgcaacgggggtagaaatagtggcccaccgtcgtgcggatctctttgactctcgccgtgactatatggccaaccgtgaaaaggccatgaatgcacgggtgatggcctgtacatctgcaagcgtcatcatcgatcaacgtctgcggggcgactataatggtgtaaccaagagagattatattttatttgatgaggcagatcagctccccgcaaccgctgcccttcaacgtgatttacggataagccaatatgagttcagcgatgctaaggtaacggtgagcgatacatcccaggcaattaatgaacttcttgataaacggaatttagattctgaattacgcgcccgcgcgaaactaattgccgaagcgatcgatgagcccgcttggtatcataaggccgggctagatgacgatggtggtgtgaccctgatgcaccatcttccggggagactgctcagtaaaatagccaaccaacccaatgtggtttttgtgagcgccacactgcaggtcggaaatactacggatgattttaagagaagcctcgggattaagcgcgaaagccggttttccggggttattgaaccggatcggcatgggtcaataaatcttatcccggaacttgagtcggatgtcgtcgacgttgtcgccaaggcggctaaaccttgtctggtggctacagcgagccatgcagacgcagaacagattggcaaaagtatcgctggcgccattgtcagaaaagaaaataaagagacagcagcggaggcggcaaagaggttgcccgaacagggagttcttgtagctgcgggtgtctgggcggggctcgatactcctatccgctgggcatcaatcgtaattccgcgaatcccgtttgaaaaagtgaccgtgctcgatggcaaaattgaaagtcgttacattgataaccggaacgttgccgtccgaagaatgagacaagtaattgggaggggattgcgatctccggatgcaagttgcgatatttacattttagatgatcgctataagaaaattggcaccttcgtacctgatcgatttaaggaaagttggttggaaggacaggttgactataacttaagaaaagaacgcaaaaggatgcgagcctacaggcctaaggtccttgagaaatacggggtcatctgtctggcgtgtgggctaaaaccaaaattggaaagtgttattcatgtgcatcaccttaatgaaattaacgaaggtgaacgccgaacaaagattgaagacttagtgcccctttgtgctaactgccatactgtcgcgcacagtgaaaatcctccaattccgatggaccgtctcaaaaaagtggcagatgcaatgctgaagtcttaagacgatcggatggttcctgagaacagggcttgggctgggttttgttcgaatagtttggtgtcgatacatcttggcgcaacaatttatacatccacagtacaatttccgcttggccgagcgggagctacggtctaggcctcgccaacgttgttttaaccccaaaaagtttagggtaatataactttgcgttcaaccgctaaacgctggtgatacatcgcgcgggaaccggggtggcaaactggcctttatccaaataatatgccataatatcaatgagtttcatggcccatgaaccgacatccaccgtccgtgcaagacgcctccgcgagcgccgcgccagaggcgtggccatggtcgccccggttgaagtaggtgagggcgggattgaacttctagtcagtaacgggttgctccgaaggcaggataccctttcgggttgaatacatgttgcgagttattttgtctttcagaccactataaccatctagcgtcttggcagttttggaattcctctaaagcatccgatggtatagggatattcaatcgttgcatggtaatggtaacccaaattgttgtggctgtggccatggcatttatcaagatccgcgttcgtcatctctttgccgccgacaccgtaatatccaaaaatcggaaacccatccgcaatccaccctattttctgggaatgaccattcgttagccgtattttttcaagatgttcgggtacaaaatgatagtggtatgcggttctagcgggatgcccgccatatttatcgactatctcatgtgcaacagcatcttcacctcgcgcatcaacggcgctaaataagacaacaccgtttagagtgacaccaatcgcgccgagcggcacacaggttggttttgaagccttctcggcattcttgggcaatgagaactcaaagttgtgcatggatggcacaccgggattacgatcaatacgggttagtatgggatattgagtcatgggccagttccctatcttcctatcaaccggaagattgttggtcttgatgactcgtttgttacccgagacttcctcgacataaattccgttcacgggattgaatgccccggaaggcagccaaggtttcttaaagaagttccagctttcgttatcccaatcaatccaggtaattcggcttgcagtgctccccggtgcggatggattgcctgccctacaagcatacaagtaaccttttgcagcacggtttgtagataggtatctatctcctaaacgcaacgcatcacagcgtggtctttggttatctgtacacaatttatagtcgatggtatagctacttaaatcgtctgccagaactaacggggcaaatcctttaaagcagacaaagaaacaaattacgataccaaatattttttttaccatacgttagtgtttcccctgatccaaacgtggttaacgagaaagaccacgaaaaaatccaccctttttatagacttgagcattagccatttcatgtctaccgcaataaattctagcaattggcaaattaagacaaatttgtctcttttatgagcatctgacagaaaaacaacgtccaccctatttgaattcaacaacgttaaatcttttgaaattaatcaaagtacgataacaggtcaaagtttgttaaattcttgtagtcaagaattccatgtgattgacttttgtagacatttttaaagtttgttggaaaccttccgtttgttatcaatcacttaccattttccactgatagaaacagttattcctcaatgcatcagttacacgccgcctaaggac

SEQ ID NO: 153 - DNA, 13316 bp, Artificial Sequence
  Synthetic Oligonucleotide
  misc_feature (1)..(7976): n is a, c, g, or t
nnnnnnnnnnnnnnnnnnnnnnnnnnnnnnnnnnnnnnnnnnnnnnnnnnnnnnnnnnnnnnnnnnnnnnnnnnnnnnnnnnnnnnnnnnnnnnnnnnnnnnnnnnnnnnnnnnnnnnnnnnnnnnnnnnnnnnnnnnnnnnnnnnnnnnnnnnnnnnnnnnnnnnnnnnnnnnnnnnnnnnnnnnnnnnnnnnnnnnnnnnnnnnnnnnnnnnnnnnnnnnnnnnnnnnnnnnnnnnnnnnnnnnnnnnnnnnnnnnnnnnnnnnnnnnnnnnnnnnnnnnnnnnnnnnnnnnnnnnnnnnnnnnnnnnnnnnnnnnnnnnnnnnnnnnnnnnnnnnnnnnnnnnnnnnnnnnnnnnnnnnnnnnnnnnnnnnnnnnnnnnnnnnnnnnnnnnnnnnnnnnnnnnnnnnnnnnnnnnnnnnnnnnnnnnnnnnnnnnnnnnnnnnnnnnnnnnnnnnnnnnnnnnnnnnnnnnnnnnnnnnnnnnnnnnnnnnnnnnnnnnnnnnnnnnnnnnnnnnnnnnnnnnnnnnnnnnnnnnnnnnnnnnnnnnnnnnnnnnnnnnnnnnnnnnnnnnnnnnnnnnnnnnnnnnnnnnnnnnnnnnnnnnnnnnnnnnnnnnnnnnnnnnnnnnnnnnnnnnnnnnnnnnnnnnnnnnnnnnnnnnnnnnnnnnnnnnnnnnnnnnnnnnnnnnnnnnnnnnnnnnnnnnnnnnnnnnnnnnnnnnnnnnnnnnnnnnnnnnnnnnnnnnnnnnnnnnnnnnnnnnnnnnnnnnnnnnnnnnnnnnnnnnnnnnnnnnnnnnnnnnnnnnnnnnnnnnnnnnnnnnnnnnnnnnnnnnnnnnnnnnnnnnnnnnnnnnnnnnnnnnnnnnnnnnnnnnnnnnnnnnnnnnnnnnnnnnnnnnnnnnnnnnnnnnnnnnnnnnnnnnnnnnnnnnnnnnnnnnnnnnnnnnnnnnnnnnnnnnnnnnnnnnnnnnnnnnnnnnnnnnnnnnnnnnnnnnnnnnnnnnnnnnnnnnnnnnnnnnnnnnnnnnnnnnnnnnnnnnnnnnnnnnnnnnnnnnnnnnnnnnnnnnnnnnnnnnnnnnnnnnnnnnnnnnnnnnnnnnnnnnnnnnnnnnnnnnnnnnnnnnnnnnnnnnnnnnnnnnnnnnnnnnnnnnnnnnnnnnnnnnnnnnnnnnnnnnnnnnnnnnnnnnnnnnnnnnnnnnnnnnnnnnnnnnnnnnnnnnnnnnnnnnnnnnnnnnnnnnnnnnnnnnnnnnnnnnnnnnnnnnnnnnnnnnnnnnnnnnnnnnnnnnnnnnnnnnnnnnnnnnnnnnnnnnnnnnnnnnnnnnnnnnnnnnnnnnnnnnnnnnnnnnnnnnnnnnnnnnnnnnnnnnnnnnnnnnnnnnnnnnnnnnnnnnnnnnnnnnnnnnnnnnnnnnnnnnnnnnnnnnnnnnnnnnnnnnnnnnnnnnnnnnnnnnnnnnnnnnnnnnnnnnnnnnnnnnnnnnnnnnnnnnnnnnnnnnnnnnnnnnnnnnnnnnnnnnnnnnnnnnnnnnnnnnnnnnnnnnnnnnnnnnnnnnnnnnnnnnnnnnnnnnnnnnnnnnnnnnnnnnnnnnnnnnnnnnnnnnnnnnnnnnnnnnnnnnnnnnnnnnnnnnnnnnnnnnnnnnnnnnnnnnnnnnnnnnnnnnnnnnnnnnnnnnnnnnnnnnnnnnnnnnnnnnnnnnnnnnnnnnnnnnnnnnnnnnnnnnnnnnnnnnnnnnnnnnnnnnnnnnnnnnnnnnnnnnnnnnnnnnnnnnnnnnnnnnnnnnnnnnnnnnnnnnnnnnnnnnnnnnnnnnnnnnnnnnnnnnnnnnnnnnnnnnnnnnnnnnnnnnnnnnnnnnnnnnnnnnnnnnnnnnnnnnnnnnnnnnnnnnnnnnnnnnnnnnnnnnnnnnnnnnnnnnnnnnnnnnnnnnnnnnnnnnnnnnnnnnnnnnnnnnnnnnnnnnnnnnnnnnnnnnnnnnnnnnnnnnnnnnnnnnnnnnnnnnnnnnnnnnnnnnnnnnnnnnnnnnnnnnnnnnnnnnnnnnnnnnnnnnnnnnnnnnnnnnnnnnnnnnnnnnnnnnnnnnnnnnnnnnnnnnnnnnnnnnnnnnnnnnnnnnnnnnnnnnnnnnnnnnnnnnnnnnnnnnnnnnnnnnnnnnnnnnnnnnnnnnnnnnnnnnnnnnnnnnnnnnnnnnnnnnnnnnnnnnnnnnnnnnnnnnnnnnnnnnnnnnnnnnnnnnnnnnnnnnnnnnnnnnnnnnnnnnnnnnnnnnnnnnnnnnnnnnnnnnnnnnnnnnnnnnnnnnnnnnnnnnnnnnnnnnnnnnnnnnnnnnnnnnnnnnnnnnnnnnnnnnnnnnnnnnnnnnnnnnnnnnnnnnnnnnnnnnnnnnnnnnnnnnnnnnnnnnnnnnnnnnnnnnnnnnnnnnnnnnnnnnnnnnnnnnnnnnnnnnnnnnnnnnnnnnnnnnnnnnnnnnnnnnnnnnnnnnnnnnnnnnnnnnnnnnnnnnnnnnnnnnnnnnnnnnnnnnnnnnnnnnnnnnnnnnnnnnnnnnnnnnnnnnnnnnnnnnnnnnnnnnnnnnnnnnnnnnnnnnnnnnnnnnnnnnnnnnnnnnnnnnnnnnnnnnnnnnnnnnnnnnnnnnnnnnnnnnnnnnnnnnnnnnnnnnnnnnnnnnnnnnnnnnnnnnnnnnnnnnnnnnnnnnnnnnnnnnnnnnnnnnnnnnnnnnnnnnnnnnnnnnnnnnnnnnnnnnnnnnnnnnnnnnnnnnnnnnnnnnnnnnnnnnnnnnnnnnnnnnnnnnnnnnnnnnnnnnnnnnnnnnnnnnnnnnnnnnnnnnnnnnnnnnnnnnnnnnnnnnnnnnnnnnnnnnnnnnnnnnnnnnnnnnnnnnnnnnnnnnnnnnnnnnnnnnnnnnnnnnnnnnnnnnnnnnnnnnnnnnnnnnnnnnnnnnnnnnnnnnnnnnnnnnnnnnnnnnnnnnnnnnnnnnnnnnnnnnnnnnnnnnnnnnnnnnnnnnnnnnnnnnnnnnnnnnnnnnnnnnnnnnnnnnnnnnnnnnnnnnnnnnnnnnnnnnnnnnnnnnnnnnnnnnnnnnnnnnnnnnnnnnnnnnnnnnnnnnnnnnnnnnnnnnnnnnnnnnnnnnnnnnnnnnnnnnnnnnnnnnnnnnnnnnnnnnnnnnnnnnnnnnnnnnnnnnnnnnnnnnnnnnnnnnnnnnnnnnnnnnnnnnnnnnnnnnnnnnnnnnnnnnnnnnnnnnnnnnnnnnnnnnnnnnnnnnnnnnnnnnnnnnnnnnnnnnnnnnnnnnnnnnnnnnnnnnnnnnnnnnnnnnnnnnnnnnnnnnnnnnnnnnnnnnnnnnnnnnnnnnnnnnnnnnnnnnnnnnnnnnnnnnnnnnnnnnnnnnnnnnnnnnnnnnnnnnnnnnnnnnnnnnnnnnnnnnnnnnnnnnnnnnnnnnnnnnnnnnnnnnnnnnnnnnnnnnnnnnnnnnnnnnnnnnnnnnnnnnnnnnnnnnnnnnnnnnnnnnnnnnnnnnnnnnnnnnnnnnnnnnnnnnnnnnnnnnnnnnnnnnnnnnnnnnnnnnnnnnnnnnnnnnnnnnnnnnnnnnnnnnnnnnnnnnnnnnnnnnnnnnnnnnnnnnnnnnnnnnnnnnnnnnnnnnnnnnnnnnnnnnnnnnnnnnnnnnnnnnnnnnnnnnnnnnnnnnnnnnnnnnnnnnnnnnnnnnnnnnnnnnnnnnnnnnnnnnnnnnnnnnnnnnnnnnnnnnnnnnnnnnnnnnnnnnnnnnnnnnnnnnnnnnnnnnnnnnnnnnnnnnnnnnnnnnnnnnnnnnnnnnnnnnnnnnnnnnnnnnnnnnnnnnnnnnnnnnnnnnnnnnnnnnnnnnnnnnnnnnnnnnnnnnnnnnnnnnnnnnnnnnnnnnnnnnnnnnnnnnnnnnnnnnnnnnnnnnnnnnnnnnnnnnnnnnnnnnnnnnnnnnnnnnnnnnnnnnnnnnnnnnnnnnnnnnnnnnnnnnnnnnnnnnnnnnnnnnnnnnnnnnnnnnnnnnnnnnnnnnnnnnnnnnnnnnnnnnnnnnnnnnnnnnnnnnnnnnnnnnnnnnnnnnnnnnnnnnnnnnnnnnnnnnnnnnnnnnnnnnnnnnnnnnnnnnnnnnnnnnnnnnnnnnnnnnnnnnnnnnnnnnnnnnnnnnnnnnnnnnnnnnnnnnnnnnnnnnnnnnnnnnnnnnnnnnnnnnnnnnnnnnnnnnnnnnnnnnnnnnnnnnnnnnnnnnnnnnnnnnnnnnnnnnnnnnnnnnnnnnnnnnnnnnnnnnnnnnnnnnnnnnnnnnnnnnnnnnnnnnnnnnnnnnnnnnnnnnnnnnnnnnnnnnnnnnnnnnnnnnnnnnnnnnnnnnnnnnnnnnnnnnnnnnnnnnnnnnnnnnnnnnnnnnnnnnnnnnnnnnnnnnnnnnnnnnnnnnnnnnnnnnnnnnnnnnnnnnnnnnnnnnnnnnnnnnnnnnnnnnnnnnnnnnnnnnnnnnnnnnnnnnnnnnnnnnnnnnnnnnnnnnnnnnnnnnnnnnnnnnnnnnnnnnnnnnnnnnnnnnnnnnnnnnnnnnnnnnnnnnnnnnnnnnnnnnnnnnnnnnnnnnnnnnnnnnnnnnnnnnnnnnnnnnnnnnnnnnnnnnnnnnnnnnnnnnnnnnnnnnnnnnnnnnnnnnnnnnnnnnnnnnnnnnnnnnnnnnnnnnnnnnnnnnnnnnnnnnnnnnnnnnnnnnnnnnnnnnnnnnnnnnnnnnnnnnnnnnnnnnnnnnnnnnnnnnnnnnnnnnnnnnnnnnnnnnnnnnnnnnnnnnnnnnnnnnnnnnnnnnnnnnnnnnnnnnnnnnnnnnnnnnnnnnnnnnnnnnnnnnnnnnnnnnnnnnnnnnnnnnnnnnnnnnnnnnnnnnnnnnnnnnnnnnnnnnnnnnnnnnnnnnnnnnnnnnnnnnnnnnnnnnnnnnnnnnnnnnnnnnnnnnnnnnnnnnnnnnnnnnnnnnnnnnnnnnnnnnnnnnnnnnnnnnnnnnnnnnnnnnnnnnnnnnnnnnnnnnnnnnnnnnnnnnnnnnnnnnnnnnnnnnnnnnnnnnnnnnnnnnnnnnnnnnnnnnnnnnnnnnnnnnnnnnnnnnnnnnnnnnnnnnnnnnnnnnnnnnnnnnnnnnnnnnnnnnnnnnnnnnnnnnnnnnnnnnnnnnnnnnnnnnnnnnnnnnnnnnnnnnnnnnnnnnnnnnnnnnnnnnnnnnnnnnnnnnnnnnnnnnnnnnnnnnnnnnnnnnnnnnnnnnnnnnnnnnnnnnnnnnnnnnnnnnnnnnnnnnnnnnnnnnnnnnnnnnnnnnnnnnnnnnnnnnnnnnnnnnnnnnnnnnnnnnnnnnnnnnnnnnnnnnnnnnnnnnnnnnnnnnnnnnnnnnnnnnnnnnnnnnnnnnnnnnnnnnnnnnnnnnnnnnnnnnnnnnnnnnnnnnnnnnnnnnnnnnnnnnnnnnnnnnnnnnnnnnnnnnnnnnnnnnnnnnnnnnnnnnnnnnnnnnnnnnnnnnnnnnnnnnnnnnnnnnnnnnnnnnnnnnnnnnnnnnnnnnnnnnnnnnnnnnnnnnnnnnnnnnnnnnnnnnnnnnnnnnnnnnnnnnnnnnnnnnnnnnnnnnnnnnnnnnnnnnnnnnnnnnnnnnnnnnnnnnnnnnnnnnnnnnnnnnnnnnnnnnnnnnnnnnnnnnnnnnnnnnnnnnnnnnnnnnnnnnnnnnnnnnnnnnnnnnnnnnnnnnnnnnnnnnnnnnnnnnnnnnnnnnnnnnnnnnnnnnnnnnnnnnnnnnnnnnnnnnnnnnnnnnnnnnnnnnnnnnnnnnnnnnnnnnnnnnnnnnnnnnnnnnnnnnnnnnnnnnnnnnnnnnnnnnnnnnnnnnnnnnnnnnnnnnnnnnnnnnnnnnnnnnnnnnnnnnnnnnnnnnnnnnnnnnnnnnnnnnnnnnnnnnnnnnnnnnnnnnnnnnnnnnnnnnnnnnnnnnnnnnnnnnnnnnnnnnnnnnnnnnnnnnnnnnnnnnnnnnnnnnnnnnnnnnnnnnnnnnnnnnnnnnnnnnnnnnnnnnnnnnnnnnnnnnnnnnnnnnnnnnnnnnnnnnnnnnnnnnnnnnnnnnnnnnnnnnnnnnnnnnnnnnnnnnnnnnnnnnnnnnnnnnnnnnnnnnnnnnnnnnnnnnnnnnnnnnnnnnnnnnnnnnnnnnnnnnnnnnnnnnnnnnnnnnnnnnnnnnnnnnnnnnnnnnnnnnnnnnnnnnnnnnnnnnnnnnnnnnnnnnnnnnnnnnnnnnnnnnnnnnnnnnnnnnnnnnnnnnnnnnnnnnnnnnnnnnnnnnnnnnnnnnnnnnnnnnnnnnnnnnnnnnnnnnnnnnnnnnnnnnnnnnnnnnnnnnnnnnnnnnnnnnnnnnnnnnnnnnnnnnnnnnnnnnnnnnnnnnnnnnnnnnnnnnnnnnnnnnnnnnnnnnnnnnnnnnnnnnnnnnnnnnnnnnnnnnnnnnnnnnnnnnnnnnnnnnnnnnnnnnnnnnnnnnnnnnnnnnnnnnnnnnnnnnnnnnnnnnnnnnnnnnnnnnnnnnnnnnnnnnnnnnnnnnnnnnnnnnnnnnnnnnnnnnnnnnnnnnnnnnnnnnnnnnnnnnnnnnnnnnnnnnnnnnnnnnnnnnnnnnnnnnnnnnnnnnnnnnnnnnnnnnnnnnnnnnnnnnnnnnnnnnnnnnnnnnnnnnnnnnnnnnnnnnnnnnnnnnnnnnnnnnnnnnnnnnnnnnnnnnnnnnnnnnnnnnnnnnnnnnnnnnnnnnnnnnnnnnnnnnnnnnnnnnnnnnnnnnnnnnnnnnnnnnnnnnnnnnnnnnnnnnnnnnnnnnnnnnnnnnnnnnnnnnnnnnnnnnnnnnnnnnnnnnnnnnnnnnnnnnnnnnnnnnnnnnnnnnnnnnnnnnnnnnnnnnnnnnnnnnnnnnnnnnnnnnnnnnnnnnnnnnnnnnnnnnnnnnnnnnnnnnnnnnnnnnnnnnnnnnnnnnnnnnnnnnnnnnnnnnnnnnnnnnnnnnnnnnnnnnnnnnnnnnnnnnnnnnnnnnnnnnnnnnnnnnnnnnnnnnnnnnnnnnnnnnnnnnnnnnnnnnnnnnnnnnnnnnnnnnnnnnnnnnnnnnnnnnnnnnnnnnnnnnnnnnnnnnnnnnnnnnnnnnnnnnnnnnnnnnnnnnnnnnnnnnnnnnnnnnnnnnnnnnnnnnnnnnnnnnnnnnnnnnnnnnnnnnnnnnnnnnnnnnnnnnnnnnnnnnnnnnnnnnnnnnnnnnnnnnnnnnnnnnnnnnnnnnnnnnnnnnnnnnnnnnnnnnnnnnnnnnnnnnnnnnnnnnnnnnnnnnnnnnnnnnnnnnnnnnnnnnnnnnnnnnnnnnnnnnnnnnnnnnnnnnnnnnnnnnnnnnnnnnnnnnnnnnnnnnnnnnnnnnnnnnnnnnnnnnnnnnnnnnnnnnnnnnnnnnnnnnnnnnnnnnnnnnnnnnnnnnnnnnnnnnnnnnnnnnnnnnnnnnnnnnnnnnnnnnnnnnnnnnnnnnnnnnnnnnnnnnnnnnnnnnnnnnnnnnnnnnnnnnnnnnnnnnnnnnnnnnnnnnnnnnnnnnnnnnnnnnnnnnnnnnnnnnnnnnnnnnnnnnnnnnnnnnnnnnnnnnnnnnnnnnnnnnnnnnnnnnnnnnnnnnnnnnnnnnnnnnnnnnnnnnnnnnnnnnnnnnnnnnnnnnnnnnnnnnnnnnnnnnnnnnnnnnnnnnnnnnnnnnnnnnnnnnnnnnnnnnnnnnnnnnnnnnnnnnnnnnnnnnnnnnnnnnnnnnnnnnnnnnnnnnnnnnnnnnnnnnnnnnnnnnnnnnnnnnnnnnnnnnnnnnnnnnnnnnnnnnnnnnnnnnnnnnnnnnnnnnnnnnnnnnnnnnnnnnnnnnnnnnnnnnnnnnnnnnnnnnnnnnnnnnnnnnnnnnnnnnnnnnnnnnnnnnnnnnnnnnnnnnnnnnnnnnnnnnnnnnnnnnnnnnnnnnnnnnnnnnnnnnnnnnnnnnnnnnnnnnnnnnnnnnnngttgatcgcggcgaccacctgctggtgcgctccgacaagccgatcacatccaacccgaccccgacacgggtcgtgaaggagggcgacgtgatggcattcgagttgcgcgcctgcgtcgccaaaaagcggaaaggcaggcccgtgtatttcccgctgggtgactggcgtgtgcgtcacgagtggctgaaccggaaagcggcagataacgggttcgacgttcttgcccttcggtcaaccgcttctatggcgaaggttctgaaggacggacgctcgttcacggtcgatcagactgacttcgtcggtgtccttcgggtcacgaacgtccagcagtttgaaaacgcgatggcgaaaggtgtcggttcggttgcccgcgcttttggcttcggaatgctgaccatcaactagaggtgcgctatgacgaccaccatcatcaacgcgacgatccacacggtcggtccgctgtcgattgccatgcccgttgccgagggcggcacggccaatgcctacaagaacttcccggttatgacacgtggcgtggatgaggacggcaacaagaagctgacgggctacctgccggcaacgacggttcgtggcttcctccgccgtgcggtcgtcctccgcgacatgaagaaggccgctgctgccgggcagccctatactctgccgcgtgcctacaccgaactgatcgggcaggacgccggcagtgagaaggccgaggatgacagagtcaatctcatggaactccgcaaggtccgcgcggcgtcgccggttctcgatctcttcggcagcggattgggcatcaagtcgcgcctgatggtctcgcactttttgcctgcgatgaatgtcctgcccgatgtcttcacctgcgttcgcaaggacctcgaagacacggacggagtattggatttggttaatcaggccgaggttgaaacgtaccttggacgcgcggatgcgaacagtcgtcgtgcacaagccgcaggtcttgtcgggccgctccagcggaggatgagagcagccgccaaaaagggagaagatgtttcggaattgaaggtccagttggcggccgccgaggagctggtgaagaagtacgaggaccagatgggagagatgcagaacagctcgcggactcttgtcggacatttcgcgctgcctgccgatctcgatctcaagggccggctggtgatcaacaacgccaaggacatagaccttgagatgatcgagcatgcgctgaacgagctgtctctcaagccggtgctcggcgcgcaatcggcgcgcggctgcggtgagatcagcggcactttcgacctgatggtggacggcgtgctgcggaaaagactggcaattgggggatacgagccagcccgcgtcaccgatttccctccggttacaggaggagaaaaggccgcgtgatcaagaagctagtggaacaacaggtgaagccacccatgaaatgggtggttgctgaaactccgcgcactacaggagccaaagacatgacggtgaagcaacccacgaaatgggtggttactgaaactctgtattgtctttgtgcttggcgaggaagggcgaagccaaacaaaaagggtggctactgaaacgcccagccgatgagcttgattaccgcgtccggtgaagccagccatgaaatgggtggttactgaaacccctctccaaaaccacgggagcgtaggacaggtgaagccacccatgaaatggctggttactgaaactgctgatagttcaggtcagccctcacggccggtgaagccacccatgaaatgggtggttgctgaaacgacatctacaccgcctcagggcagcccgtcggtgaagccacccatgagatcggtggttactgaaactgctgatagttcagatcagcgcgcacggccggtaaagccacccatgaattgggtggttactgaaactcctggcagcgcgaggctgtcgtaatagccgttgaagccatccgtgaattgggtggctattcttgaatgcggctgtataggcatcgaagggcatgatgtttaggtcaaccgagcaggccaattttgcggcgctcttcggggcgcatatcggcaaggcggatggcccgctgctgctggaagggggcaccggcattggcaagacccgcgcctacctctcggcgatccttgattccgggaagcgcgtggcgcttgtgttgccgacccatcagcttatcgagcagcttcttgcctcccccgatctcgctcaggcgaacgccagcggcgcgatggtcgccgccttccggccggcccgaatgttcgacacccgtgccgaataccttgcccatcgtgaggttgcgactggcgctcagctcatgctctgcacggcggcgagcgtcatcatcgaccgccgactggacgggaagtacaacggggcgaccgagcgggactacctgctgttcgatgaagccgaccagttgccgggggcagccgcgctccagtcggacttggaaatcaagggcgcgacactcaaggcgctgggcatcgagggcgacacgacgagagagctggcaaaaggcgttgtcgcttccaaggatgcggagcccgagcaacgtgcggccgcaaagatgatcctcgaagccatcgacgaaccagcgtggtttcatgctgccggcaagaccgatgatagcgggatcattctctggcacaggcttccgggccgcctcctccgccgcatcgccaaccggcccaacgtagcctttgtcagcgccaccctcaccattggcggtcggttcgacgacttcaaacgcgcgctcggcatccagagcgaaagcgaactgtcagatgtcatcgagccggagcggcacggcgcagtcgagttccgcaccgttaccagccacgccattgatgccgatggatggcttgagctggtcgcggcgaccgttaggcaagccgaggggccgaccctcgtcgtcaccccgtcgttcgaccttgcgaacaggatcggggaattggttcgaggcgcgaccgtgcggcagcgggaggaggcgataagcgacgcgatggcccgcatgggcgatccgggcatcctgatcgccacggccgcttgggctgggctggatgcccctgtaacatggcgttcgatcattgtgccccaagtgcctttcgagaggcccacgatcatcgacgagcaggtcgagagccggtacatcgacgcccgcaacacggcggtccgccgcctgcgccaagtcatcggccgggggctgaggtcgcccgacgcccgctgcacggtctatttcctcgatccccgggtgttgaagctgcccgccttctggccgacccggtttgcgtcggtctgggagagcagaccccgagacgcgggcgctgtcgaaggcacgcggggggaggttacactgtcaaaggcagagcgcgatccgtccctccggaagctcgcaatcaggcactacgggctgcactgtcaggcctgcgggttggtgcccaaggccgccgccatcatcgaagtccaccatctcgacccgatttcggagggcgtgcgccggacgcggctggaagacctgcgccccgtgtgccggaactgtcatgcgttggctcactccaccaacccgcccatgccgattgagcaggtgaaacttctggtcggaccaggctgatcagggcaggtgaaatgcagcggtttccagaggccgccttgttcgctcttccccgtcggaggaacagcagccgaaagggtctcggtgtggccggccggacgccatgacctctgccccagttcaggtgtctgcgaggggagggtaagcgtcgctctcaggatgacgccgacgggccattttttaacctcctgacgctttcgggatgtccggccttccccgtggtggtctggctggaaatcgaatcagcgggccgattttttgtcattggctgtccgtacctcccggattgtcgcccttcttcatcctctagggggatgagtatccagcggcacgatgagtgttgtaccgaaatgactccgtagaccatcgctcaccccggaaggcgcagcgaagaagcatcgaaggccgccatacccaccttggcggtcttcgtagaaatggcagtcttgggggttgggtgcctctgacaaacggtgcagatgccgtcggtccttaccttgtccaccccatgttaccattcggcccctaccgaaggacattgccggcaggggagggggacgcaaatgccaatttcagtgggacacatcattgaggcgctatcttcgcttggagggcaagctcacctgaatgagatcgtacgtcgggtaaagcaaatcgcgcctcgaccgttgccagatgacccgggcgcaagcgttcgagcgcgcattcaggagcggtgccgacaggcacgcagcttccaagatggtgaggatcttttcgaaagcgtctacggcattccggctcgaaagggtgtctggcgactacgggcggatccactcaaccctgcagaatctgatggcacccaagatggcgcagatgccttcatcgacgctgccgagggccggaccgagcttcgtcttcatctaaggcacgagcgttcgaggagactcattcgaaggtttaaggcccaactcgtcgatcccgcctgcgaggcctgtggcatgaccttcaatggggtatacggccatctcggtgatggatacatcgaggcccatcacaaggtgccggttgcctctctcggcgacagctcaaggacgagcctgtccgatctggcagcagtctgcgcgaactgtcatcgcattattcacatgaacaacctcatgccggtcgagcagctggctaggcacttgcgacaacgagggacgagggggagaagagcaccgggatgacgccgatagggcgcggcgtgaattgccatatggtcgatccgaagaccgccaacgggatcgaaggtcaccatccttaggcatggcggccttcgcatacgcgcgatggcctactcgctccccggtcgaacactgaatgaatatcagcgcgtaggtcctcggggtaggcggtcggctcgcgggcctttgtcgccttgagggcgaaggtctggatacagtccagtgcccttgcatgagggacaaaggattggtgagccaccgtctggactgatgtgcccacgaccatcgcattggccgcactttggctgcttcgcttcagtcacgccgatgtcttccttatggccgtttcgaagattctagcaccattcggcaacttcgccgaattccaaacccgaaggccgccaatttgcgtgaaggccgccatgcttacgcatggcggccctcgtcctagcctgacggtctagggcaactcccagtcccagccatcgcccatggcac

SEQ ID NO: 154 - DNA, 13295 bp, Artificial Sequence
  Synthetic Oligonucleotide
  misc_feature (1)..(9960): n is a, c, g, or t
nnnnnnnnnnnnnnnnnnnnnnnnnnnnnnnnnnnnnnnnnnnnnnnnnnnnnnnnnnnnnnnnnnnnnnnnnnnnnnnnnnnnnnnnnnnnnnnnnnnnnnnnnnnnnnnnnnnnnnnnnnnnnnnnnnnnnnnnnnnnnnnnnnnnnnnnnnnnnnnnnnnnnnnnnnnnnnnnnnnnnnnnnnnnnnnnnnnnnnnnnnnnnnnnnnnnnnnnnnnnnnnnnnnnnnnnnnnnnnnnnnnnnnnnnnnnnnnnnnnnnnnnnnnnnnnnnnnnnnnnnnnnnnnnnnnnnnnnnnnnnnnnnnnnnnnnnnnnnnnnnnnnnnnnnnnnnnnnnnnnnnnnnnnnnnnnnnnnnnnnnnnnnnnnnnnnnnnnnnnnnnnnnnnnnnnnnnnnnnnnnnnnnnnnnnnnnnnnnnnnnnnnnnnnnnnnnnnnnnnnnnnnnnnnnnnnnnnnnnnnnnnnnnnnnnnnnnnnnnnnnnnnnnnnnnnnnnnnnnnnnnnnnnnnnnnnnnnnnnnnnnnnnnnnnnnnnnnnnnnnnnnnnnnnnnnnnnnnnnnnnnnnnnnnnnnnnnnnnnnnnnnnnnnnnnnnnnnnnnnnnnnnnnnnnnnnnnnnnnnnnnnnnnnnnnnnnnnnnnnnnnnnnnnnnnnnnnnnnnnnnnnnnnnnnnnnnnnnnnnnnnnnnnnnnnnnnnnnnnnnnnnnnnnnnnnnnnnnnnnnnnnnnnnnnnnnnnnnnnnnnnnnnnnnnnnnnnnnnnnnnnnnnnnnnnnnnnnnnnnnnnnnnnnnnnnnnnnnnnnnnnnnnnnnnnnnnnnnnnnnnnnnnnnnnnnnnnnnnnnnnnnnnnnnnnnnnnnnnnnnnnnnnnnnnnnnnnnnnnnnnnnnnnnnnnnnnnnnnnnnnnnnnnnnnnnnnnnnnnnnnnnnnnnnnnnnnnnnnnnnnnnnnnnnnnnnnnnnnnnnnnnnnnnnnnnnnnnnnnnnnnnnnnnnnnnnnnnnnnnnnnnnnnnnnnnnnnnnnnnnnnnnnnnnnnnnnnnnnnnnnnnnnnnnnnnnnnnnnnnnnnnnnnnnnnnnnnnnnnnnnnnnnnnnnnnnnnnnnnnnnnnnnnnnnnnnnnnnnnnnnnnnnnnnnnnnnnnnnnnnnnnnnnnnnnnnnnnnnnnnnnnnnnnnnnnnnnnnnnnnnnnnnnnnnnnnnnnnnnnnnnnnnnnnnnnnnnnnnnnnnnnnnnnnnnnnnnnnnnnnnnnnnnnnnnnnnnnnnnnnnnnnnnnnnnnnnnnnnnnnnnnnnnnnnnnnnnnnnnnnnnnnnnnnnnnnnnnnnnnnnnnnnnnnnnnnnnnnnnnnnnnnnnnnnnnnnnnnnnnnnnnnnnnnnnnnnnnnnnnnnnnnnnnnnnnnnnnnnnnnnnnnnnnnnnnnnnnnnnnnnnnnnnnnnnnnnnnnnnnnnnnnnnnnnnnnnnnnnnnnnnnnnnnnnnnnnnnnnnnnnnnnnnnnnnnnnnnnnnnnnnnnnnnnnnnnnnnnnnnnnnnnnnnnnnnnnnnnnnnnnnnnnnnnnnnnnnnnnnnnnnnnnnnnnnnnnnnnnnnnnnnnnnnnnnnnnnnnnnnnnnnnnnnnnnnnnnnnnnnnnnnnnnnnnnnnnnnnnnnnnnnnnnnnnnnnnnnnnnnnnnnnnnnnnnnnnnnnnnnnnnnnnnnnnnnnnnnnnnnnnnnnnnnnnnnnnnnnnnnnnnnnnnnnnnnnnnnnnnnnnnnnnnnnnnnnnnnnnnnnnnnnnnnnnnnnnnnnnnnnnnnnnnnnnnnnnnnnnnnnnnnnnnnnnnnnnnnnnnnnnnnnnnnnnnnnnnnnnnnnnnnnnnnnnnnnnnnnnnnnnnnnnnnnnnnnnnnnnnnnnnnnnnnnnnnnnnnnnnnnnnnnnnnnnnnnnnnnnnnnnnnnnnnnnnnnnnnnnnnnnnnnnnnnnnnnnnnnnnnnnnnnnnnnnnnnnnnnnnnnnnnnnnnnnnnnnnnnnnnnnnnnnnnnnnnnnnnnnnnnnnnnnnnnnnnnnnnnnnnnnnnnnnnnnnnnnnnnnnnnnnnnnnnnnnnnnnnnnnnnnnnnnnnnnnnnnnnnnnnnnnnnnnnnnnnnnnnnnnnnnnnnnnnnnnnnnnnnnnnnnnnnnnnnnnnnnnnnnnnnnnnnnnnnnnnnnnnnnnnnnnnnnnnnnnnnnnnnnnnnnnnnnnnnnnnnnnnnnnnnnnnnnnnnnnnnnnnnnnnnnnnnnnnnnnnnnnnnnnnnnnnnnnnnnnnnnnnnnnnnnnnnnnnnnnnnnnnnnnnnnnnnnnnnnnnnnnnnnnnnnnnnnnnnnnnnnnnnnnnnnnnnnnnnnnnnnnnnnnnnnnnnnnnnnnnnnnnnnnnnnnnnnnnnnnnnnnnnnnnnnnnnnnnnnnnnnnnnnnnnnnnnnnnnnnnnnnnnnnnnnnnnnnnnnnnnnnnnnnnnnnnnnnnnnnnnnnnnnnnnnnnnnnnnnnnnnnnnnnnnnnnnnnnnnnnnnnnnnnnnnnnnnnnnnnnnnnnnnnnnnnnnnnnnnnnnnnnnnnnnnnnnnnnnnnnnnnnnnnnnnnnnnnnnnnnnnnnnnnnnnnnnnnnnnnnnnnnnnnnnnnnnnnnnnnnnnnnnnnnnnnnnnnnnnnnnnnnnnnnnnnnnnnnnnnnnnnnnnnnnnnnnnnnnnnnnnnnnnnnnnnnnnnnnnnnnnnnnnnnnnnnnnnnnnnnnnnnnnnnnnnnnnnnnnnnnnnnnnnnnnnnnnnnnnnnnnnnnnnnnnnnnnnnnnnnnnnnnnnnnnnnnnnnnnnnnnnnnnnnnnnnnnnnnnnnnnnnnnnnnnnnnnnnnnnnnnnnnnnnnnnnnnnnnnnnnnnnnnnnnnnnnnnnnnnnnnnnnnnnnnnnnnnnnnnnnnnnnnnnnnnnnnnnnnnnnnnnnnnnnnnnnnnnnnnnnnnnnnnnnnnnnnnnnnnnnnnnnnnnnnnnnnnnnnnnnnnnnnnnnnnnnnnnnnnnnnnnnnnnnnnnnnnnnnnnnnnnnnnnnnnnnnnnnnnnnnnnnnnnnnnnnnnnnnnnnnnnnnnnnnnnnnnnnnnnnnnnnnnnnnnnnnnnnnnnnnnnnnnnnnnnnnnnnnnnnnnnnnnnnnnnnnnnnnnnnnnnnnnnnnnnnnnnnnnnnnnnnnnnnnnnnnnnnnnnnnnnnnnnnnnnnnnnnnnnnnnnnnnnnnnnnnnnnnnnnnnnnnnnnnnnnnnnnnnnnnnnnnnnnnnnnnnnnnnnnnnnnnnnnnnnnnnnnnnnnnnnnnnnnnnnnnnnnnnnnnnnnnnnnnnnnnnnnnnnnnnnnnnnnnnnnnnnnnnnnnnnnnnnnnnnnnnnnnnnnnnnnnnnnnnnnnnnnnnnnnnnnnnnnnnnnnnnnnnnnnnnnnnnnnnnnnnnnnnnnnnnnnnnnnnnnnnnnnnnnnnnnnnnnnnnnnnnnnnnnnnnnnnnnnnnnnnnnnnnnnnnnnnnnnnnnnnnnnnnnnnnnnnnnnnnnnnnnnnnnnnnnnnnnnnnnnnnnnnnnnnnnnnnnnnnnnnnnnnnnnnnnnnnnnnnnnnnnnnnnnnnnnnnnnnnnnnnnnnnnnnnnnnnnnnnnnnnnnnnnnnnnnnnnnnnnnnnnnnnnnnnnnnnnnnnnnnnnnnnnnnnnnnnnnnnnnnnnnnnnnnnnnnnnnnnnnnnnnnnnnnnnnnnnnnnnnnnnnnnnnnnnnnnnnnnnnnnnnnnnnnnnnnnnnnnnnnnnnnnnnnnnnnnnnnnnnnnnnnnnnnnnnnnnnnnnnnnnnnnnnnnnnnnnnnnnnnnnnnnnnnnnnnnnnnnnnnnnnnnnnnnnnnnnnnnnnnnnnnnnnnnnnnnnnnnnnnnnnnnnnnnnnnnnnnnnnnnnnnnnnnnnnnnnnnnnnnnnnnnnnnnnnnnnnnnnnnnnnnnnnnnnnnnnnnnnnnnnnnnnnnnnnnnnnnnnnnnnnnnnnnnnnnnnnnnnnnnnnnnnnnnnnnnnnnnnnnnnnnnnnnnnnnnnnnnnnnnnnnnnnnnnnnnnnnnnnnnnnnnnnnnnnnnnnnnnnnnnnnnnnnnnnnnnnnnnnnnnnnnnnnnnnnnnnnnnnnnnnnnnnnnnnnnnnnnnnnnnnnnnnnnnnnnnnnnnnnnnnnnnnnnnnnnnnnnnnnnnnnnnnnnnnnnnnnnnnnnnnnnnnnnnnnnnnnnnnnnnnnnnnnnnnnnnnnnnnnnnnnnnnnnnnnnnnnnnnnnnnnnnnnnnnnnnnnnnnnnnnnnnnnnnnnnnnnnnnnnnnnnnnnnnnnnnnnnnnnnnnnnnnnnnnnnnnnnnnnnnnnnnnnnnnnnnnnnnnnnnnnnnnnnnnnnnnnnnnnnnnnnnnnnnnnnnnnnnnnnnnnnnnnnnnnnnnnnnnnnnnnnnnnnnnnnnnnnnnnnnnnnnnnnnnnnnnnnnnnnnnnnnnnnnnnnnnnnnnnnnnnnnnnnnnnnnnnnnnnnnnnnnnnnnnnnnnnnnnnnnnnnnnnnnnnnnnnnnnnnnnnnnnnnnnnnnnnnnnnnnnnnnnnnnnnnnnnnnnnnnnnnnnnnnnnnnnnnnnnnnnnnnnnnnnnnnnnnnnnnnnnnnnnnnnnnnnnnnnnnnnnnnnnnnnnnnnnnnnnnnnnnnnnnnnnnnnnnnnnnnnnnnnnnnnnnnnnnnnnnnnnnnnnnnnnnnnnnnnnnnnnnnnnnnnnnnnnnnnnnnnnnnnnnnnnnnnnnnnnnnnnnnnnnnnnnnnnnnnnnnnnnnnnnnnnnnnnnnnnnnnnnnnnnnnnnnnnnnnnnnnnnnnnnnnnnnnnnnnnnnnnnnnnnnnnnnnnnnnnnnnnnnnnnnnnnnnnnnnnnnnnnnnnnnnnnnnnnnnnnnnnnnnnnnnnnnnnnnnnnnnnnnnnnnnnnnnnnnnnnnnnnnnnnnnnnnnnnnnnnnnnnnnnnnnnnnnnnnnnnnnnnnnnnnnnnnnnnnnnnnnnnnnnnnnnnnnnnnnnnnnnnnnnnnnnnnnnnnnnnnnnnnnnnnnnnnnnnnnnnnnnnnnnnnnnnnnnnnnnnnnnnnnnnnnnnnnnnnnnnnnnnnnnnnnnnnnnnnnnnnnnnnnnnnnnnnnnnnnnnnnnnnnnnnnnnnnnnnnnnnnnnnnnnnnnnnnnnnnnnnnnnnnnnnnnnnnnnnnnnnnnnnnnnnnnnnnnnnnnnnnnnnnnnnnnnnnnnnnnnnnnnnnnnnnnnnnnnnnnnnnnnnnnnnnnnnnnnnnnnnnnnnnnnnnnnnnnnnnnnnnnnnnnnnnnnnnnnnnnnnnnnnnnnnnnnnnnnnnnnnnnnnnnnnnnnnnnnnnnnnnnnnnnnnnnnnnnnnnnnnnnnnnnnnnnnnnnnnnnnnnnnnnnnnnnnnnnnnnnnnnnnnnnnnnnnnnnnnnnnnnnnnnnnnnnnnnnnnnnnnnnnnnnnnnnnnnnnnnnnnnnnnnnnnnnnnnnnnnnnnnnnnnnnnnnnnnnnnnnnnnnnnnnnnnnnnnnnnnnnnnnnnnnnnnnnnnnnnnnnnnnnnnnnnnnnnnnnnnnnnnnnnnnnnnnnnnnnnnnnnnnnnnnnnnnnnnnnnnnnnnnnnnnnnnnnnnnnnnnnnnnnnnnnnnnnnnnnnnnnnnnnnnnnnnnnnnnnnnnnnnnnnnnnnnnnnnnnnnnnnnnnnnnnnnnnnnnnnnnnnnnnnnnnnnnnnnnnnnnnnnnnnnnnnnnnnnnnnnnnnnnnnnnnnnnnnnnnnnnnnnnnnnnnnnnnnnnnnnnnnnnnnnnnnnnnnnnnnnnnnnnnnnnnnnnnnnnnnnnnnnnnnnnnnnnnnnnnnnnnnnnnnnnnnnnnnnnnnnnnnnnnnnnnnnnnnnnnnnnnnnnnnnnnnnnnnnnnnnnnnnnnnnnnnnnnnnnnnnnnnnnnnnnnnnnnnnnnnnnnnnnnnnnnnnnnnnnnnnnnnnnnnnnnnnnnnnnnnnnnnnnnnnnnnnnnnnnnnnnnnnnnnnnnnnnnnnnnnnnnnnnnnnnnnnnnnnnnnnnnnnnnnnnnnnnnnnnnnnnnnnnnnnnnnnnnnnnnnnnnnnnnnnnnnnnnnnnnnnnnnnnnnnnnnnnnnnnnnnnnnnnnnnnnnnnnnnnnnnnnnnnnnnnnnnnnnnnnnnnnnnnnnnnnnnnnnnnnnnnnnnnnnnnnnnnnnnnnnnnnnnnnnnnnnnnnnnnnnnnnnnnnnnnnnnnnnnnnnnnnnnnnnnnnnnnnnnnnnnnnnnnnnnnnnnnnnnnnnnnnnnnnnnnnnnnnnnnnnnnnnnnnnnnnnnnnnnnnnnnnnnnnnnnnnnnnnnnnnnnnnnnnnnnnnnnnnnnnnnnnnnnnnnnnnnnnnnnnnnnnnnnnnnnnnnnnnnnnnnnnnnnnnnnnnnnnnnnnnnnnnnnnnnnnnnnnnnnnnnnnnnnnnnnnnnnnnnnnnnnnnnnnnnnnnnnnnnnnnnnnnnnnnnnnnnnnnnnnnnnnnnnnnnnnnnnnnnnnnnnnnnnnnnnnnnnnnnnnnnnnnnnnnnnnnnnnnnnnnnnnnnnnnnnnnnnnnnnnnnnnnnnnnnnnnnnnnnnnnnnnnnnnnnnnnnnnnnnnnnnnnnnnnnnnnnnnnnnnnnnnnnnnnnnnnnnnnnnnnnnnnnnnnnnnnnnnnnnnnnnnnnnnnnnnnnnnnnnnnnnnnnnnnnnnnnnnnnnnnnnnnnnnnnnnnnnnnnnnnnnnnnnnnnnnnnnnnnnnnnnnnnnnnnnnnnnnnnnnnnnnnnnnnnnnnnnnnnnnnnnnnnnnnnnnnnnnnnnnnnnnnnnnnnnnnnnnnnnnnnnnnnnnnnnnnnnnnnnnnnnnnnnnnnnnnnnnnnnnnnnnnnnnnnnnnnnnnnnnnnnnnnnnnnnnnnnnnnnnnnnnnnnnnnnnnnnnnnnnnnnnnnnnnnnnnnnnnnnnnnnnnnnnnnnnnnnnnnnnnnnnnnnnnnnnnnnnnnnnnnnnnnnnnnnnnnnnnnnnnnnnnnnnnnnnnnnnnnnnnnnnnnnnnnnnnnnnnnnnnnnnnnnnnnnnnnnnnnnnnnnnnnnnnnnnnnnnnnnnnnnnnnnnnnnnnnnnnnnnnnnnnnnnnnnnnnnnnnnnnnnnnnnnnnnnnnnnnnnnnnnnnnnnnnnnnnnnnnnnnnnnnnnnnnnnnnnnnnnnnnnnnnnnnnnnnnnnnnnnnnnnnnnnnnnnnnnnnnnnnnnnnnnnnnnnnnnnnnnnnnnnnnnnnnnnnnnnnnnnnnnnnnnnnnnnnnnnnnnnnnnnnnnnnnnnnnnnnnnnnnnnnnnnnnnnnnnnnnnnnnnnnnnnnnnnnnnnnnnnnnnnnnnnnnnnnnnnnnnnnnnnnnnnnnnnnnnnnnnnnnnnnnnnnnnnnnnnnnnnnnnnnnnnnnnnnnnnnnnnnnnnnnnnnnnnnnnnnnnnnnnnnnnnnnnnnnnnnnnnnnnnnnnnnnnnnnnnnnnnnnnnnnnnnnnnnnnnnnnnnnnnnnnnnnnnnnnnnnnnnnnnnnnnnnnnnnnnnnnnnnnnnnnnnnnnnnnnnnnnnnnnnnnnnnnnnnnnnnnnnnnnnnnnnnnnnnnnnnnnnnnnnnnnnnnnnnnnnnnnnnnnnnnnnnnnnnnnnnnnnnnnnnnnnnnnnnnnnnnnnnnnnnnnnnnnnnnnnnnnnnnnnnnnnnnnnnnnnnnnnnnnnnnnnnnnnnnnnnnnnnnnnnnnnnnnnnnnnnnnnnnnnnnnnnnnnnnnnnnnnnnnnnnnnnnnnnnnnnnnnnnnnnnnnnnnnnnnnnnnnnnnnnnnnnnnnnnnnnnnnnnnnnnnnnnnnnnnnnnnnnnnnnnnnnnnnnnnnnnnnnnnnnnnnnnnnnnnnnnnnnnnnnnnnnnnnnnnnnnnnnnnnnnnnnnnnnnnnnnnnnnnnnnnnnnnnnnnnnnnnnnnnnnnnnnnnnnnnnnnnnnnnnnnnnnnnnnnnnnnnnnnnnnnnnnnnnnnnnnnnnnnnnnnnnnnnnnnnnnnnnnnnnnnnnnnnnnnnnnnnnnnnnnnnnnnnnnnnnnnnnnnnnnnnnnnnnnnnnnnnnnnnnnnnnnnnnnnnnnnnnnnnnnnnnnnnnnnnnnnnnnnnnnnnnnnnnnnnnnnnnnnnnnnnnnnnnnnnnnnnnnnnnnnnnnnnnnnnnnnnnnnnnnnnnnnnnnnnnnnnnnnnnnnnnnnnnnnnnnnnnnnnnnnnnnnnnnnnnnnnnnnnnnnnnnnnnnnnnnnnnnnnnnnnnnnnnnnnnnnnnnnnnnnnnnnnnnnnnnnnnnnnnnnnnnnnnnnnnnnnnnnnnnnnnnnnnnnnnnnnnnnnnnnnnnnnnnnnnnnnnnnnnnnnnnnnnnnnnnnnnnnnnnnnnnnnnnnnnnnnnnnnnnnnnnnnnnnnnnnnnnnnnnnnnnnnnnnnnnnnnnnnnnnnnnnnnnnnnnnnnnnnnnnnnnnnnnnnnnnnnnnnnnnnnnnnnnnnnnnnnnnnnnnnnnnnnnnnnnnnnnnnnnnnnnnnnnnnnnnnnnnnnnnnnnnnnnnnnnnnnnnnnnnnnnnnnnnnnnnnnnnnnnnnnnnnnnnnnnnnnnnnnnnnnnnnnnnnnnnnnnnnnnnnnnnnnnnnnnnnnnnnnnnnnnnnnnnnnnnnnnnnnnnnnnnnnnnnnnnnnnnnnnnnnnnnnnnnnnnnnnnnnnnnnnnnnnnnnnnnnnnnnnnnnnnnnnnnnnnnnnnnnnnnnnnnnnnnnnnnnnnnnnnnnnnnnnnnnnnnnnnnnnnnnnnnnnnnnnnnnnnnnnnnnnnnnnnnnnnnnnnnnnnnnnnnnnnnnnnnnnnnnnnnnnnnnnnnnnnnnnnnnnnnnnnnnnnnnnnnnnnnnnnnnnnnnnnnnnnnnnnnnnnnnnnnnnnnnnnnnnnnnnnnnnnnnnnnnnnnnnnnnnnnnnnnnnnnnnnnnnnnnnnnnnnnnnnnnnnnnnnnnnnnnnnnnnnnnnnnnnnnnnnnnnnnnnnnnnnnnnnnnnnnnnnnnnnnnnnnnnnnnnnnnnnnnnnnnnnnnnnnnnnnnnnnnnnnnnnnnnnnnnnnnnnnnnnnnnnnnnnnnnnnnnnnnnnnnnnnnnnnnnnnnnnnnnnnnnnnnnnnnnnnnnnnnnnnnnnnnnnnnnnnnnnnnnnnnnnnnnnnnnnnnnnnnnnnnnnnnnnnnnnnnnnnnnnnnnnnnnnnnnnnnnnnnnnnnnnnnnnnnnnnnnnnnnnnnnnnnnnnnnnnnnnnnnnnnnnnnnnnnnnnnnnnnnnnnnnnnnnnnnnnnnnnnnnnnnnnnnnnnnnnnnnnnnnnnnnnnnnnnnnnnnnnnnnnnnnnnnnnnnnnnnnnnnnnnnnnnnnnnnnnnnnnnnnnnnnnnnnnnnnnnnnnnnnnnnnnnnnnnnnnnnnnnnnnnnnnnnnnnnnnnnnnnnnnnnnnnnnnnnnnnnnnnnnnnnnnnnnnnnnnnnnnnnnnnnnnnnnnnnnnnnnnnnnnnnnnnnnnnnnnnnnnnnnnnnnnnnnnnnnnnnnnnnnnnnnnnnnnnnnnnnnnnnnnnnnnnnnnnnnnnnnnnnnnnnnnnnnnnnnnnnnnnnnnnnnnnnnnnnnnnnnnnnnnnnnnnnnnnnnnnnnnnnnnnnnnnnnnnnnnnnnnnnnnnnnnnnnnnnnnnnnnnnnnnnnnnnnnnnnnnnnnnnnnnnnnnnnnnnnnnnnnnnnnnnnnnnnnnnnnnnnnnnnnnnnnnnnnnnnnnnnnnnnnnnnnnnnnnnnnnnnnnnnnnnnnnnnnnnnnnnnnnnnnnnnnnnnnnnnnnnnnnnnnnnnnnnnnnnnnnnnnnnnnnnnnnnnnnnnnnnnnnnnnnnnnnnnnnnnnnnnnnnnnnnnnnnnnnnnnnnnnnnnncggcacaaggtgctcggggacggtaggaccacctaccaatgaaaggcccgacgatgagcaccctgacgctgaagcaccgcatgcccggccgaatgctcaaacccttggtagctgaggcgccacggtgcatcttcaccagcggcacgctgcaggttgcgggtcgcttcgactacttcgtcagcgcactgggcctgagcagcatcgatccggcgtcgaggcacatcgaaccagcacagcatggtcatctggaggtcgaggtcgccagcggcgagatgaccgacgaagccaaggcgcagcgcatcatgcgcgccgaccgaccggtgttggtgctgaccaccagtcatgccgacacgcagacgttgggcaaattgttggccggcgccgtcgtgcgattgccagacgaagcgctggtcgctgcgctaaaccgctgtccggatgacggtgtgctggtggcagcgggggcgtggtccgggctggacgctccgcgacttcgttggaagacggtggtcatcccgaaggcaccatacggtccacccgtgacgctggatggacagcaggtctcgcgctacatcgatagcagggtcacggccgtgcgccgcatctgtcagggcctgcaccggggcctgcgcacgccggacgcgcgctgcgcactcttgctgctggacccacgctgcgccaggacggagctgcgcgaggccgtgcctgcgcgattcatggtgctgtggtcgtccttcgaggaaggggcacgcgtcgaagtggtgctatcgaaggccgagcgcaacccgagcctgagggcgcaggcactgagacaccacggtgcgcaatgctcgtgggcgggctgctcggtcacgatgctcgaatggctcgacgtccatcacaaggacccggtgtcggaaggcgtccgccggacgaccctgtccgaccttgaagtcctctgcaagaaccaccatgccgaggctcatcggttgcttcggttggcgcgaatttcagggggcgaaacggaaggaacggaaggggggacaaagacttgcgggttacgacgtcaagctgctcagggcatgggcagttactagaactccaccaccagctcggccgacatcgcgcggggtcaagctgttcagggaatgggcagttactagaactacacaccgccggccgcgctgacgactctcggtcaagctgctcaggcaatgggcagttactagaacagataacacgcggcggtgtaggcgctgccgggtcaagctgctcagggaatgggcagttgctagaacccctgcggtgtggccgcgagatcatcggtgggtcaagctgctcagggaatgggcagttactagaacgccgttatcgccgaagaagtgctgcacaacggtcaagctggccagggaatgggcagttgctagaactatgcgtggtcgtaccgggtgccgagctttggtcaagctgctcagtgaatgggcagttactagaacttcacggctgcgtggcacgcattgaacaggggtcaagctgctcaggaaatgggcagttgctagaactcgatgacgctcgggcgcatcaacgcggcggtcaagctgctcaggtaatgagcagttactggaactacaggttgtagatcaccgtgcagtcgcgcagtcaagctgctcattgaatgagcagttgctagatcatggacacgatcttcatgtccaacgccgggggtcaagctgctcaaggaatgggcagttactagaacatgatcggcttgccgccaaccacgttgaagggtcaagctgcccagtgaatgggcagttactggaacatcctcgccgctcttctgccgtcgctggtgggtcaagctgcttagtgaaaaagcagttattagaacgggcacaactcccggctgcagtacatgcggtgtcaagctgctcagtgaatggacagttgccataacgaaccgttgccaacgtgcagtggttgatgatcggctgcaaagtagcgtagggcagcggctacccgtcgcggtggcactgcgtaggtcgcatttgagcgggagaagcaccgcctttcgggagcgacattgacgcaggtcgaatggcgaagtcctttgacacaagatcatcgcgcctcgggccttcgactcacaacaactcataacggcgcacgtcagcgccgtcgctgccatgaaatgcaagcttgtgacactgtgtttggcaactgcagcgtttttcgtaagcaatgccgatgcacatcccgttcaattcaacttcacggcaaatggcggcctcggaactcattacgaagggttcttggtagtcgatgacgacctgttcgacggcgggacatttcaatcgatcaagcaaagtcaattgactgatttcggcatgtcgttcagccaaaacggcacgccggtgtggcagtggagttatggcgacttggtgctggactctgagtggttcttcgatagcagccaaccggtgccggatattgtcggcatgggaggactgatctctgaaaaccaccgattggtagccgcttcgactggcaatatcagcgctgaattcttcggtgcaagtggagattgggtctatgtcggcgctgtggcgcccacaggcgtcccagaaccgagcacacgcgctctcgcgtgcgcggcgctgttgttggccgcctccacgtgcgtggcgaccgcctgtcgacatagacgatcaaccggcttccgcagccccttgatgtgctgccaccgtggcgtcgactctgccggtgcccaatcgggcaaagttgcgtagggcagcggtcaacgcacgtcgttgccgctgcgctgctttcgtcgcttgctcagcgcctgcacagagtcacttgcagcgacgtcgtcgcggactgacgcctcgaccagcgtcaacgccctgccgatggcgcgaaggtaggcggtagcgcactgcctgtctgccgagaagaacagatgttttgctgcgttgcgctcccgagggttacgcatcgagcctctgtcgcgtgccaacagccctcaattgggttactgcaccgatacagcgggtataggcgccctgcgcctgcattgccgccttcaaatacttgagtctgtgctccgggctctgacactcgacagcagcagccgagaacctgacgaacagcgcgtcgcatattgcggcatgcgacagtagttcgttttgaactgtcagtccgtcttgtgacccaagaagagcaattcggcgattcattgcctcaagggccgatcctttctcaactgtggttgagtctccacttgagacgtattgagtcggccctgcaaattccaaattcgccacgcagcttgaccgctgggcgacggctacacgccg

SEQ ID NO: 155 - DNA, 13272 bp, Artificial Sequence
  Synthetic Oligonucleotide
gagctagacaaaaaagctgagagcgacgagcataaagttgctgtaaaagagatgatgcaaaatctcctaaactcagcagacgaatctatcttttctcgttggcagacaatcggtaagtttgcagaccaacttcaaccgtattcagcttcactacctccagtccgagacagcttacatctactagctcaagcaataaaagaaaaagcaccaatctctagatgggtgaagcaacacaagctgacacctgaaactcccttcaaagaaatcaaacttcttcgcactgaagcaaagacaggaaaagccgcaccaagaaagaaatcaaaagctagtgagcatcgagtacacaggataactttaagctttgatggtgagctttcttcaaatgaaatcgcaaagttgctattggaagttgttcaatctgcttcaattgtcaaaattgtctctgacgcatcaatccgacaaggactaaaaagcatcatgcgagaaggcttctctacccttgaaggaaaatatcatgggtagcaaaaagtacattgattacccccttcaaggaacttctcttgatattccgatggaagaattgatggaatacgatgacgaagaaaggggggtatacattgacatgatgcttgatggattctcaaaagagatttccaaaggaaccatgtccctgaaaaagcgagtctcattcaaagatgagattgctgactaccgaaaactagcacgacttcctgcagatgcttatcttatggcggatgataagtatcataagaggaatgttctgggtatcggttcaccgggagctaagcacacctatcatcttcgtcaccatatgtggaagatggtaacaaagcagggatcattagaaagtcaaataaaaacaaaaaatgtaaatttagtaaagaagatagacaagctacttgaccccaagaaccaaagcaaagctcagttcagagggagtggtggaactgcaattcaagtggtatccagattcttgcaaatgaataacagtgtgggtgctgcgttcccaccattccatgcacgatttcttgcaaatgaatttctcccaaaggagggagattgcttagtgattgatccatgtgcaggttggggtggtcgcttacttggaacaatctgcgtaaaacgaaaagcattcgtgaagtatgttggtatcgatccagaaaagagaaatctagaagcttatcaagcattgcaaggatattgctggaaataccttaagcgagaagtaggtggtgagagagactcagaaatctactcaaaaccatttgaggtgtggatcaaatcaagagccgcaaagcagtacatgggaaaagcagatctagtaatgacgagccccccttactacgatgctgaactttacaatgactccaacacaaagcaatccgctaaaaaatttcaaacctacgaacagtggagagatggattctatacagaacttatacaaggtgcgtatgacttgctgaaagagggtggggtctttatcttgaatgtagccaatgtaaaaagtgcagaaaaacttgaaagtgatgcacgaaagatagcaaagctagttgggtttcaagatattgggtactacaaactcgctatgggtgtcaccccaggaacaagacagaatattcgtcactcagtaatcgtagatggagcattatacaaatacgaacccgtattttgcttccgtcgctgacgatctaatgaaagctgaggctgagtttgaaatcagtaaatgcacttaaaggattgaccggatggaatctgctcaaagagctgtaccgggaacatgacaagaaattgcagaactcttttgggagaattaagaaaactgatgcagtcacgattgtcaaagacggtgctattccaataggtgctttcgtaaaaagaaccagaaagtcagctagtacggaatgtctctatcggggtgatggtcgttcagtaccggtaactaagtacatgagtggtgatactgaaatatccaagctcacctgcatctcaaaagacaagaagtcaattgaattagttgtgaaacgacttgagcgggtagcgaaaccttgtagcgttgaagttctagcgtcagacaaaacaagtcgtcaaatacttcgtctagcggggttcgtcagaactggtgcttcagtcaattcgttgggtgatgtttaccacatttactttgacaaagaatcctccccatcaagaaagataaaagtaccagcagctgagttagtaaccttcagcaaactaccaatacagaatctcacaaaatttatagcagcaattaaccgaaaaattgaccaaaggatagtcgcattctcggtgcatccatcttcttacaataaaaacgaaacatggtcggctatcgcattgaggggatatttaccaaacccgttctatattgagagcttggaagaatcttcagcttaccagaaaaaagaaaatgctgaatggttgaagaactataagaagtgtcagcaaggactccaagatactgagctcatgaaacactttccagaagtacagaaaatacttgattcaatcattccaaattcatcaaagtgtggaaatgctcagttcaaacgagttcgattcatgcggctcgcacccaatgaaggtgagttgctaagacataccgatttgacagacaagacattgggtattgaagatggaaagacaatgcgactgcatgtccctataagaacaaatccaagagtgcttgtcactcaatgggatttagacgacaaacccaaatctgttcatatgaagaaaacagaatgctggtatctcaacattcgcttaccgcataaagtcatcaatcaaggatcaaaagaaagaattcaccttgtgattgatgttattgcagatagtcatctgagagaaatgctgaaatagcagctacctcaagcttcctgagaactgacttctctagttcctatgtcgagctgctgcattgacacatagcattgctttctttgtcgctcaagattaccgaattgactccagatttgtgtcttttagtttcttgttcttatttaaaataagaaagacagaatctggaaaacatgaatttggaaaacatgaatttggaaaaaatgaagctggaaaaaatgaagctggaaaacatgaatttggaaaacatgagtttggaaaacatgaatcttgaaaatttagctaagagctaagagctaagagctaagagctaagagctaagagcatctggtatacatccgtacttttccggtaaacatgagttcatagtattgaaaattcaacttggtatctatactatgaaaagcatgaaattgataaatatttcagtctattgcttcagatatcagctggaagcgtagatggaggaagcgataaaagccatgagggaaagcttcgtgatttaccttttcaatgcatagtcattgcaattagagcgtcctattgtcttcctcaaagtaaaccaaagaaaccacagcaaaccaaagcaaccgacagaacaccatgaggaatatgaaaggaactcaaagatgcagacaagacccattgcaaccagatttcagaaagcaagaagaagtcagtcagagaaattgatggaatctcaagaaggaactctagaccaaagacttatcaagtacatgttccgactcaacagaaattacatcaagctagatgaagttccatcaatttacaagttgccctattccgaaagaagtagacttgaactgactaaagatatggtcaagtttgaatcaagcgatagacgattattccacttgaccgtaacttataagccatatcgagaccgaaattaccaagagactgatgtaaataacttcttcaccaatttttaccgtaaaggtctattaccatatcttctaaagactgaagaaattaatagaccagaattgcttgagtatcatcctataacttattgctttgttgatgaacatgagcattcaagagttggaaatggttttccagtaagacttcatcatcatgttgtactagctgttcatccatctactattattccaatggtgcagcttcatggtactaataccttgagatggttaaccatgtccgaaaagatagctacatctcaagtgactgatgctagaccaccagtcgtactttatgcatccaagaagatgaaatattaccctgactatatgcactttggtcctgaagattttgatccaccaacacctgattttgttccaaatcctgtttgggatcacttccagtcagctgctgtatccagacaccgctacaggaactactaatacaataaggcaatcaccgaggacaaacatgggtgtcacttatggaagaaaaaactttagacatccttcaacatgaactatatgagcttgaagaacagcttcctgaaggaggtcgtattgaatactacagacgaaaacgattccttgaagcagctcttgagcaatatgtgcagcactatttacatggagatgaatgtaacgaagatcgagtaaaactactactcaagcagaaatcccttacctataaatttattttcatagctttggttgtcgcagttattagttgggtctttgagctagaaatagagctgtgcttgttactgacaacacttcttctcggctactttggtagaacatacatggatatcaaggtagatgatctaggacttgtgaatgagtatgttctacatgaatttgataaaaagcgaattgaacgagacttagcatcattcggtgttgatgcagagagtctcaagaaataccaatgggattggtatgtcgagaccggtaaaaatgtcacatatgatgggtacgatccaaattcagtttcgttaggtgaaacctacatgaatcaaggaattcttgagaaattgtataaggaatgactggaaaggatagtgctgactatctttcttgtgaagtctggtgatgcataaatagatgtattgactctcaagtgaccaatctcgtcgtgtgagtattcgcttcgctttggtcaatgagtcttaatcttcaaaggagatacatcatatggaaacagactatgcatttgctacacctgctaaacaatttccacttagactggagcagacactagcacaagcttttgctcaagcagcagaagatatgggtatgacaaagactgaatttgcatcaagagcgattcagcgatacatgaatgaagtcactacttcgggtgcaagagagtatttgaagggtctgagtgcatgagcagagaactagaccttattgctaaagagttctctaagagaccctgtacggttatgcggaaagacttgaacttgtatggaaagaaccttcagcaagagatggcaggttttgctagggaagtagaaaaagaggctaagaaaacgaagcaaggaaagctgatgataatttctgtgctgagtgagtagtaaagatatttaataataattgccttatttgcagacacaaaggaaaaaaaatgagtgaagaattggaattggatcaatatggtttgacacctgatgacgagctttatgaattctctttgattcagatttcagatgatggtactacggtatctgtgcgtccgtatacaaacgcacttatgggttggtggaagcggagaatgaatcaaccggacactattgatatcgctaaggacggcatgtcttccactttgaatttcaaatcatcgttttcaggtggtgattccgatatctctgtgtttgaagaggatgacgaaattaatttagataactacattgaggtgtatgaagaaacaggtctaatgtcttattttatctatcttgctaagccagtacctgaggaattaacacacgaggtttctaacacgattttgaatacaaatccacacctgcgatttggacatcttgaaatttgctcaacaggttcgaatgaccatgagttgcttcgttttcgttcatcgatatttctcaagaaaatcaaagttggaaaggtagacagtgtggaagagttcgtcactaatagtcagctaagttgcactattggactaggactaatggctacaatcgatgagtcaattaaagaatggattttacaggctgagtagagttatttgctttctctaaaaaaataactttctgaacctagtttgaacccacttagtggcaccctaaaacccgctttacgactcggttccagcagcaagttcaacaaacactttctgaacccacctgtattcgctgaagttttacgcaagtccgtagccaaaaccccgcttcaggacagatctgtaggtgctgaatttctcgtaaatgtaggtcagatccatcgcaatgtgaagcttattgcttccattttttgtatggtctgctagattagactatctagaatcaagatcctcaagcgacaactcaaggaagaggttgggactttccaagtttgcaattcttttacatattcccagctttgagggaactgctttttactctattcttatccgcaaggtcacaactcaaaactgaaaagaatctgattgatggacaaattcagtctcacagtaagactcaagacacctttggtgacagggggtggttatctgacattagatgctttattagcaggaatcctatttgacgagactggggatgttgatctgtctcatgcagaaatacccctgatgaatacagatggagtctggcatggtagtgctgcaatttttgagaagcacagtgtaggtaagcaagtctttgtggctaatctacgagcaatgcatgaccttgacattgagcttgtagcaagaaatgctcaaggaaaaacacataaagcacttgggttagcaagacgcagggactttggagctgttcttaatgcttatcgtctaatagttgcacctgaaattacttggtacggacaaggtgatatcaaagctgtcgaagctatgatttctagtatttcatttattggaaaacgacgagcaagtgggtatggtgaaattgacagctaccacattgaagattcagagctagacggaatcttgggctatctcaacgaaccactcagaccgattccacagcagctgtatcaaggtgacagaaatgcacttcgagcagatgctgcttggagacctgcttactggcatcctgataaccgtgcgatttgctatgttccagattcagagtcatgaatacatacgagtttttcgttgagcattttggaaagcatcttatagaggtagatgatttatcagcttcagctgctgcatacaaagcgttgagcagtaatcataaactccaaaaaggtactactggtcgtctaagttcaggctgggctattgttcgaccaactcgttcaacggtacagctaaagttagcggctagtgggcttaattttgatgatagaacccgagtagaagcttttagtgatgagctgaaagaatgggatggaagtgaaccaagactttttcttatgtttgataaagcaccgcttccaatctcaaatctctttctatcagtagataggcgacttgtaagaatatgctctccagcaggtgttgaatcctttgatgcagatgctgagccgacacctgattcgggtggaattcaaaaggctctctggaagagaaggcttacagatgcttgaccatatcattccgaaaccgtttgtgattgaagcttatgcggggcatcgtatcgttgcagagctgtgttcaggttaccactatcaatttgtagatatgggggattacttcgtcgtcagaactgataaagaaatcacagcgacaggaagagtcataaagttacctgctaatgacgaaatcatagccttctctttgcgaacttctgtagcatcaagacacaagaatcagaatatctatccagctactggagattggagagtccgtagagcttggttagaaaagcaaggagaaaaatttggttttttagttcaagcagttcatgtaacttcaagacacttgaagattaaagataaagatagtcgtacatttgctattgactgcacagacttcaccggtgtgcttaaggtaactaatgcaaccttaattgaaactgcaataacaaatggaattggaagggtgggaaaagcattcggtatgggaatgctagtaatctgacgaatttggagagctttatgaaagacatacttatcatcaacggcatcattcgtaccgaatcacctttgtcaataaaaatgcctattgctgaaggttcaagagaaaatgaatttgaaaattttcctgttatgactagagggattgattcggatggaaacagacttcagacaggatttcttccagcgacaacactcaggggctttttcagacgagcaattgtcctgagaagtatgaaacaagctgctgatgcaggaaagccgtaccgattacctcagatttacactgaaatgattggtcaagatgcagatagtgagaagcaatctgatgagattgatctccaagcattaagggctgctagggaatctagccctgtgctagatctttttggaagtggtcttggaattaaatcaagattaaaagtaggtcactttgttccatcaatcaatgtgttacctgaagttttcactggtgttaggaaagacttagatgatacagaagatgctcttaatttgatggatcaaaatgatatgcaagactttttagggagaagtcaaagtaacaatcaaagagctgccgctgctgctcttgtgaaaagtcttgaaagaaaaatcagagctgatatgaaaaagggagctgtatcacctgatgatcaaaaagcacttgatgttgcaagagctagtctagacaaattcaaagaagcaatgggggaaatgcaggtaagtacaagaaccattgttcaacactttgcattaccggcagcaattgacttacatggtcgtattgtgattgataaagtcaacgaaaaagacattgagatgattgactatgcgttatcagagctgagtaaagctccaatattaggtgctcatagtgcaagaggatgcggagagatttccggaaagttcgatttctttggggcatctggtgaacaaattaaaaccatcacgattggtggattttcttctccgaaagtcacaaatttttaataaatagaaagtgtttttctatgtcttttcaattgcttatggatgagcaggtcaagccactcattatttgagaggctactgagagcctagcatttcaagcattgtttgcatcactggtcaagccactctttatttgagaggctactgagacgagtacgaggaaactgaagaagatcgttacggtcaagccactcattgtttgagaggctactgagagtttattaccgcaattttttgcattgcttgctgtcaagccactctttatttgagaggctactgagagaccgtctggctccctgcgtgatgcacatatggtcaagctactctttatttgagaggctactgagagttgtaacccactagtatgtcaggacatcccggtcaagccactcttattcgagaggctactgagagaagaacttttgtggaattggtatcgggcaggtcaagccactcattctttgagaggctactgagaggttgtttactggaatgttcaccgcaacgactgtcaagccactcttattcgagaggctactgagactgagggaacttagattgttgtcgttaggaaggtcaagccactctttatttgagaggctactgaaagtattacgtcacgtttaagcaagcgcagcaaggtcaagccactctttgtttgagaggctactgagagttgattacgccaatgttttgcagagcttgctgtcaagccactctttatttgagaggctactgagaggaacctgacagcttgggctgcgtaaagctgggtcaagccactcattatttgagaggctactaaaagtggtaagcctgttttacttccgcatcgaattaaaagccactcacaaattgagaggctaatgtgttaccttaaaggtcactttttacagtgaccttttttcttatgtttcgctcacccgaacaagcaaattttttcgcaatcatcagggctcactttgatgcaccacagcaacctttgcttattgaaggagctacaggtcttgggaaaacaagagcgtatcttgctgctgttgttcacgcagtagagagaggtaagaaagttgcgattgtacttcccacccacatgcttattgagcagcttctcacttcaaacgatctaaaaattgtcgttccgtcaaaaatttcggtagtagcttttctccccaaaagatggtttgaccatcaatcgcagtacaaagagcataggaacaaagcacttgaagcagatatcatgctttgtactagtgcttcggtgatcattgaccaaagattaaaaggtgattacaacggagttgttaaacgagactttattatctttgatgaggctgatcaacttccagaagcagccgcattacaaagcgattgcgaagtaaaaagtagtgttttgaaagaatatggtattaattctggtcgtcctgatcaagcagcgactgagcttctgactaaaaaggatgtgtcacaggaagatagagcagctgcacttatgattcttgaagctactcttgagccagcttggtatcacaaagctggaagaactgatgatggtggaatcatgctttatcacagaatgcctggacgattactcaagagaatctccaatcaaaaaaatgtagtctttattagtgcaacgctgtctattggtggtaattttgatgactttaagcgttcaatgggtattattgagtccagttacttagctacggtcattgaacccgttaggcatgggtcgctttcttttcatgtctcagaaaagtctgtagatgattacgattggcttccatctgtagtgcagatcatccaatcagcacataagccgtgtctggtaattactccaagtcattctttagcagaaagcattggctcatttcttccagatgctactgttaggaaacgaggtaatgaaggggagacaacggaaactacatctgacgcagcgaagcgaatgggaaactcgggaattttgattgctgctggagcttgggctggtcttgataccccgattgagtggaaaagcattgtcgttcccagaattccatatgaacgacctgtagttctggatgatgaaatagaaagtagctttcttcatacacgaaacacagctattcgtcgtatgagacaagttatcggtagaggtctcagatcaccagatgcttcttgtgatatttttattgttgataaaagattcagtaacattgagtcgtttgttcctactcggtttcgtaccaattggtctcataagacattcttggaaggtatcagatcagaagttgttttatcaaagattgaaagagatccttcgttacgaaaggctgcactaaagtactttggaaaaagctgtatgtcttgtgggtttaaccctagagttgattctcaattggatgttcatcacttgtatccacttgcagatagtggagaacgacttactaaaatcactgatgttgctgtactttgtgcgaactgtcatagattagctcacactgcatctccaccgtattcaattgatcagttgcgagttttaattggaactacttcagagggtagttgatgcacttctttatttgatatttttctgatcgcttagatgacggtatacaccgtacccacaccaatctgtagctgctttgctatctgcttgattcccatacctttctcacgcaatagcttcaccgcagacttcatcccatcgttcatcttcgatggtcgacctaatttcacaccgttagctttagctcgttgctgaccagctagtacacgctcacgaatcagatttcgttcaaactcaccaattgcaccaaacacggagaagatcatcctaccgctaggtgtcgatgtgtccatgccttgctgctgaaagaagaggtcgattcccaatgcttgcagttcgttgagtatctcgactaagttctgaagcgatcttcctagtctgtcgatgctccagcacataaccatgtcgaacttacgttgggtagcagctttcagcattgcatcaagagcaggtctgtcgttcctaccttttgctcctgaaataccgctgtcgctgtattcttgaacgattgtgtagccaagtcgttcacagagactacgaagctctctagtctgattctcgacagtctgtttgtcggtagagacacgggtgtagatagcgacggttttcattggaaatccttgtcaaattaccaattcgcactatactactttctatactacattgcaataaaaaccaataaaatcaacaagttagcttattgctattctatttcgtaatcagtaggtcggaggttcgactcctctcatcagcaccaaagtctgactgcttccaattatgtcgatctcaatctgattgagatagcatgtttcgtattgctgtaacgaaggcttcagctttctttattgcgctggatacctgttcgctggtgatttcctcacccgtgtaatcagccaagagccttaattgttcgacctcattgaatgcgcgacccaattcgcgagaaatcttatcagttgagacgatatgcaatccaaacgcagcgatgagtccactatgcgttttcgtggttttgtaatcggccctgttttgtgcgagtagtgcggcatgtgctgcatcatacatggcgtaataggcgcggttacatgctccttcgatctcgcctgcttgactaagcaactgcgcagcgcgcaacgcacgctctgctttagcgagatatttctcaggcgtaaaggctgaattcaaagtcgaacgccctctcggcggatagtgttaaccaaagctgggttactgaattgttctgggtgcgccaactcgtcactcgacaatggcagggcttgcaccagaatgccagtatcaagcaagacatcaaacgcaataccggccatcgcgacggccgtctcggacctgttgtccggctgatctttcatgatgacggcaaggtcggcatcactatccggccgatgggcatttcttgccctgctaccaaaaaggattgcgtggtcgatatggaatttccccgagattcgctcaagaaaaatcctggcggcattcaccgtagccggatcaatttttgatgtcattttattcatctgagtaagtctagcatggcttgaaatgccattgggggggggctgaattaggccgactgagtcgccgtccaagctgggggagcgatggaataaatcgtat

SEQ ID NO: 156 - DNA, 13270 bp, Artificial Sequence
  Synthetic Oligonucleotide
  misc_feature (1)..(7737): n is a, c, g, or t
nnnnnnnnnnnnnnnnnnnnnnnnnnnnnnnnnnnnnnnnnnnnnnnnnnnnnnnnnnnnnnnnnnnnnnnnnnnnnnnnnnnnnnnnnnnnnnnnnnnnnnnnnnnnnnnnnnnnnnnnnnnnnnnnnnnnnnnnnnnnnnnnnnnnnnnnnnnnnnnnnnnnnnnnnnnnnnnnnnnnnnnnnnnnnnnnnnnnnnnnnnnnnnnnnnnnnnnnnnnnnnnnnnnnnnnnnnnnnnnnnnnnnnnnnnnnnnnnnnnnnnnnnnnnnnnnnnnnnnnnnnnnnnnnnnnnnnnnnnnnnnnnnnnnnnnnnnnnnnnnnnnnnnnnnnnnnnnnnnnnnnnnnnnnnnnnnnnnnnnnnnnnnnnnnnnnnnnnnnnnnnnnnnnnnnnnnnnnnnnnnnnnnnnnnnnnnnnnnnnnnnnnnnnnnnnnnnnnnnnnnnnnnnnnnnnnnnnnnnnnnnnnnnnnnnnnnnnnnnnnnnnnnnnnnnnnnnnnnnnnnnnnnnnnnnnnnnnnnnnnnnnnnnnnnnnnnnnnnnnnnnnnnnnnnnnnnnnnnnnnnnnnnnnnnnnnnnnnnnnnnnnnnnnnnnnnnnnnnnnnnnnnnnnnnnnnnnnnnnnnnnnnnnnnnnnnnnnnnnnnnnnnnnnnnnnnnnnnnnnnnnnnnnnnnnnnnnnnnnnnnnnnnnnnnnnnnnnnnnnnnnnnnnnnnnnnnnnnnnnnnnnnnnnnnnnnnnnnnnnnnnnnnnnnnnnnnnnnnnnnnnnnnnnnnnnnnnnnnnnnnnnnnnnnnnnnnnnnnnnnnnnnnnnnnnnnnnnnnnnnnnnnnnnnnnnnnnnnnnnnnnnnnnnnnnnnnnnnnnnnnnnnnnnnnnnnnnnnnnnnnnnnnnnnnnnnnnnnnnnnnnnnnnnnnnnnnnnnnnnnnnnnnnnnnnnnnnnnnnnnnnnnnnnnnnnnnnnnnnnnnnnnnnnnnnnnnnnnnnnnnnnnnnnnnnnnnnnnnnnnnnnnnnnnnnnnnnnnnnnnnnnnnnnnnnnnnnnnnnnnnnnnnnnnnnnnnnnnnnnnnnnnnnnnnnnnnnnnnnnnnnnnnnnnnnnnnnnnnnnnnnnnnnnnnnnnnnnnnnnnnnnnnnnnnnnnnnnnnnnnnnnnnnnnnnnnnnnnnnnnnnnnnnnnnnnnnnnnnnnnnnnnnnnnnnnnnnnnnnnnnnnnnnnnnnnnnnnnnnnnnnnnnnnnnnnnnnnnnnnnnnnnnnnnnnnnnnnnnnnnnnnnnnnnnnnnnnnnnnnnnnnnnnnnnnnnnnnnnnnnnnnnnnnnnnnnnnnnnnnnnnnnnnnnnnnnnnnnnnnnnnnnnnnnnnnnnnnnnnnnnnnnnnnnnnnnnnnnnnnnnnnnnnnnnnnnnnnnnnnnnnnnnnnnnnnnnnnnnnnnnnnnnnnnnnnnnnnnnnnnnnnnnnnnnnnnnnnnnnnnnnnnnnnnnnnnnnnnnnnnnnnnnnnnnnnnnnnnnnnnnnnnnnnnnnnnnnnnnnnnnnnnnnnnnnnnnnnnnnnnnnnnnnnnnnnnnnnnnnnnnnnnnnnnnnnnnnnnnnnnnnnnnnnnnnnnnnnnnnnnnnnnnnnnnnnnnnnnnnnnnnnnnnnnnnnnnnnnnnnnnnnnnnnnnnnnnnnnnnnnnnnnnnnnnnnnnnnnnnnnnnnnnnnnnnnnnnnnnnnnnnnnnnnnnnnnnnnnnnnnnnnnnnnnnnnnnnnnnnnnnnnnnnnnnnnnnnnnnnnnnnnnnnnnnnnnnnnnnnnnnnnnnnnnnnnnnnnnnnnnnnnnnnnnnnnnnnnnnnnnnnnnnnnnnnnnnnnnnnnnnnnnnnnnnnnnnnnnnnnnnnnnnnnnnnnnnnnnnnnnnnnnnnnnnnnnnnnnnnnnnnnnnnnnnnnnnnnnnnnnnnnnnnnnnnnnnnnnnnnnnnnnnnnnnnnnnnnnnnnnnnnnnnnnnnnnnnnnnnnnnnnnnnnnnnnnnnnnnnnnnnnnnnnnnnnnnnnnnnnnnnnnnnnnnnnnnnnnnnnnnnnnnnnnnnnnnnnnnnnnnnnnnnnnnnnnnnnnnnnnnnnnnnnnnnnnnnnnnnnnnnnnnnnnnnnnnnnnnnnnnnnnnnnnnnnnnnnnnnnnnnnnnnnnnnnnnnnnnnnnnnnnnnnnnnnnnnnnnnnnnnnnnnnnnnnnnnnnnnnnnnnnnnnnnnnnnnnnnnnnnnnnnnnnnnnnnnnnnnnnnnnnnnnnnnnnnnnnnnnnnnnnnnnnnnnnnnnnnnnnnnnnnnnnnnnnnnnnnnnnnnnnnnnnnnnnnnnnnnnnnnnnnnnnnnnnnnnnnnnnnnnnnnnnnnnnnnnnnnnnnnnnnnnnnnnnnnnnnnnnnnnnnnnnnnnnnnnnnnnnnnnnnnnnnnnnnnnnnnnnnnnnnnnnnnnnnnnnnnnnnnnnnnnnnnnnnnnnnnnnnnnnnnnnnnnnnnnnnnnnnnnnnnnnnnnnnnnnnnnnnnnnnnnnnnnnnnnnnnnnnnnnnnnnnnnnnnnnnnnnnnnnnnnnnnnnnnnnnnnnnnnnnnnnnnnnnnnnnnnnnnnnnnnnnnnnnnnnnnnnnnnnnnnnnnnnnnnnnnnnnnnnnnnnnnnnnnnnnnnnnnnnnnnnnnnnnnnnnnnnnnnnnnnnnnnnnnnnnnnnnnnnnnnnnnnnnnnnnnnnnnnnnnnnnnnnnnnnnnnnnnnnnnnnnnnnnnnnnnnnnnnnnnnnnnnnnnnnnnnnnnnnnnnnnnnnnnnnnnnnnnnnnnnnnnnnnnnnnnnnnnnnnnnnnnnnnnnnnnnnnnnnnnnnnnnnnnnnnnnnnnnnnnnnnnnnnnnnnnnnnnnnnnnnnnnnnnnnnnnnnnnnnnnnnnnnnnnnnnnnnnnnnnnnnnnnnnnnnnnnnnnnnnnnnnnnnnnnnnnnnnnnnnnnnnnnnnnnnnnnnnnnnnnnnnnnnnnnnnnnnnnnnnnnnnnnnnnnnnnnnnnnnnnnnnnnnnnnnnnnnnnnnnnnnnnnnnnnnnnnnnnnnnnnnnnnnnnnnnnnnnnnnnnnnnnnnnnnnnnnnnnnnnnnnnnnnnnnnnnnnnnnnnnnnnnnnnnnnnnnnnnnnnnnnnnnnnnnnnnnnnnnnnnnnnnnnnnnnnnnnnnnnnnnnnnnnnnnnnnnnnnnnnnnnnnnnnnnnnnnnnnnnnnnnnnnnnnnnnnnnnnnnnnnnnnnnnnnnnnnnnnnnnnnnnnnnnnnnnnnnnnnnnnnnnnnnnnnnnnnnnnnnnnnnnnnnnnnnnnnnnnnnnnnnnnnnnnnnnnnnnnnnnnnnnnnnnnnnnnnnnnnnnnnnnnnnnnnnnnnnnnnnnnnnnnnnnnnnnnnnnnnnnnnnnnnnnnnnnnnnnnnnnnnnnnnnnnnnnnnnnnnnnnnnnnnnnnnnnnnnnnnnnnnnnnnnnnnnnnnnnnnnnnnnnnnnnnnnnnnnnnnnnnnnnnnnnnnnnnnnnnnnnnnnnnnnnnnnnnnnnnnnnnnnnnnnnnnnnnnnnnnnnnnnnnnnnnnnnnnnnnnnnnnnnnnnnnnnnnnnnnnnnnnnnnnnnnnnnnnnnnnnnnnnnnnnnnnnnnnnnnnnnnnnnnnnnnnnnnnnnnnnnnnnnnnnnnnnnnnnnnnnnnnnnnnnnnnnnnnnnnnnnnnnnnnnnnnnnnnnnnnnnnnnnnnnnnnnnnnnnnnnnnnnnnnnnnnnnnnnnnnnnnnnnnnnnnnnnnnnnnnnnnnnnnnnnnnnnnnnnnnnnnnnnnnnnnnnnnnnnnnnnnnnnnnnnnnnnnnnnnnnnnnnnnnnnnnnnnnnnnnnnnnnnnnnnnnnnnnnnnnnnnnnnnnnnnnnnnnnnnnnnnnnnnnnnnnnnnnnnnnnnnnnnnnnnnnnnnnnnnnnnnnnnnnnnnnnnnnnnnnnnnnnnnnnnnnnnnnnnnnnnnnnnnnnnnnnnnnnnnnnnnnnnnnnnnnnnnnnnnnnnnnnnnnnnnnnnnnnnnnnnnnnnnnnnnnnnnnnnnnnnnnnnnnnnnnnnnnnnnnnnnnnnnnnnnnnnnnnnnnnnnnnnnnnnnnnnnnnnnnnnnnnnnnnnnnnnnnnnnnnnnnnnnnnnnnnnnnnnnnnnnnnnnnnnnnnnnnnnnnnnnnnnnnnnnnnnnnnnnnnnnnnnnnnnnnnnnnnnnnnnnnnnnnnnnnnnnnnnnnnnnnnnnnnnnnnnnnnnnnnnnnnnnnnnnnnnnnnnnnnnnnnnnnnnnnnnnnnnnnnnnnnnnnnnnnnnnnnnnnnnnnnnnnnnnnnnnnnnnnnnnnnnnnnnnnnnnnnnnnnnnnnnnnnnnnnnnnnnnnnnnnnnnnnnnnnnnnnnnnnnnnnnnnnnnnnnnnnnnnnnnnnnnnnnnnnnnnnnnnnnnnnnnnnnnnnnnnnnnnnnnnnnnnnnnnnnnnnnnnnnnnnnnnnnnnnnnnnnnnnnnnnnnnnnnnnnnnnnnnnnnnnnnnnnnnnnnnnnnnnnnnnnnnnnnnnnnnnnnnnnnnnnnnnnnnnnnnnnnnnnnnnnnnnnnnnnnnnnnnnnnnnnnnnnnnnnnnnnnnnnnnnnnnnnnnnnnnnnnnnnnnnnnnnnnnnnnnnnnnnnnnnnnnnnnnnnnnnnnnnnnnnnnnnnnnnnnnnnnnnnnnnnnnnnnnnnnnnnnnnnnnnnnnnnnnnnnnnnnnnnnnnnnnnnnnnnnnnnnnnnnnnnnnnnnnnnnnnnnnnnnnnnnnnnnnnnnnnnnnnnnnnnnnnnnnnnnnnnnnnnnnnnnnnnnnnnnnnnnnnnnnnnnnnnnnnnnnnnnnnnnnnnnnnnnnnnnnnnnnnnnnnnnnnnnnnnnnnnnnnnnnnnnnnnnnnnnnnnnnnnnnnnnnnnnnnnnnnnnnnnnnnnnnnnnnnnnnnnnnnnnnnnnnnnnnnnnnnnnnnnnnnnnnnnnnnnnnnnnnnnnnnnnnnnnnnnnnnnnnnnnnnnnnnnnnnnnnnnnnnnnnnnnnnnnnnnnnnnnnnnnnnnnnnnnnnnnnnnnnnnnnnnnnnnnnnnnnnnnnnnnnnnnnnnnnnnnnnnnnnnnnnnnnnnnnnnnnnnnnnnnnnnnnnnnnnnnnnnnnnnnnnnnnnnnnnnnnnnnnnnnnnnnnnnnnnnnnnnnnnnnnnnnnnnnnnnnnnnnnnnnnnnnnnnnnnnnnnnnnnnnnnnnnnnnnnnnnnnnnnnnnnnnnnnnnnnnnnnnnnnnnnnnnnnnnnnnnnnnnnnnnnnnnnnnnnnnnnnnnnnnnnnnnnnnnnnnnnnnnnnnnnnnnnnnnnnnnnnnnnnnnnnnnnnnnnnnnnnnnnnnnnnnnnnnnnnnnnnnnnnnnnnnnnnnnnnnnnnnnnnnnnnnnnnnnnnnnnnnnnnnnnnnnnnnnnnnnnnnnnnnnnnnnnnnnnnnnnnnnnnnnnnnnnnnnnnnnnnnnnnnnnnnnnnnnnnnnnnnnnnnnnnnnnnnnnnnnnnnnnnnnnnnnnnnnnnnnnnnnnnnnnnnnnnnnnnnnnnnnnnnnnnnnnnnnnnnnnnnnnnnnnnnnnnnnnnnnnnnnnnnnnnnnnnnnnnnnnnnnnnnnnnnnnnnnnnnnnnnnnnnnnnnnnnnnnnnnnnnnnnnnnnnnnnnnnnnnnnnnnnnnnnnnnnnnnnnnnnnnnnnnnnnnnnnnnnnnnnnnnnnnnnnnnnnnnnnnnnnnnnnnnnnnnnnnnnnnnnnnnnnnnnnnnnnnnnnnnnnnnnnnnnnnnnnnnnnnnnnnnnnnnnnnnnnnnnnnnnnnnnnnnnnnnnnnnnnnnnnnnnnnnnnnnnnnnnnnnnnnnnnnnnnnnnnnnnnnnnnnnnnnnnnnnnnnnnnnnnnnnnnnnnnnnnnnnnnnnnnnnnnnnnnnnnnnnnnnnnnnnnnnnnnnnnnnnnnnnnnnnnnnnnnnnnnnnnnnnnnnnnnnnnnnnnnnnnnnnnnnnnnnnnnnnnnnnnnnnnnnnnnnnnnnnnnnnnnnnnnnnnnnnnnnnnnnnnnnnnnnnnnnnnnnnnnnnnnnnnnnnnnnnnnnnnnnnnnnnnnnnnnnnnnnnnnnnnnnnnnnnnnnnnnnnnnnnnnnnnnnnnnnnnnnnnnnnnnnnnnnnnnnnnnnnnnnnnnnnnnnnnnnnnnnnnnnnnnnnnnnnnnnnnnnnnnnnnnnnnnnnnnnnnnnnnnnnnnnnnnnnnnnnnnnnnnnnnnnnnnnnnnnnnnnnnnnnnnnnnnnnnnnnnnnnnnnnnnnnnnnnnnnnnnnnnnnnnnnnnnnnnnnnnnnnnnnnnnnnnnnnnnnnnnnnnnnnnnnnnnnnnnnnnnnnnnnnnnnnnnnnnnnnnnnnnnnnnnnnnnnnnnnnnnnnnnnnnnnnnnnnnnnnnnnnnnnnnnnnnnnnnnnnnnnnnnnnnnnnnnnnnnnnnnnnnnnnnnnnnnnnnnnnnnnnnnnnnnnnnnnnnnnnnnnnnnnnnnnnnnnnnnnnnnnnnnnnnnnnnnnnnnnnnnnnnnnnnnnnnnnnnnnnnnnnnnnnnnnnnnnnnnnnnnnnnnnnnnnnnnnnnnnnnnnnnnnnnnnnnnnnnnnnnnnnnnnnnnnnnnnnnnnnnnnnnnnnnnnnnnnnnnnnnnnnnnnnnnnnnnnnnnnnnnnnnnnnnnnnnnnnnnnnnnnnnnnnnnnnnnnnnnnnnnnnnnnnnnnnnnnnnnnnnnnnnnnnnnnnnnnnnnnnnnnnnnnnnnnnnnnnnnnnnnnnnnnnnnnnnnnnnnnnnnnnnnnnnnnnnnnnnnnnnnnnnnnnnnnnnnnnnnnnnnnnnnnnnnnnnnnnnnnnnnnnnnnnnnnnnnnnnnnnnnnnnnnnnnnnnnnnnnnnnnnnnnnnnnnnnnnnnnnnnnnnnnnnnnnnnnnnnnnnnnnnnnnnnnnnnnnnnnnnnnnnnnnnnnnnnnnnnnnnnnnnnnnnnnnnnnnnnnnnnnnnnnnnnnnnnnnnnnnnnnnnnnnnnnnnnnnnnnnnnnnnnnnnnnnnnnnnnnnnnnnnnnnnnnnnnnnnnnnnnnnnnnnnnnnnnnnnnnnnnnnnnnnnnnnnnnnnnnnnnnnnnnnnnnnnnnnnnnnnnnnnnnnnnnnnnnnnnnnnnnnnnnnnnnnnnnnnnnnnnnnnnnnnnnnnnnnnnnnnnnnnnnnnnnnnnnnnnnnnnnnnnnnnnnnnnnnnnnnnnnnnnnnnnnnnnnnnnnnnnnnnnnnnnnnnnnnnnnnnnnnnnnnnnnnnnnnnnnnnnnnnnnnnnnnnnnnnnnnnnnnnnnnnnnnnnnnnnnnnnnnnnnnnnnnnnnnnnnnnnnnnnnnnnnnnnnnnnnnnnnnnnnnnnnnnnnnnnnnnnnnnnnnnnnnnnnnnnnnnnnnnnnnnnnnnnnnnnnnnnnnnnnnnnnnnnnnnnnnnnnnnnnnnnnnnnnnnnnnnnnnnnnnnnnnnnnnnnnnnnnnnnnnnnnnnnnnnnnnnnnnnnnnnnnnnnnnnnnnnnnnnnnnnnnnnnnnnnnnnnnnnnnnnnnnnnnnnnnnnnnnnnnnnnnnnnnnnnnnnnnnnnnnnnnnnnnnnnnnnnnnnnnnnnnnnnnnnnnnnnnnnnnnnnnnnnnnnnnnnnnnnnnnnnnnnnnnnnnnnnnnnnnnnnnnnnnnnnnnnnnnnnnnnnnnnnnnnnnnnnnnnnnnnccatggacggcgatctcaagatcggcctttctcgacaacgcgaaggcggcaacatcatcagcgcctacaccgccaccgtggcaaaagcgattgagtggtacgccaccggtgaaccgcaatccgtgttggacgtgatgcacacggttggcttcattggcaaacggcgcacagcgggttttggtgaggtcactcactgggaaaccgagccaggcgatcttgacgggttggtgggttatggcaatgagccgttgcgccccatccccactgagcgctggacatcagggggtgactgggtcccggtggaagcggcttggaaagcgccctactgggacgtgcgcagccggacccgctgctttgtgccagaggcgttttgacatgaacggcccagcatttttcatgcgccatgcgggttaccggctgctgccagctggccgcaaaaccggcgatgctgtcgccgatgccgacaccctgtttggcgtctccttgcctctgaacacaggcaaaacgctgcgcctgtcctcatgctggatggtggtcacaccgcaatgggcggccaccagtttcaaggctgtggcggaagcgggtttccggcatgacatcgagcgcaaggtggccatcgaggcagcgctcaaatccggcgagccgtgtgtcttgctggcgctgggcaagcgaaccatgaccgcacgcgacatttttgtcacccacgacccgcgtgctgcacgcctgtgcagcgagggcgaggtcaaaaccttcaacgccaccctggagaaaacatggacatcgtgatcgacaagccagcgcgggtgcaagggtatgccttgcaccgcatcgtcgcgcagtactgccaaggcaaatcggccctgtgggcggacgaaggcgcccaggttcggattcggaccgaagaggccattccaccgcagtacgaggtgggcaaattgctggcgttcaccaccaccgcgtgcgtctcctttgccagcgggcacaaaaacaaatacttgcccgtggacgattggcgcgggcgcagggtgtggctggaaaaacaggcccaaaaacacggctttgagatcgttggtgttcatgtctcaggcggtatgcaacgcgtcgaaacccatgatgggcgccgtttctcaatcgacgccaccgagttcaccggcctgcttcgggtgaccgatccgctgaagttcagcaactgcctcatcaaaggtatcggccgcatcggtaaggccttcgggctcaatctgctgatcgttcagtaaaccagggaaaaaacgccatgacccaacgctctctcatcgttgccgacgttcagctgcacaccgcgcaacctttgaccttcacgcaccacggcacagatggcttgccgctgttgacacgcggagtagatgccgaggggcgccaccagcgcaccgtctacattcccgccgctcaattccggggccgtattcgccacgaagccgccatggcagaactgcgcagccggccagagaaggccaagctggaagacgcgtatttgctggcgctgggtcaggatcttcggcctgatgaagacgaggagccggaggcgattcgcctcaaggagcaattgacgttccgcgcggcaaaccccttgctcgacctgttcggcacctggaaggtcgccagccgcttgtttgtgtctcacctgctgccgcaggtcaacgtgatgcccgacaccgtgagccacattcggcgcgatctcgacagcaacgacgacatgatggctttgcttgacgatcaggagcaagaccgcttttatgagcgccaggaaaagcaaggtctggcctccaaagccgaggccctcatcaagatcgccatccgcgagctggctggcgcccgcaaagccaaagaccaggtcaaagtcgatgaaatgacggtcaagctcgaagaactcaaggaactgaagaaatcccgcaaaggtgatgaccagtcggacaacagcaagcacctgctggaactgcaagtgattcctgcgggcatcaacctgagtggatcgctcaccgtgcacgacgcaaaagcctgcgatctgcaaacgctggtgcaagccctgcgcgggttcagccagaaaccctatctgggtgcccagcgtgcaaggggatgcggcgagatcagcgcccgcgtcacgttcaagaacggcgaaggcgatgtgctcgcggtggtggcgtttgccgccatggcgcccgccactgtggaatggaccgaagccggccggacattcgcgcaatccagcgtcaccgctcttgcggcatgagctatcgcagccccgaacagctgcgctacgcccgtttgatcgagggcgcgctcaagccaggccccccgctgctcgctggcgctgcggctggcctgggcaagacgcacggctacagcgttccgctcattcgatcgggcctgcgtgtcgccatcgcgatgagcacgcgccagctgatcgaccagtacctcgccagcgacgcgctccaagtcgcccaagaagggcaggcggtgaccgttgttgcgctgcaaacccggcgccacttcgagaacgacaagacctactcggctcaccgggaacaggcgctggctgctcaggtgttggtggtgacccacgccgccgcgctgatcgacagcttccgccccgactacgctgggctgcggcagcgcgacgtggtgctgttcgacgaagccgatctgctggccgatgccgctgacctgcgcagcacgtttcgccttgaggccgacaccttgtccgcttgtggcgcgaagaacctgagccccaccgaagcagccgagcgggttcagcgcgaggtcagcgcgccggaggaccgtgcagcagccaaggccatcctgtatgcgctggcccatcctgctgcctacaaggtggtgggtttcgaggaagacggcgcgctggtccttcggcatcgcatgcctgggcgcatgctcaagcccttggtgcgagacgcaccccgcaccatcttcaccagcggcaccttgcaagtgcgcgggcggtttgaccatttcgtgcgagccctggggcttgaagtcatcgcgccagaaagccgccacatcgaccccgcgcgccacggccaactgacggtggtggtggcagtcgacgaactcgacatgaacgccatggcgcagcgcattgcggcggccgcccggcccacgctggtgctcaccaccagccacgcgatgacacaggcactgggccattgcttgccaggcgctgtggtgcggggagccgatgagacgctggctgacgcggtgcagcgctgcccggacgacggcattttggtggcagcgggcgcctggacggggctggatgcgccccggctgcgctggaaaacggtagcgattcccaaagcaccttacggaccaccggtgacgattgatggggaacagatcacccactacatcgacagccaagtggtggcggtgcgccggagcaaccaaggcctccaccgcggactcagaacccccgacgccacctgcacgctgctgctgctcgaccctcgcagcagccgcgacgccctgcgcgaggccattccgcagcgttttcaggtggattggcaaggcttcgaggaaggctcgcaggccatgcaatcgcatctcaagcgcgagcgaaacgccagcctgcgggcagctgcccttaaacaccacggcgcgaagtgcatggctgaaagatgtgccgtgtcttcaccgcacctgctggatgttcaccacacccggcccatcgcagaaggcgagcggcgcaccacgctcgacgaggtggtggtgctttgcaaaaaccaccatgctgacgctcaccaccggatgcggatggcggctttggcgaatgccggggaggagaaaatgattgcctgacaggggtttgggtgttgttagatcgagctgccatgcgaatgtgcagctactggaacgggcaacaacacaacggtgtggcttccgcagatcgagctgccatgcgaatgtgcagctactggaacttcgctggcgctgcgtccatgccgatgcttgatcgagctgccatgcgaatgtgcagctactggaacatcattgggaagcacgcatgggtggcaaagatcgagctgccatgcgaatgtgcagctactggaacatgacgctctacaccgacacgcttcacatggaacgagctgccatgtgaatgtgcagctactggaaccggtgccgccgggtcggtgaacttgctgttgaacgagctgccatgtgaatgtgcagctactggaacacggcccacccaatcgagcggtgcgtcaacgaacgagctgccatgtgaatgtgcagctactggaactatttcaccggccccaacaaaaccggctacgaacgagctgccatgtgaatgtgcagctactggaacacaatctcgcctcccagacagcacgtccacgaacgagctgccacgcaaatgtgcagctacttgaacaggttgccggtaatagtgagtgagttcatggaaagagctgccatgcaagtgtgcagctactggaaccaaatttggcaagcagtccaaggccagcaagaacgagctgccattcaaatgtgcagctactggaacatgcttgagtacgtgcaagggatgcgtgaggaacgagctgccatgcaaatgtgcagctactggaacatgcactgcccgacatgcatatggtgcggggaacgagctgccatgcaaatgtgcagcttctggaacacgattgcggtggctacagctggcgggattaaattagctgccacgaaagtgtgcagctactagaacaggtagcaggcggcggtgtaggcgtaaaccagaacgagctgccgtgcaaatgtgcagctactggatatgcgtttcgccaaccccgtcagattgcaggctgcgccagcggcaccgcaacccgccgctcacgcgagagcagcgtgtaaaccgtgggcacgacaaacacggtgagcagcgtgcccaggctcatgccgcccacgatcacccagccgatttgctggcggctctcagcccccgcgccggtggccagggctagcgggatggcgcccaacaccatggcgccggtggtcatgaggatggggcgcaggcgcaacgcggccgagcgcttgactgcttcgaaccggtccacgccctcttcgcgcagctggttggcgaactccacaatcagaatgccgtgtttggtgatcaggcccaccagcgtgatcaggccgatctggctgaacacattgagcgtgccgccgctgagttttaaagccagcagcgcgcccagcatcgacagcggcacgctgagcatgatgatcagcgggtccacaaagctctcaaactgcgccgccaacaccaggtagatgaacagcaacgagagcgcgaacacgatggccagcgagcctgatgagctgcggaactcgcggctctcgccgttgagcgcggtggtgtaaccctcgggaagaatctcgcgcgcggtcgcgtccatgaagtccagcgcctcgcccaaggagagctcgggtgcaaggttggcggtgatggtggcactgcggcgctgcgcgaaat

SEQ ID NO: 157 - DNA, 13259 bp, Artificial Sequence
  Synthetic Oligonucleotide
  misc_feature (1)..(7312): n is a, c, g, or t
nnnnnnnnnnnnnnnnnnnnnnnnnnnnnnnnnnnnnnnnnnnnnnnnnnnnnnnnnnnnnnnnnnnnnnnnnnnnnnnnnnnnnnnnnnnnnnnnnnnnnnnnnnnnnnnnnnnnnnnnnnnnnnnnnnnnnnnnnnnnnnnnnnnnnnnnnnnnnnnnnnnnnnnnnnnnnnnnnnnnnnnnnnnnnnnnnnnnnnnnnnnnnnnnnnnnnnnnnnnnnnnnnnnnnnnnnnnnnnnnnnnnnnnnnnnnnnnnnnnnnnnnnnnnnnnnnnnnnnnnnnnnnnnnnnnnnnnnnnnnnnnnnnnnnnnnnnnnnnnnnnnnnnnnnnnnnnnnnnnnnnnnnnnnnnnnnnnnnnnnnnnnnnnnnnnnnnnnnnnnnnnnnnnnnnnnnnnnnnnnnnnnnnnnnnnnnnnnnnnnnnnnnnnnnnnnnnnnnnnnnnnnnnnnnnnnnnnnnnnnnnnnnnnnnnnnnnnnnnnnnnnnnnnnnnnnnnnnnnnnnnnnnnnnnnnnnnnnnnnnnnnnnnnnnnnnnnnnnnnnnnnnnnnnnnnnnnnnnnnnnnnnnnnnnnnnnnnnnnnnnnnnnnnnnnnnnnnnnnnnnnnnnnnnnnnnnnnnnnnnnnnnnnnnnnnnnnnnnnnnnnnnnnnnnnnnnnnnnnnnnnnnnnnnnnnnnnnnnnnnnnnnnnnnnnnnnnnnnnnnnnnnnnnnnnnnnnnnnnnnnnnnnnnnnnnnnnnnnnnnnnnnnnnnnnnnnnnnnnnnnnnnnnnnnnnnnnnnnnnnnnnnnnnnnnnnnnnnnnnnnnnnnnnnnnnnnnnnnnnnnnnnnnnnnnnnnnnnnnnnnnnnnnnnnnnnnnnnnnnnnnnnnnnnnnnnnnnnnnnnnnnnnnnnnnnnnnnnnnnnnnnnnnnnnnnnnnnnnnnnnnnnnnnnnnnnnnnnnnnnnnnnnnnnnnnnnnnnnnnnnnnnnnnnnnnnnnnnnnnnnnnnnnnnnnnnnnnnnnnnnnnnnnnnnnnnnnnnnnnnnnnnnnnnnnnnnnnnnnnnnnnnnnnnnnnnnnnnnnnnnnnnnnnnnnnnnnnnnnnnnnnnnnnnnnnnnnnnnnnnnnnnnnnnnnnnnnnnnnnnnnnnnnnnnnnnnnnnnnnnnnnnnnnnnnnnnnnnnnnnnnnnnnnnnnnnnnnnnnnnnnnnnnnnnnnnnnnnnnnnnnnnnnnnnnnnnnnnnnnnnnnnnnnnnnnnnnnnnnnnnnnnnnnnnnnnnnnnnnnnnnnnnnnnnnnnnnnnnnnnnnnnnnnnnnnnnnnnnnnnnnnnnnnnnnnnnnnnnnnnnnnnnnnnnnnnnnnnnnnnnnnnnnnnnnnnnnnnnnnnnnnnnnnnnnnnnnnnnnnnnnnnnnnnnnnnnnnnnnnnnnnnnnnnnnnnnnnnnnnnnnnnnnnnnnnnnnnnnnnnnnnnnnnnnnnnnnnnnnnnnnnnnnnnnnnnnnnnnnnnnnnnnnnnnnnnnnnnnnnnnnnnnnnnnnnnnnnnnnnnnnnnnnnnnnnnnnnnnnnnnnnnnnnnnnnnnnnnnnnnnnnnnnnnnnnnnnnnnnnnnnnnnnnnnnnnnnnnnnnnnnnnnnnnnnnnnnnnnnnnnnnnnnnnnnnnnnnnnnnnnnnnnnnnnnnnnnnnnnnnnnnnnnnnnnnnnnnnnnnnnnnnnnnnnnnnnnnnnnnnnnnnnnnnnnnnnnnnnnnnnnnnnnnnnnnnnnnnnnnnnnnnnnnnnnnnnnnnnnnnnnnnnnnnnnnnnnnnnnnnnnnnnnnnnnnnnnnnnnnnnnnnnnnnnnnnnnnnnnnnnnnnnnnnnnnnnnnnnnnnnnnnnnnnnnnnnnnnnnnnnnnnnnnnnnnnnnnnnnnnnnnnnnnnnnnnnnnnnnnnnnnnnnnnnnnnnnnnnnnnnnnnnnnnnnnnnnnnnnnnnnnnnnnnnnnnnnnnnnnnnnnnnnnnnnnnnnnnnnnnnnnnnnnnnnnnnnnnnnnnnnnnnnnnnnnnnnnnnnnnnnnnnnnnnnnnnnnnnnnnnnnnnnnnnnnnnnnnnnnnnnnnnnnnnnnnnnnnnnnnnnnnnnnnnnnnnnnnnnnnnnnnnnnnnnnnnnnnnnnnnnnnnnnnnnnnnnnnnnnnnnnnnnnnnnnnnnnnnnnnnnnnnnnnnnnnnnnnnnnnnnnnnnnnnnnnnnnnnnnnnnnnnnnnnnnnnnnnnnnnnnnnnnnnnnnnnnnnnnnnnnnnnnnnnnnnnnnnnnnnnnnnnnnnnnnnnnnnnnnnnnnnnnnnnnnnnnnnnnnnnnnnnnnnnnnnnnnnnnnnnnnnnnnnnnnnnnnnnnnnnnnnnnnnnnnnnnnnnnnnnnnnnnnnnnnnnnnnnnnnnnnnnnnnnnnnnnnnnnnnnnnnnnnnnnnnnnnnnnnnnnnnnnnnnnnnnnnnnnnnnnnnnnnnnnnnnnnnnnnnnnnnnnnnnnnnnnnnnnnnnnnnnnnnnnnnnnnnnnnnnnnnnnnnnnnnnnnnnnnnnnnnnnnnnnnnnnnnnnnnnnnnnnnnnnnnnnnnnnnnnnnnnnnnnnnnnnnnnnnnnnnnnnnnnnnnnnnnnnnnnnnnnnnnnnnnnnnnnnnnnnnnnnnnnnnnnnnnnnnnnnnnnnnnnnnnnnnnnnnnnnnnnnnnnnnnnnnnnnnnnnnnnnnnnnnnnnnnnnnnnnnnnnnnnnnnnnnnnnnnnnnnnnnnnnnnnnnnnnnnnnnnnnnnnnnnnnnnnnnnnnnnnnnnnnnnnnnnnnnnnnnnnnnnnnnnnnnnnnnnnnnnnnnnnnnnnnnnnnnnnnnnnnnnnnnnnnnnnnnnnnnnnnnnnnnnnnnnnnnnnnnnnnnnnnnnnnnnnnnnnnnnnnnnnnnnnnnnnnnnnnnnnnnnnnnnnnnnnnnnnnnnnnnnnnnnnnnnnnnnnnnnnnnnnnnnnnnnnnnnnnnnnnnnnnnnnnnnnnnnnnnnnnnnnnnnnnnnnnnnnnnnnnnnnnnnnnnnnnnnnnnnnnnnnnnnnnnnnnnnnnnnnnnnnnnnnnnnnnnnnnnnnnnnnnnnnnnnnnnnnnnnnnnnnnnnnnnnnnnnnnnnnnnnnnnnnnnnnnnnnnnnnnnnnnnnnnnnnnnnnnnnnnnnnnnnnnnnnnnnnnnnnnnnnnnnnnnnnnnnnnnnnnnnnnnnnnnnnnnnnnnnnnnnnnnnnnnnnnnnnnnnnnnnnnnnnnnnnnnnnnnnnnnnnnnnnnnnnnnnnnnnnnnnnnnnnnnnnnnnnnnnnnnnnnnnnnnnnnnnnnnnnnnnnnnnnnnnnnnnnnnnnnnnnnnnnnnnnnnnnnnnnnnnnnnnnnnnnnnnnnnnnnnnnnnnnnnnnnnnnnnnnnnnnnnnnnnnnnnnnnnnnnnnnnnnnnnnnnnnnnnnnnnnnnnnnnnnnnnnnnnnnnnnnnnnnnnnnnnnnnnnnnnnnnnnnnnnnnnnnnnnnnnnnnnnnnnnnnnnnnnnnnnnnnnnnnnnnnnnnnnnnnnnnnnnnnnnnnnnnnnnnnnnnnnnnnnnnnnnnnnnnnnnnnnnnnnnnnnnnnnnnnnnnnnnnnnnnnnnnnnnnnnnnnnnnnnnnnnnnnnnnnnnnnnnnnnnnnnnnnnnnnnnnnnnnnnnnnnnnnnnnnnnnnnnnnnnnnnnnnnnnnnnnnnnnnnnnnnnnnnnnnnnnnnnnnnnnnnnnnnnnnnnnnnnnnnnnnnnnnnnnnnnnnnnnnnnnnnnnnnnnnnnnnnnnnnnnnnnnnnnnnnnnnnnnnnnnnnnnnnnnnnnnnnnnnnnnnnnnnnnnnnnnnnnnnnnnnnnnnnnnnnnnnnnnnnnnnnnnnnnnnnnnnnnnnnnnnnnnnnnnnnnnnnnnnnnnnnnnnnnnnnnnnnnnnnnnnnnnnnnnnnnnnnnnnnnnnnnnnnnnnnnnnnnnnnnnnnnnnnnnnnnnnnnnnnnnnnnnnnnnnnnnnnnnnnnnnnnnnnnnnnnnnnnnnnnnnnnnnnnnnnnnnnnnnnnnnnnnnnnnnnnnnnnnnnnnnnnnnnnnnnnnnnnnnnnnnnnnnnnnnnnnnnnnnnnnnnnnnnnnnnnnnnnnnnnnnnnnnnnnnnnnnnnnnnnnnnnnnnnnnnnnnnnnnnnnnnnnnnnnnnnnnnnnnnnnnnnnnnnnnnnnnnnnnnnnnnnnnnnnnnnnnnnnnnnnnnnnnnnnnnnnnnnnnnnnnnnnnnnnnnnnnnnnnnnnnnnnnnnnnnnnnnnnnnnnnnnnnnnnnnnnnnnnnnnnnnnnnnnnnnnnnnnnnnnnnnnnnnnnnnnnnnnnnnnnnnnnnnnnnnnnnnnnnnnnnnnnnnnnnnnnnnnnnnnnnnnnnnnnnnnnnnnnnnnnnnnnnnnnnnnnnnnnnnnnnnnnnnnnnnnnnnnnnnnnnnnnnnnnnnnnnnnnnnnnnnnnnnnnnnnnnnnnnnnnnnnnnnnnnnnnnnnnnnnnnnnnnnnnnnnnnnnnnnnnnnnnnnnnnnnnnnnnnnnnnnnnnnnnnnnnnnnnnnnnnnnnnnnnnnnnnnnnnnnnnnnnnnnnnnnnnnnnnnnnnnnnnnnnnnnnnnnnnnnnnnnnnnnnnnnnnnnnnnnnnnnnnnnnnnnnnnnnnnnnnnnnnnnnnnnnnnnnnnnnnnnnnnnnnnnnnnnnnnnnnnnnnnnnnnnnnnnnnnnnnnnnnnnnnnnnnnnnnnnnnnnnnnnnnnnnnnnnnnnnnnnnnnnnnnnnnnnnnnnnnnnnnnnnnnnnnnnnnnnnnnnnnnnnnnnnnnnnnnnnnnnnnnnnnnnnnnnnnnnnnnnnnnnnnnnnnnnnnnnnnnnnnnnnnnnnnnnnnnnnnnnnnnnnnnnnnnnnnnnnnnnnnnnnnnnnnnnnnnnnnnnnnnnnnnnnnnnnnnnnnnnnnnnnnnnnnnnnnnnnnnnnnnnnnnnnnnnnnnnnnnnnnnnnnnnnnnnnnnnnnnnnnnnnnnnnnnnnnnnnnnnnnnnnnnnnnnnnnnnnnnnnnnnnnnnnnnnnnnnnnnnnnnnnnnnnnnnnnnnnnnnnnnnnnnnnnnnnnnnnnnnnnnnnnnnnnnnnnnnnnnnnnnnnnnnnnnnnnnnnnnnnnnnnnnnnnnnnnnnnnnnnnnnnnnnnnnnnnnnnnnnnnnnnnnnnnnnnnnnnnnnnnnnnnnnnnnnnnnnnnnnnnnnnnnnnnnnnnnnnnnnnnnnnnnnnnnnnnnnnnnnnnnnnnnnnnnnnnnnnnnnnnnnnnnnnnnnnnnnnnnnnnnnnnnnnnnnnnnnnnnnnnnnnnnnnnnnnnnnnnnnnnnnnnnnnnnnnnnnnnnnnnnnnnnnnnnnnnnnnnnnnnnnnnnnnnnnnnnnnnnnnnnnnnnnnnnnnnnnnnnnnnnnnnnnnnnnnnnnnnnnnnnnnnnnnnnnnnnnnnnnnnnnnnnnnnnnnnnnnnnnnnnnnnnnnnnnnnnnnnnnnnnnnnnnnnnnnnnnnnnnnnnnnnnnnnnnnnnnnnnnnnnnnnnnnnnnnnnnnnnnnnnnnnnnnnnnnnnnnnnnnnnnnnnnnnnnnnnnnnnnnnnnnnnnnnnnnnnnnnnnnnnnnnnnnnnnnnnnnnnnnnnnnnnnnnnnnnnnnnnnnnnnnnnnnnnnnnnnnnnnnnnnnnnnnnnnnnnnnnnnnnnnnnnnnnnnnnnnnnnnnnnnnnnnnnnnnnnnnnnnnnnnnnnnnnnnnnnnnnnnnnnnnnnnnnnnnnnnnnnnnnnnnnnnnnnnnnnnnnnnnnnnnnnnnnnnnnnnnnnnnnnnnnnnnnnnnnnnnnnnnnnnnnnnnnnnnnnnnnnnnnnnnnnnnnnnnnnnnnnnnnnnnnnnnnnnnnnnnnnnnnnnnnnnnnnnnnnnnnnnnnnnnnnnnnnnnnnnnnnnnnnnnnnnnnnnnnnnnnnnnnnnnnnnnnnnnnnnnnnnnnnnnnnnnnnnnnnnnnnnnnnnnnnnnnnnnnnnnnnnnnnnnnnnnnnnnnnnnnnnnnnnnnnnnnnnnnnnnnnnnnnnnnnnnnnnnnnnnnnnnnnnnnnnnnnnnnnnnnnnnnnnnnnnnnnnnnnnnnnnnnnnnnnnnnnnnnnnnnnnnnnnnnnnnnnnnnnnnnnnnnnnnnnnnnnnnnnnnnnnnnnnnnnnnnnnnnnnnnnnnnnnnnnnnnnnnnnnnnnnnnnnnnnnnnnnnnnnnnnnnnnnnnnnnnnnnnnnnnnnnnnnnnnnnnnnnnnnnnnnnnnnnnnnnnnnnnnnnnnnnnnnnnnnnnnnnnnnnnnnnnnnnnnnnnnnnnnnnnnnnnnnnnnnnnnnnnnnnnnnnnnnnnnnnnnnnnnnnnnnnnnnnnnnnnnnnnnnnnnnnnnnnnnnnnnnnnnnnnnnnnnnnnnnnnnnnnnnnnnnnnnnnnnnnnnnnnnnnnnnnnnnnnnnnnnnnnnnnnnnnnnnnnnnnnnnnnnnnnnnnnnnnnnnnnnnnnnnnnnnnnnnnnnnnnnnnnnnnnnnnnnnnnnnnnnnnnnnnnnnnnnnnnnnnnnnnnnnnnnnnnnnnnnnnnnnnnnnnnnnnnnnnnnnnnnnnnnnnnnnnnnnnnnnnnnnnnnnnnnnnnnnnnnnnnnnnnnnnnnnnnnnnnnnnnnnnnnnnnnnnnnnnnnnnnnnnnnnnnnnnnnnnnnnnnnnnnnnnnnnnnnnnnnnnnnnnnnnnnnnnnnnnnnnnnnnnnnnnnnnnnnnnnnnnnnnnnnnnnnnnnnnnnnnnnnnnnnnnnnnnnnnnnnnnnnnnnnnnnnnnnnnnnnnnnnnnnnnnnnnnnnnnnnnnnnnnnnnnnnnnnnnnnnnnnnnnnnnnnnnnnnnnnnnnnnnnnnnnnnnnnnnnnnnnnnnnnnnnnnnnnnnnnnnnnnnnnnnnnnnnnnnnnnnnnnnnnnnnnnnnnnnnnnnnnnnnnnnnnnnnnnnnnnnnnnnnnnnnnnnnnnnnnnnnnnnnnnnnnnnnnnnnnnnnnnnnnnnnnnnnnnnnnnnnnnnnnnnnnnnnnnnnnnnnnnnnnnnnnnnnnnnnnnnnnnnnnnnnnnnnnnnnnnnnnnnnnnnnnnnnnnnnnnnnnnnnnnnnnnnnnnnnnnnnnnnnnnnnnnnnnnnnnnnnnnnnnnnnnnnnnnnnnnnnnnnnnnnnnnnnnnnnnnnnnnnnnnnnnnnnnnnnnnnnnnnnnnnnnnnnnnnnnnnnnnnnnnnnnnnnnnnnnnnnnnnnnnnnnnnnnnnnnnnnnnnnnnnnnnnnnnnnnnnnnnnattgatagcgttaatcgtttattatttgcagggcgaaaagcaaatcagttatttaatgatcagttaaaaccaaagcccctcaatagctgatatcgaaatatagtttcattgcatcattactgtcatcggttgtgtttcgttcctttgctttgcattaagtgtttggagagttgaatggagatgtttacgttacgtgcttacctaaacacgccgattattaaacgagggttcatgactcttgatgcattgcttatgtcaattttaggtaaaggggatgtcagtgatcttttgcgctgcgacgaagggctttattttgcgagcgcagggtttccagttgattcggtgtctgataaatttagagcatcttttgtagcaagtcttcgacccgagcacacccccgagtggttagaagtcattaaaaccaatacaaggtctgacgatttacaaatcggtttggctcgccagcgcgatgctggcaacatcatcaatagctacccaactcaagtagcaactgccatcgagtggtatgcaacggggcaaatgcttgatgttttagatgtcgttaaagatattgtggcaatcggtaagcgccgagttgttgggtacggcgaggtcaagttatgggaagctgagcttggtgaaattgacggcttagttggctttgctgatgaacctttacgcccagttccaaccgttcgctggcacttaagtcatgattttgttcctgtagaagctgcttggaaggccccttattgggatgttcgtaatcgaaccaagtgctttgtgccggagattgacttatgaatggccctgaattttttatgcagcatgctggttaccgtttgctccctgaagatgagaaaactgatgacgtagtcaaagatactgatcgtttatttagtattgcattgccgttaaacacgggtaaatttctaagactatcatcgtgttggtttgtggttactgcggattgggtagcaacaagctttaagaccctacccgaggcaggatttcgccacgatatagaccgtaaaacagcaatcgatttggcacttaaggcaggcaagccctgtgtattgcttggactaggtaaacgaaccacgacggcaaatgatatttacgtgacctacgacccaagagccgcacgtttgtgcgagcaaggtaaaaccaaaacttatgacgctacaaaggagaaagcatggacatcatgattgataagccacctcgtgtgcgcgggtacgcacttcaccgaattgtggaacaacttcaaaacggcaagcctgccttgtgggcagatgaagggtcaactgttcgtattaggcctcatgacgcgcaaccacctctgtacgagatcggaaagttattggcattcacgacaactgcatgtgttgcatttagtaagggccacaagcatgtctatctcccaacatctgattggcgagggcgaagggtatggctagataaacaagcagccaaacatggttttgaggttgttggcgtccacatctctgggggcatgcaaaaaattgaaacccataatggccgaaagttcaccattgatgccactgagtttaccgggcttctgcgcgtaagcgattcgactttattcggtcagtgtttgataaatggagtcggcaaagttggcaaggcatttggtttgaatttgatgatcgttcaataaaacaaaaaaaggcacatgaaatgactaaccagaaaatgaaaatagttgcacaaatcagcttgcattcagtacaaccgctaacgtttactcatcatagtgttgacgggttaccgcttttggcaagaggcatcgatcaagaggggcgccaccttcgcacggtctacatacctgcagcgcaatttagaggtcgagttcggcacgaagcggcgttgagtcagatgcgctctgagagcggcaaggtgaagcttgaagaagcctatatgctagcccttggccaagacctacgcccagcggaagatgacgctccagaacaagtcaggctcaaagagcagattgcggtccgtaaagaaaaccccttattggacttatttggcacatggaagttggctagtcgtttgtatgtctctcacttcatgccagaggtcaatgttctacccgcaaaaatcagccatataagaagggacctagacacgaacgaagatatgatggatgcgctgggttctgatgagcaagaccgtatgtacgatcgtcagagtaaacaaggtatggcctcacaagttggtcaattaattaagcttgccacgcgtgaactaatggctgcaaagaaagcaaaagatgtaaccaaggttgacgaaatagaagccaaaatcttagagttaaaagaacttaaaaaaacgcaaaagggtgatgacgattccgaaaataccaaacatttagttgaacttgagttcatacccgcaggtatcactctgaatggaaaattaactgtaaattcagccatacccaacgacttacgtgtgttagtggatgctttagtggggtttggcgaaaaaccttaccttggcgctcaacgtgctcgtggttgtggggaagttgcacttgaagcaacatttaagaatgcagatggtgatgtactcgctacggtagcctttgctgagggcgagggttctaatgttcaatggactgaggcagggactacttttttaaatgctgaaacaactaccacatgatttaccgcagccctgaacagacacaatatgcgaaattaattgagggtgctattaaaccgggggcaccacttctggcaggagcagcagcaggtctgggtaaaacgcacggctttagcattcctctaattacttcaggaaaacgcattgcgatttgtttaagtactcggcagttgattgatcagtatttaaaaagtgatgcgttgcaggtggcttgcggtggaagatccgtttcggttgtggcgttgcaatcaaggcgagactttacacgtgactcagattatcgctcacacaagaagcaggcgttagaagccgagttattaattaccacccatgcggcagcctttattgacagtttcaatccagagtatgcacagcttcgtagtcgtgatgttgtgctgtttgatgaggctgatttattagctgacgctgctgacctgagaagcacatttagtatttcggctgaagcacttaaagattgtggcgctatgttaggtaatgcgttgagtgcggctaaattagttaaggcaaatgccgttgacgcagaagaccgtggtgctgccagttctatcctatatgccttagagaacccagcttggtacaaagtagttggatatgaggaggatggcgctttaactttaaaacatcgtttgccgggcagaatgcttaagcggcttgtggcagatgtaccacgctgtatttttacaagcggaacacttcaggtatctgggcggtttgattactttgttaaagcacttgggctcacagctatagcaccagagagtaggcacattgatccagtcatgcacggcagcctagatgttcaagttgcatctgatgaaatgtctattaatgaaatggctgaaaagattaaagctgcgaagcggccaacattggttcttacaacaagccacaaaacaacatttgagttgggtcaattactaccagaggccactattagagagtccggagaacctttgactgatgcggttgcgcggtgccccgatgacggcattctaatcgcagcaggtgcttggtctgggctagatgcgccaaggttacgatggaaaacattagtgattccaaaaacaccttatggtgtaagaaacgttttagatggtcatgatgtcgggcgttatatcgatagtaaggttgttgctattcgtcgaactaatcagggactgcatcgtgggcttagaacgcccgacgctcaatgcactttactgctactagacccgcgcagtagtaggtcagaactaagagaggcaataccgtcaaggtttaaagttgattgggttggcttcgaagaggggggccgtgaacttgttgagcacatgaaagctgaacgaaatgaaagccttcgtaaagctgcgctaaagcattatggtgagcaatgcatgtgggtgggctgtacggtgacattacctcacctgctcgatgtgcatcactgcaaccctatttcacttgggcaacgacgaacaacgatgtcagatgttaaagttttatgtaaaaatcatcatgctgaggagcatcataggatgcgaatgagcagtttagatgctctagacaatgatttaaatcaaatagaatcaaagggttgaagaatatcaggtcaagctgccatgtaaatgagcagttactagaactactctacagctacggcgcttacgggcataggtcaagctgccatgtaaatgagcagttactagaactgccacacatacatcatttaattgggattagggtcaagctgccatgtaaatgagcagttactagaactacattctgtgcatagagggtaggcgtttaggtcaagctgccatgtaaatgagcagttactagaacttaaatcattcaatagcgcctgcaatgccgggtcaagctgccatgtaaatgagcagttactagaacataacggactgtgatgtttctttgccgtctggtcaagctgccatgtaaatgagcagttactagaacgtaccccaacgattagtaacggtctgacagggtcaagctgccatgtaaatgagcagttactagaacttaattaaccgatggtaaatactgttattgggtcaagctgccatgtaaatgagcagttactagaacttgacaaacaacagtgttacagctcaatacggtcaagctgccatgtaaatgagcagttactagaaccttgcagtagttactacgccgatcacaacaggtcaagctgccatgtaaatgagcagttactagaacaggtggctagataatgtggcgtatggttttggtcaagctgccatgtaaatgagcagttactagaacggagacactatgaataagattgattcggtggggtcaagctgccatgtaaatgagcagttactagaacttcaggcgtatgctattggtgtcacgattgggtcaagctgccatgtaaatgagcagttactagaacttgacgtcagtatatacctcacagttaccggtcaagctgccatgtaaatgagcagttactagaacggaggcgatatgggttcatactctacatttggtcaagctgccatgtaaatgagcagttactagaaccacaaatcgcaatcaccctccacgcccgggggtcaagctgccatgtaaatgagcagttactagaactagcgtttaagcgtacacactgcatttaaggtcaagctgccatgtaaatgagcagttactagaaccaagataacattgcatcgggtgaacttaatggtcaagctgccatgtaaatgagcagttactagaacgagcaaatcgaatcttactttggtgttagggtcaagctgccatttaaatgagtagttactaaaaccggataacgcctgggcgttggtcagggaaggtcaagctgccatgtaaatgagcagttactagaattacacagagtttcaaggcgaagaccaatatggtcaagctgtcatgtaaatgagcagttactagaacgatgagtacaaaccgcagatgtgtacgcaaggtcaagctgccatgtaaatgagcagttactagaactggcatgcaatagcttttactaaacagcgggtcaagctgccatgtaaatgagcagttactagaacaagtacggaattgttccccagtcagccgtaggtcaagctgccatgtaaatgagcagttactagaacatgggcaatcaagtatcacagccaatatatggtcaagctgccacataaatgagcagttactagaacactggagaccagaacattaggacttttaacgg

SEQ ID NO: 158 - DNA, 13252 bp, Artificial Sequence
  Synthetic Oligonucleotide
  misc_feature (1)..(7670): n is a, c, g, or t
nnnnnnnnnnnnnnnnnnnnnnnnnnnnnnnnnnnnnnnnnnnnnnnnnnnnnnnnnnnnnnnnnnnnnnnnnnnnnnnnnnnnnnnnnnnnnnnnnnnnnnnnnnnnnnnnnnnnnnnnnnnnnnnnnnnnnnnnnnnnnnnnnnnnnnnnnnnnnnnnnnnnnnnnnnnnnnnnnnnnnnnnnnnnnnnnnnnnnnnnnnnnnnnnnnnnnnnnnnnnnnnnnnnnnnnnnnnnnnnnnnnnnnnnnnnnnnnnnnnnnnnnnnnnnnnnnnnnnnnnnnnnnnnnnnnnnnnnnnnnnnnnnnnnnnnnnnnnnnnnnnnnnnnnnnnnnnnnnnnnnnnnnnnnnnnnnnnnnnnnnnnnnnnnnnnnnnnnnnnnnnnnnnnnnnnnnnnnnnnnnnnnnnnnnnnnnnnnnnnnnnnnnnnnnnnnnnnnnnnnnnnnnnnnnnnnnnnnnnnnnnnnnnnnnnnnnnnnnnnnnnnnnnnnnnnnnnnnnnnnnnnnnnnnnnnnnnnnnnnnnnnnnnnnnnnnnnnnnnnnnnnnnnnnnnnnnnnnnnnnnnnnnnnnnnnnnnnnnnnnnnnnnnnnnnnnnnnnnnnnnnnnnnnnnnnnnnnnnnnnnnnnnnnnnnnnnnnnnnnnnnnnnnnnnnnnnnnnnnnnnnnnnnnnnnnnnnnnnnnnnnnnnnnnnnnnnnnnnnnnnnnnnnnnnnnnnnnnnnnnnnnnnnnnnnnnnnnnnnnnnnnnnnnnnnnnnnnnnnnnnnnnnnnnnnnnnnnnnnnnnnnnnnnnnnnnnnnnnnnnnnnnnnnnnnnnnnnnnnnnnnnnnnnnnnnnnnnnnnnnnnnnnnnnnnnnnnnnnnnnnnnnnnnnnnnnnnnnnnnnnnnnnnnnnnnnnnnnnnnnnnnnnnnnnnnnnnnnnnnnnnnnnnnnnnnnnnnnnnnnnnnnnnnnnnnnnnnnnnnnnnnnnnnnnnnnnnnnnnnnnnnnnnnnnnnnnnnnnnnnnnnnnnnnnnnnnnnnnnnnnnnnnnnnnnnnnnnnnnnnnnnnnnnnnnnnnnnnnnnnnnnnnnnnnnnnnnnnnnnnnnnnnnnnnnnnnnnnnnnnnnnnnnnnnnnnnnnnnnnnnnnnnnnnnnnnnnnnnnnnnnnnnnnnnnnnnnnnnnnnnnnnnnnnnnnnnnnnnnnnnnnnnnnnnnnnnnnnnnnnnnnnnnnnnnnnnnnnnnnnnnnnnnnnnnnnnnnnnnnnnnnnnnnnnnnnnnnnnnnnnnnnnnnnnnnnnnnnnnnnnnnnnnnnnnnnnnnnnnnnnnnnnnnnnnnnnnnnnnnnnnnnnnnnnnnnnnnnnnnnnnnnnnnnnnnnnnnnnnnnnnnnnnnnnnnnnnnnnnnnnnnnnnnnnnnnnnnnnnnnnnnnnnnnnnnnnnnnnnnnnnnnnnnnnnnnnnnnnnnnnnnnnnnnnnnnnnnnnnnnnnnnnnnnnnnnnnnnnnnnnnnnnnnnnnnnnnnnnnnnnnnnnnnnnnnnnnnnnnnnnnnnnnnnnnnnnnnnnnnnnnnnnnnnnnnnnnnnnnnnnnnnnnnnnnnnnnnnnnnnnnnnnnnnnnnnnnnnnnnnnnnnnnnnnnnnnnnnnnnnnnnnnnnnnnnnnnnnnnnnnnnnnnnnnnnnnnnnnnnnnnnnnnnnnnnnnnnnnnnnnnnnnnnnnnnnnnnnnnnnnnnnnnnnnnnnnnnnnnnnnnnnnnnnnnnnnnnnnnnnnnnnnnnnnnnnnnnnnnnnnnnnnnnnnnnnnnnnnnnnnnnnnnnnnnnnnnnnnnnnnnnnnnnnnnnnnnnnnnnnnnnnnnnnnnnnnnnnnnnnnnnnnnnnnnnnnnnnnnnnnnnnnnnnnnnnnnnnnnnnnnnnnnnnnnnnnnnnnnnnnnnnnnnnnnnnnnnnnnnnnnnnnnnnnnnnnnnnnnnnnnnnnnnnnnnnnnnnnnnnnnnnnnnnnnnnnnnnnnnnnnnnnnnnnnnnnnnnnnnnnnnnnnnnnnnnnnnnnnnnnnnnnnnnnnnnnnnnnnnnnnnnnnnnnnnnnnnnnnnnnnnnnnnnnnnnnnnnnnnnnnnnnnnnnnnnnnnnnnnnnnnnnnnnnnnnnnnnnnnnnnnnnnnnnnnnnnnnnnnnnnnnnnnnnnnnnnnnnnnnnnnnnnnnnnnnnnnnnnnnnnnnnnnnnnnnnnnnnnnnnnnnnnnnnnnnnnnnnnnnnnnnnnnnnnnnnnnnnnnnnnnnnnnnnnnnnnnnnnnnnnnnnnnnnnnnnnnnnnnnnnnnnnnnnnnnnnnnnnnnnnnnnnnnnnnnnnnnnnnnnnnnnnnnnnnnnnnnnnnnnnnnnnnnnnnnnnnnnnnnnnnnnnnnnnnnnnnnnnnnnnnnnnnnnnnnnnnnnnnnnnnnnnnnnnnnnnnnnnnnnnnnnnnnnnnnnnnnnnnnnnnnnnnnnnnnnnnnnnnnnnnnnnnnnnnnnnnnnnnnnnnnnnnnnnnnnnnnnnnnnnnnnnnnnnnnnnnnnnnnnnnnnnnnnnnnnnnnnnnnnnnnnnnnnnnnnnnnnnnnnnnnnnnnnnnnnnnnnnnnnnnnnnnnnnnnnnnnnnnnnnnnnnnnnnnnnnnnnnnnnnnnnnnnnnnnnnnnnnnnnnnnnnnnnnnnnnnnnnnnnnnnnnnnnnnnnnnnnnnnnnnnnnnnnnnnnnnnnnnnnnnnnnnnnnnnnnnnnnnnnnnnnnnnnnnnnnnnnnnnnnnnnnnnnnnnnnnnnnnnnnnnnnnnnnnnnnnnnnnnnnnnnnnnnnnnnnnnnnnnnnnnnnnnnnnnnnnnnnnnnnnnnnnnnnnnnnnnnnnnnnnnnnnnnnnnnnnnnnnnnnnnnnnnnnnnnnnnnnnnnnnnnnnnnnnnnnnnnnnnnnnnnnnnnnnnnnnnnnnnnnnnnnnnnnnnnnnnnnnnnnnnnnnnnnnnnnnnnnnnnnnnnnnnnnnnnnnnnnnnnnnnnnnnnnnnnnnnnnnnnnnnnnnnnnnnnnnnnnnnnnnnnnnnnnnnnnnnnnnnnnnnnnnnnnnnnnnnnnnnnnnnnnnnnnnnnnnnnnnnnnnnnnnnnnnnnnnnnnnnnnnnnnnnnnnnnnnnnnnnnnnnnnnnnnnnnnnnnnnnnnnnnnnnnnnnnnnnnnnnnnnnnnnnnnnnnnnnnnnnnnnnnnnnnnnnnnnnnnnnnnnnnnnnnnnnnnnnnnnnnnnnnnnnnnnnnnnnnnnnnnnnnnnnnnnnnnnnnnnnnnnnnnnnnnnnnnnnnnnnnnnnnnnnnnnnnnnnnnnnnnnnnnnnnnnnnnnnnnnnnnnnnnnnnnnnnnnnnnnnnnnnnnnnnnnnnnnnnnnnnnnnnnnnnnnnnnnnnnnnnnnnnnnnnnnnnnnnnnnnnnnnnnnnnnnnnnnnnnnnnnnnnnnnnnnnnnnnnnnnnnnnnnnnnnnnnnnnnnnnnnnnnnnnnnnnnnnnnnnnnnnnnnnnnnnnnnnnnnnnnnnnnnnnnnnnnnnnnnnnnnnnnnnnnnnnnnnnnnnnnnnnnnnnnnnnnnnnnnnnnnnnnnnnnnnnnnnnnnnnnnnnnnnnnnnnnnnnnnnnnnnnnnnnnnnnnnnnnnnnnnnnnnnnnnnnnnnnnnnnnnnnnnnnnnnnnnnnnnnnnnnnnnnnnnnnnnnnnnnnnnnnnnnnnnnnnnnnnnnnnnnnnnnnnnnnnnnnnnnnnnnnnnnnnnnnnnnnnnnnnnnnnnnnnnnnnnnnnnnnnnnnnnnnnnnnnnnnnnnnnnnnnnnnnnnnnnnnnnnnnnnnnnnnnnnnnnnnnnnnnnnnnnnnnnnnnnnnnnnnnnnnnnnnnnnnnnnnnnnnnnnnnnnnnnnnnnnnnnnnnnnnnnnnnnnnnnnnnnnnnnnnnnnnnnnnnnnnnnnnnnnnnnnnnnnnnnnnnnnnnnnnnnnnnnnnnnnnnnnnnnnnnnnnnnnnnnnnnnnnnnnnnnnnnnnnnnnnnnnnnnnnnnnnnnnnnnnnnnnnnnnnnnnnnnnnnnnnnnnnnnnnnnnnnnnnnnnnnnnnnnnnnnnnnnnnnnnnnnnnnnnnnnnnnnnnnnnnnnnnnnnnnnnnnnnnnnnnnnnnnnnnnnnnnnnnnnnnnnnnnnnnnnnnnnnnnnnnnnnnnnnnnnnnnnnnnnnnnnnnnnnnnnnnnnnnnnnnnnnnnnnnnnnnnnnnnnnnnnnnnnnnnnnnnnnnnnnnnnnnnnnnnnnnnnnnnnnnnnnnnnnnnnnnnnnnnnnnnnnnnnnnnnnnnnnnnnnnnnnnnnnnnnnnnnnnnnnnnnnnnnnnnnnnnnnnnnnnnnnnnnnnnnnnnnnnnnnnnnnnnnnnnnnnnnnnnnnnnnnnnnnnnnnnnnnnnnnnnnnnnnnnnnnnnnnnnnnnnnnnnnnnnnnnnnnnnnnnnnnnnnnnnnnnnnnnnnnnnnnnnnnnnnnnnnnnnnnnnnnnnnnnnnnnnnnnnnnnnnnnnnnnnnnnnnnnnnnnnnnnnnnnnnnnnnnnnnnnnnnnnnnnnnnnnnnnnnnnnnnnnnnnnnnnnnnnnnnnnnnnnnnnnnnnnnnnnnnnnnnnnnnnnnnnnnnnnnnnnnnnnnnnnnnnnnnnnnnnnnnnnnnnnnnnnnnnnnnnnnnnnnnnnnnnnnnnnnnnnnnnnnnnnnnnnnnnnnnnnnnnnnnnnnnnnnnnnnnnnnnnnnnnnnnnnnnnnnnnnnnnnnnnnnnnnnnnnnnnnnnnnnnnnnnnnnnnnnnnnnnnnnnnnnnnnnnnnnnnnnnnnnnnnnnnnnnnnnnnnnnnnnnnnnnnnnnnnnnnnnnnnnnnnnnnnnnnnnnnnnnnnnnnnnnnnnnnnnnnnnnnnnnnnnnnnnnnnnnnnnnnnnnnnnnnnnnnnnnnnnnnnnnnnnnnnnnnnnnnnnnnnnnnnnnnnnnnnnnnnnnnnnnnnnnnnnnnnnnnnnnnnnnnnnnnnnnnnnnnnnnnnnnnnnnnnnnnnnnnnnnnnnnnnnnnnnnnnnnnnnnnnnnnnnnnnnnnnnnnnnnnnnnnnnnnnnnnnnnnnnnnnnnnnnnnnnnnnnnnnnnnnnnnnnnnnnnnnnnnnnnnnnnnnnnnnnnnnnnnnnnnnnnnnnnnnnnnnnnnnnnnnnnnnnnnnnnnnnnnnnnnnnnnnnnnnnnnnnnnnnnnnnnnnnnnnnnnnnnnnnnnnnnnnnnnnnnnnnnnnnnnnnnnnnnnnnnnnnnnnnnnnnnnnnnnnnnnnnnnnnnnnnnnnnnnnnnnnnnnnnnnnnnnnnnnnnnnnnnnnnnnnnnnnnnnnnnnnnnnnnnnnnnnnnnnnnnnnnnnnnnnnnnnnnnnnnnnnnnnnnnnnnnnnnnnnnnnnnnnnnnnnnnnnnnnnnnnnnnnnnnnnnnnnnnnnnnnnnnnnnnnnnnnnnnnnnnnnnnnnnnnnnnnnnnnnnnnnnnnnnnnnnnnnnnnnnnnnnnnnnnnnnnnnnnnnnnnnnnnnnnnnnnnnnnnnnnnnnnnnnnnnnnnnnnnnnnnnnnnnnnnnnnnnnnnnnnnnnnnnnnnnnnnnnnnnnnnnnnnnnnnnnnnnnnnnnnnnnnnnnnnnnnnnnnnnnnnnnnnnnnnnnnnnnnnnnnnnnnnnnnnnnnnnnnnnnnnnnnnnnnnnnnnnnnnnnnnnnnnnnnnnnnnnnnnnnnnnnnnnnnnnnnnnnnnnnnnnnnnnnnnnnnnnnnnnnnnnnnnnnnnnnnnnnnnnnnnnnnnnnnnnnnnnnnnnnnnnnnnnnnnnnnnnnnnnnnnnnnnnnnnnnnnnnnnnnnnnnnnnnnnnnnnnnnnnnnnnnnnnnnnnnnnnnnnnnnnnnnnnnnnnnnnnnnnnnnnnnnnnnnnnnnnnnnnnnnnnnnnnnnnnnnnnnnnnnnnnnnnnnnnnnnnnnnnnnnnnnnnnnnnnnnnnnnnnnnnnnnnnnnnnnnnnnnnnnnnnnnnnnnnnnnnnnnnnnnnnnnnnnnnnnnnnnnnnnnnnnnnnnnnnnnnnnnnnnnnnnnnnnnnnnnnnnnnnnnnnnnnnnnnnnnnnnnnnnnnnnnnnnnnnnnnnnnnnnnnnnnnnnnnnnnnnnnnnnnnnnnnnnnnnnnnnnnnnnnnnnnnnnnnnnnnnnnnnnnnnnnnnnnnnnnnnnnnnnnnnnnnnnnnnnnnnnnnnnnnnnnnnnnnnnnnnnnnnnnnnnnnnnnnnnnnnnnnnnnnnnnnnnnnnnnnnnnnnnnnnnnnnnnnnnnnnnnnnnnnnnnnnnnnnnnnnnnnnnnnnnnnnnnnnnnnnnnnnnnnnnnnnnnnnnnnnnnnnnnnnnnnnnnnnnnnnnnnnnnnnnnnnnnnnnnnnnnnnnnnnnnnnnnnnnnnnnnnnnnnnnnnnnnnnnnnnnnnnnnnnnnnnnnnnnnnnnnnnnnnnnnnnnnnnnnnnnnnnnnnnnnnnnnnnnnnnnnnnnnnnnnnnnnnnnnnnnnnnnnnnnnnnnnnnnnnnnnnnnnnnnnnnnnnnnnnnnnnnnnnnnnnnnnnnnnnnnnnnnnnnnnnnnnnnnnnnnnnnnnnnnnnnnnnnnnnnnnnnnnnnnnnnnnnnnnnnnnnnnnnnnnnnnnnnnnnnnnnnnnnnnnnnnnnnnnnnnnnnnnnnnnnnnnnnnnnnnnnnnnnnnnnnnnnnnnnnnnnnnnnnnnnnnnnnnnnnnnnnnnnnnnnnnnnnnnnnnnnnnnnnnnnnnnnnnnnnnnnnnnnnnnnnnnnnnnnnnnnnnnnnnnnnnnnnnnnnnnnnnnnnnnnnnnnnnnnnnnnnnnnnnnnnnnnnnnnnnnnnnnnnnnnnnnnnnnnnnnnnnnnnnnnnnnnnnnnnnnnnnnnnnnnnnnnnnnnnnnnnnnnnnnnnnnnnnnnnnnnnnnnnnnnnnnnnnnnnnnnnnnnnnnnnnnnnnnnnnnnnnnnnnnnnnnnnnnnnnnnnnnnnnnnnnnnnnnnnnnnnnnnnnnnnnnnnnnnnnnnnnnnnnnnnnnnnnnnnnnnnnnnnnnnnnnnnnnnnnnnnnnnnnnnnnnnnnnnnnnnnnnnnnnnnnnnnnnnnnnnnnnnnnnnnnnnnnnnnnnnnnnnnnnnnnnnnnnnnnnnnnnnnnnnnnnnnnnnnnnnnnnnnnnnnnnnnnnnnnnnnnnnnnnnnnnnnnnnnnnnnnnnnnnnnnnnnnnnnnnnnnnnnnnnnnnnnnnnnnnnnnnnnnnnnnnnnnnnnnnnnnnnnnnnnnnnnnnnnnnnnnnnnnnnnnnnnnnnnnnnnnnnnnnnnnnnnnnnnnnnnnnnnnnnnnnnnnnnnnnnnnnnnnnnnnnnnnnnnnnnnnnnnnnnnnnnnnnnnnnnnnnnnnnnnnnnnnnnnnnnnnnnnnnnnnnnnnnnnnnnnnnnnnnnnnnnnnnnnnnnnnnnnnnnnnnnnnnnnnnnnnnnnnnnnnnnnnnnnnnnnnnnnnnnnnnnnnnnnnnnnnnnnnnnnnnnnnnnnnnnnnnnnnnnnnnnnnnnnnnnnnnnnnnnnnnnnnnnnnnnnnnnnnnnnnnnnnnnnnnnnnnnnnnnnnnnnnnnnnnnnnnnnnnnnnnnnnnnnnnnnnnnnnnnnnnnnnnnnnnnnnnnnnnnnnnnnnnnnnnnnngatattccttcaatttgagaaggcacccgtcccgatatctaatctctttatcacggttgatcgtcggttgattcgtatttgttcgccaaaaggcgtcgcatcgtttgatatgaacgtggaccctgactcctccgccacgattgttcaacgcgcaatttggaagcggttgccaaaatgatttgcgactacaccatttctaaacctgagagcctcggtctgtacgcggtccatcggtttgtcgcgcagctttgtgatggtgtgccgtgcctgtttgtggatcgtggtgatcgcgtggtgattcgtaccgccaagcctttgtgtgatcgcgtgacagaggtttccgtgccttccgtgggcgatgtgattgcgttttccttgcgatctgccgtgtcgaagcgtcaaaaaggcaagaatgtctatgcgccacttaacgattggcgagcgcgtcaccaatggctagagaagcgtgccgtaaagaatggctttgcgcttcttgcgcttcacgcaacaagcaagagcgtgaaagtagagcgcgagggcggtcagtactttcaaatggattcaaccgattttacaggggtgctcaaggtgaccgatgagcagctctttgtggcgtgtctgactcgcggaattgggcgggtgggcaagccttacggaatgggaatgctcgtaatctagcaacggtttggaggctttatggctaacagagtgattgtcaaagtgacgctacggaccaagggaccgttgtcgctcaagatgcctgtggcggaaggtgctcgtgaaaacgagtttgataactttcctgtgatgacgcgaggagtagacgcggagggagccaagcagcgtacaggctatcttcctgcgactactattcgtggatttttgcgaagggcggtcacgctgaagcgaatgcgagatgccgcagcgcaaggcaagccctacaggttgccgcaaatttataatgaaatgatcggtcaagacgccgagagcgagaagaaagcagaggaaatcgatttaatcgaaattcagaaagcacgcgacagcagtcctgtcgtggatctgtttggatcaggactcaatgtgaagtcacggctcttggtgagtcacttttgccctgcgctcaatattcttcctgaggcgttcacaggtgttcgtaaggacattgacgatacagaagacgccttagagttgatggaccctaaagagatggaagggttcgtgcggcgtacagagcgcaatcgtgagcgagctgcggcggctgcgatcgtgaagcagcttgagggaaaaatacggcgcgatgaaagaaaaaacggcgcgtcagaagacgataaaaaagcacttgaggcggcgcggacgaaggagaccgcagcggagggggggatgggtgaaatgaaggtgagcacccgccaactcacaacctactacgcgcttcccgctgagattgagctacacggacgcctcgtgattgaacgggcaaagccacgagacctagagctgttggagtatgcgctgagtgaattgagtcttgcgcctgttcttggtgcgcaatcggcacgaggatgcggcgagattgcgggaacctttgagttcacaaacgaagagggaaagctgatcaagaatgtggtggtaggcggttacagcgcagcaaatatcacgaatttctgagagtgaaaggttgttatttcaaagggaaatcatacggttacagagtatcgatcgcagctcctctgaatttgaggagctactgaaaccgaacaaacctcctatcctgctttcgcagcatcgcagctcctctgaatttgaggagctactgaaacttcgccgagatctggaatgcgggatacggtatcgcagctcctctgaatttgaggagctactgaaacatctcagcagcagcgcggacgatggctcggatcgcagctcctctgaatttgaggagctactgaaagggccagtcgtggcgggcagctatgcgtaccatcgcagctcctctgaatttgaggagctactgaaacaaccttgcgactgaccccgccatctggcatatcgcagctcctctgaatttgaggagctactgaaacagcggttccacggcattagggggagcaagtatcgcagctcctctgaatttgaggagctactgaaactgagcgacaacatcaccctgccccgcgctgagcgcagctcctctgaatttgaggagctactgaaacacaaggtagccgccgacggcggccacgacgatcgcagctcctctgaatttgaggagctattttctatagcgccactttaatgtggcgctttttttctgtaccgatagaatcagactatgtttcgttccgttgagcagtccaatttttctgcgcgccttgctgcgcatattcagcaggctgatgcgcctttactgcttgaaggaacaacggggcttggaaaaacaagagcctatctagctgcgctcaacaccgcgattcagcagggcaagcgtgtcgctatcgtcgttccaacgcacgcgctgatcgagcagcttcttgcttcttctgatctcgcgttgattgttccgtcgacagtcactcgcgcagcgttcaagcccaagtcgttctatccatcagctcaggagtttaaagacgcaaaagccttatcgcttgagtcgtcgctgatgatttgtactagctcttcagtgattgttgatcaacgcgccaagggcaactataacggcgtgactactcgcgactatattttatttgacgaagcggatcagctccctcagtacgctgctctgtctagagaccgcgaaattcgtggcgcagaactcagggaactcggtgttcgaggctcgactacgaaagagatcgcggagcaggtgatcgcgcacaaaggtgcggaaacggagacccgcgccgcagcggtgatgatcttggaggctcttgatgagcctgcttggtatcacaacgcaggcaagaccgacgatggcgggattgcgctttttcacaaaatgccaggaaggctgcttaagaaagtcgctaaccgctctaatgtcgccttcatcagcgcaacgctctctattggggggaagttcgatgactttaatcgcgcaatgggcattggagagcagagtgcgctctcatcgatcatcgagcctgcgcatcacgggacgctgaaattctttcacgaaccgcacccagttctatcgcaagaatggctcaccgcgacaaccgaagcgatcaccaaggcgaaaaagccaacgcttgtggttacgccaagcaatgaattgtctcagaccttgggtgcgcttttccctgacgccattgttcgtgcggcagaggaaaagacttcagacgcgattttgcggctgacagacaagcagaacatcctgatcgcgtcagccgcgtgggcgggacttgacacgcccattgagtggaaaagcatcgtcattccgcgcattccgttcctgcgccctcaagtgatagacggcaatattgaaagcagcttctttgattcgcggaatagcgctatccgccgaatgcgtcaggtgattgggcgagggctcaggaaacctgaggcggagtgcgaggtgtacattttggatgaccgtttggcgatgattgagtcgttcattccaacgcgattcagagagttgtgggcgaatagacagcgtcttgtggggtcatcgtatgttgaagggcgtgactatgagaaaggcggaaggggagtagagcgtcatccgctggtcagaaaaaacgccctgaagcattttggtagacggtgtatgtcgtgtgacttcgttcccaaagtggacagtcagttagaggttcaccatttgttcccgcttgctgatggcggtgagcgggttacgaagattcaaaccgatgtggcggtgctttgcgccaactgtcaccgtttggcgcattcggcgtcgccgccgctgcctcttggggtcctgagaggacttcaccaagacggcgggttatcagggtagggtgaatacagcgagagggcggttccataagggttccgcaatcgaccccatacctgcgcttacctcacccctcaagccgccaatagccccttggacttgagcgtatggaaggctgtcccaacgccacaacgaagggtctgactgatcttcttgggtgacatacccttcttgtagagttcgacgatggcggctcgagtgctgtcagtcacgctagagggtcgaccgagtttcttcccttccttacgagcgcgttccacgcctaacttgatccgctcgcggatgaggtcgcgttcgaattcagcgaaggacgagaacacaccgaacatcagcttccctgaagggctcgtggtgtctaaagcctgttggtggaagtagagctgaacgcctgaagcgtgaagatcgttcacagtggtgacaaggtgctgtagagagcgtccaaggcggtcgatgctccaaacggcgatgaggtcgaactcacggcgagtggcggcttttaagagggcatcgagggcagggcgaccatcgcgacccttggctcctgagatcccatcgtcgcggtaagtagcgacgatgttccatcccctagcggcggcgacacgctcaagctcgtggagttggttgtcggcggtttggtgagcggtggagactcgaagatagagtgcggttttcatagcgacctcttgagctgtacaaatgtacagttattttacctgtcgagatcctaaaaactagcaatttactgaataaaaacagtcgtttacgaaggctgaggaccgtcgctatctcccgatttagccgccttggaactcctcttcgctctcttggcgagagggggttctttgccctccacccatgagtggagcttcctgcgggcttgctcggtcgtgaggtgcgcgccgtagaaccgctcgatgaccgcctgtgaggtacgggcattcttggcaagtccgatggagtcgacctcgctattcatcaagcggtacatgatcgcggtatggcgaaggctataaagcgtgaaccgcttgcccgttttcttatcgagtccgctttgctcgacgatgtagccgaagacgcgtcctagcgtgaccatcgcggtttcgcggttctcgaattgcggcatgaatacatagtcatcgggatcaataaacgctgaggatgtcagacctgcggcgagctcctcgcggcgaagttgtcgaagaccatcgtagtactcgaccgccgacggcatggtctgaacctctagggcggtagtcttggtcgcggggtgccgcagggtcagccactcggtctttactcgcgtcttgttattgatctcctcgcgacgcacgacatgcttgtgcttcagaacccgtaggtctgacggacgaataaacgagttgatcatgaagttcgcgaggtacttgtactcaagcgtgatgcgattgcctctgaactcagcatgctcactggcgagtcgactgatcgtctttgatagcgttgagtattcgcccatcgtgaagtagtcacgcttttgctgcgtgattaacttatcgccgattttcgggaagaggggcagagcgtcgatcacgccgagctcaacgccatgcttaaacactttgcggatgac

SEQ ID NO: 159 - DNA, 13236 bp, Artificial Sequence
  Synthetic Oligonucleotide
  misc_feature (1)..(8517): n is a, c, g, or t
nnnnnnnnnnnnnnnnnnnnnnnnnnnnnnnnnnnnnnnnnnnnnnnnnnnnnnnnnnnnnnnnnnnnnnnnnnnnnnnnnnnnnnnnnnnnnnnnnnnnnnnnnnnnnnnnnnnnnnnnnnnnnnnnnnnnnnnnnnnnnnnnnnnnnnnnnnnnnnnnnnnnnnnnnnnnnnnnnnnnnnnnnnnnnnnnnnnnnnnnnnnnnnnnnnnnnnnnnnnnnnnnnnnnnnnnnnnnnnnnnnnnnnnnnnnnnnnnnnnnnnnnnnnnnnnnnnnnnnnnnnnnnnnnnnnnnnnnnnnnnnnnnnnnnnnnnnnnnnnnnnnnnnnnnnnnnnnnnnnnnnnnnnnnnnnnnnnnnnnnnnnnnnnnnnnnnnnnnnnnnnnnnnnnnnnnnnnnnnnnnnnnnnnnnnnnnnnnnnnnnnnnnnnnnnnnnnnnnnnnnnnnnnnnnnnnnnnnnnnnnnnnnnnnnnnnnnnnnnnnnnnnnnnnnnnnnnnnnnnnnnnnnnnnnnnnnnnnnnnnnnnnnnnnnnnnnnnnnnnnnnnnnnnnnnnnnnnnnnnnnnnnnnnnnnnnnnnnnnnnnnnnnnnnnnnnnnnnnnnnnnnnnnnnnnnnnnnnnnnnnnnnnnnnnnnnnnnnnnnnnnnnnnnnnnnnnnnnnnnnnnnnnnnnnnnnnnnnnnnnnnnnnnnnnnnnnnnnnnnnnnnnnnnnnnnnnnnnnnnnnnnnnnnnnnnnnnnnnnnnnnnnnnnnnnnnnnnnnnnnnnnnnnnnnnnnnnnnnnnnnnnnnnnnnnnnnnnnnnnnnnnnnnnnnnnnnnnnnnnnnnnnnnnnnnnnnnnnnnnnnnnnnnnnnnnnnnnnnnnnnnnnnnnnnnnnnnnnnnnnnnnnnnnnnnnnnnnnnnnnnnnnnnnnnnnnnnnnnnnnnnnnnnnnnnnnnnnnnnnnnnnnnnnnnnnnnnnnnnnnnnnnnnnnnnnnnnnnnnnnnnnnnnnnnnnnnnnnnnnnnnnnnnnnnnnnnnnnnnnnnnnnnnnnnnnnnnnnnnnnnnnnnnnnnnnnnnnnnnnnnnnnnnnnnnnnnnnnnnnnnnnnnnnnnnnnnnnnnnnnnnnnnnnnnnnnnnnnnnnnnnnnnnnnnnnnnnnnnnnnnnnnnnnnnnnnnnnnnnnnnnnnnnnnnnnnnnnnnnnnnnnnnnnnnnnnnnnnnnnnnnnnnnnnnnnnnnnnnnnnnnnnnnnnnnnnnnnnnnnnnnnnnnnnnnnnnnnnnnnnnnnnnnnnnnnnnnnnnnnnnnnnnnnnnnnnnnnnnnnnnnnnnnnnnnnnnnnnnnnnnnnnnnnnnnnnnnnnnnnnnnnnnnnnnnnnnnnnnnnnnnnnnnnnnnnnnnnnnnnnnnnnnnnnnnnnnnnnnnnnnnnnnnnnnnnnnnnnnnnnnnnnnnnnnnnnnnnnnnnnnnnnnnnnnnnnnnnnnnnnnnnnnnnnnnnnnnnnnnnnnnnnnnnnnnnnnnnnnnnnnnnnnnnnnnnnnnnnnnnnnnnnnnnnnnnnnnnnnnnnnnnnnnnnnnnnnnnnnnnnnnnnnnnnnnnnnnnnnnnnnnnnnnnnnnnnnnnnnnnnnnnnnnnnnnnnnnnnnnnnnnnnnnnnnnnnnnnnnnnnnnnnnnnnnnnnnnnnnnnnnnnnnnnnnnnnnnnnnnnnnnnnnnnnnnnnnnnnnnnnnnnnnnnnnnnnnnnnnnnnnnnnnnnnnnnnnnnnnnnnnnnnnnnnnnnnnnnnnnnnnnnnnnnnnnnnnnnnnnnnnnnnnnnnnnnnnnnnnnnnnnnnnnnnnnnnnnnnnnnnnnnnnnnnnnnnnnnnnnnnnnnnnnnnnnnnnnnnnnnnnnnnnnnnnnnnnnnnnnnnnnnnnnnnnnnnnnnnnnnnnnnnnnnnnnnnnnnnnnnnnnnnnnnnnnnnnnnnnnnnnnnnnnnnnnnnnnnnnnnnnnnnnnnnnnnnnnnnnnnnnnnnnnnnnnnnnnnnnnnnnnnnnnnnnnnnnnnnnnnnnnnnnnnnnnnnnnnnnnnnnnnnnnnnnnnnnnnnnnnnnnnnnnnnnnnnnnnnnnnnnnnnnnnnnnnnnnnnnnnnnnnnnnnnnnnnnnnnnnnnnnnnnnnnnnnnnnnnnnnnnnnnnnnnnnnnnnnnnnnnnnnnnnnnnnnnnnnnnnnnnnnnnnnnnnnnnnnnnnnnnnnnnnnnnnnnnnnnnnnnnnnnnnnnnnnnnnnnnnnnnnnnnnnnnnnnnnnnnnnnnnnnnnnnnnnnnnnnnnnnnnnnnnnnnnnnnnnnnnnnnnnnnnnnnnnnnnnnnnnnnnnnnnnnnnnnnnnnnnnnnnnnnnnnnnnnnnnnnnnnnnnnnnnnnnnnnnnnnnnnnnnnnnnnnnnnnnnnnnnnnnnnnnnnnnnnnnnnnnnnnnnnnnnnnnnnnnnnnnnnnnnnnnnnnnnnnnnnnnnnnnnnnnnnnnnnnnnnnnnnnnnnnnnnnnnnnnnnnnnnnnnnnnnnnnnnnnnnnnnnnnnnnnnnnnnnnnnnnnnnnnnnnnnnnnnnnnnnnnnnnnnnnnnnnnnnnnnnnnnnnnnnnnnnnnnnnnnnnnnnnnnnnnnnnnnnnnnnnnnnnnnnnnnnnnnnnnnnnnnnnnnnnnnnnnnnnnnnnnnnnnnnnnnnnnnnnnnnnnnnnnnnnnnnnnnnnnnnnnnnnnnnnnnnnnnnnnnnnnnnnnnnnnnnnnnnnnnnnnnnnnnnnnnnnnnnnnnnnnnnnnnnnnnnnnnnnnnnnnnnnnnnnnnnnnnnnnnnnnnnnnnnnnnnnnnnnnnnnnnnnnnnnnnnnnnnnnnnnnnnnnnnnnnnnnnnnnnnnnnnnnnnnnnnnnnnnnnnnnnnnnnnnnnnnnnnnnnnnnnnnnnnnnnnnnnnnnnnnnnnnnnnnnnnnnnnnnnnnnnnnnnnnnnnnnnnnnnnnnnnnnnnnnnnnnnnnnnnnnnnnnnnnnnnnnnnnnnnnnnnnnnnnnnnnnnnnnnnnnnnnnnnnnnnnnnnnnnnnnnnnnnnnnnnnnnnnnnnnnnnnnnnnnnnnnnnnnnnnnnnnnnnnnnnnnnnnnnnnnnnnnnnnnnnnnnnnnnnnnnnnnnnnnnnnnnnnnnnnnnnnnnnnnnnnnnnnnnnnnnnnnnnnnnnnnnnnnnnnnnnnnnnnnnnnnnnnnnnnnnnnnnnnnnnnnnnnnnnnnnnnnnnnnnnnnnnnnnnnnnnnnnnnnnnnnnnnnnnnnnnnnnnnnnnnnnnnnnnnnnnnnnnnnnnnnnnnnnnnnnnnnnnnnnnnnnnnnnnnnnnnnnnnnnnnnnnnnnnnnnnnnnnnnnnnnnnnnnnnnnnnnnnnnnnnnnnnnnnnnnnnnnnnnnnnnnnnnnnnnnnnnnnnnnnnnnnnnnnnnnnnnnnnnnnnnnnnnnnnnnnnnnnnnnnnnnnnnnnnnnnnnnnnnnnnnnnnnnnnnnnnnnnnnnnnnnnnnnnnnnnnnnnnnnnnnnnnnnnnnnnnnnnnnnnnnnnnnnnnnnnnnnnnnnnnnnnnnnnnnnnnnnnnnnnnnnnnnnnnnnnnnnnnnnnnnnnnnnnnnnnnnnnnnnnnnnnnnnnnnnnnnnnnnnnnnnnnnnnnnnnnnnnnnnnnnnnnnnnnnnnnnnnnnnnnnnnnnnnnnnnnnnnnnnnnnnnnnnnnnnnnnnnnnnnnnnnnnnnnnnnnnnnnnnnnnnnnnnnnnnnnnnnnnnnnnnnnnnnnnnnnnnnnnnnnnnnnnnnnnnnnnnnnnnnnnnnnnnnnnnnnnnnnnnnnnnnnnnnnnnnnnnnnnnnnnnnnnnnnnnnnnnnnnnnnnnnnnnnnnnnnnnnnnnnnnnnnnnnnnnnnnnnnnnnnnnnnnnnnnnnnnnnnnnnnnnnnnnnnnnnnnnnnnnnnnnnnnnnnnnnnnnnnnnnnnnnnnnnnnnnnnnnnnnnnnnnnnnnnnnnnnnnnnnnnnnnnnnnnnnnnnnnnnnnnnnnnnnnnnnnnnnnnnnnnnnnnnnnnnnnnnnnnnnnnnnnnnnnnnnnnnnnnnnnnnnnnnnnnnnnnnnnnnnnnnnnnnnnnnnnnnnnnnnnnnnnnnnnnnnnnnnnnnnnnnnnnnnnnnnnnnnnnnnnnnnnnnnnnnnnnnnnnnnnnnnnnnnnnnnnnnnnnnnnnnnnnnnnnnnnnnnnnnnnnnnnnnnnnnnnnnnnnnnnnnnnnnnnnnnnnnnnnnnnnnnnnnnnnnnnnnnnnnnnnnnnnnnnnnnnnnnnnnnnnnnnnnnnnnnnnnnnnnnnnnnnnnnnnnnnnnnnnnnnnnnnnnnnnnnnnnnnnnnnnnnnnnnnnnnnnnnnnnnnnnnnnnnnnnnnnnnnnnnnnnnnnnnnnnnnnnnnnnnnnnnnnnnnnnnnnnnnnnnnnnnnnnnnnnnnnnnnnnnnnnnnnnnnnnnnnnnnnnnnnnnnnnnnnnnnnnnnnnnnnnnnnnnnnnnnnnnnnnnnnnnnnnnnnnnnnnnnnnnnnnnnnnnnnnnnnnnnnnnnnnnnnnnnnnnnnnnnnnnnnnnnnnnnnnnnnnnnnnnnnnnnnnnnnnnnnnnnnnnnnnnnnnnnnnnnnnnnnnnnnnnnnnnnnnnnnnnnnnnnnnnnnnnnnnnnnnnnnnnnnnnnnnnnnnnnnnnnnnnnnnnnnnnnnnnnnnnnnnnnnnnnnnnnnnnnnnnnnnnnnnnnnnnnnnnnnnnnnnnnnnnnnnnnnnnnnnnnnnnnnnnnnnnnnnnnnnnnnnnnnnnnnnnnnnnnnnnnnnnnnnnnnnnnnnnnnnnnnnnnnnnnnnnnnnnnnnnnnnnnnnnnnnnnnnnnnnnnnnnnnnnnnnnnnnnnnnnnnnnnnnnnnnnnnnnnnnnnnnnnnnnnnnnnnnnnnnnnnnnnnnnnnnnnnnnnnnnnnnnnnnnnnnnnnnnnnnnnnnnnnnnnnnnnnnnnnnnnnnnnnnnnnnnnnnnnnnnnnnnnnnnnnnnnnnnnnnnnnnnnnnnnnnnnnnnnnnnnnnnnnnnnnnnnnnnnnnnnnnnnnnnnnnnnnnnnnnnnnnnnnnnnnnnnnnnnnnnnnnnnnnnnnnnnnnnnnnnnnnnnnnnnnnnnnnnnnnnnnnnnnnnnnnnnnnnnnnnnnnnnnnnnnnnnnnnnnnnnnnnnnnnnnnnnnnnnnnnnnnnnnnnnnnnnnnnnnnnnnnnnnnnnnnnnnnnnnnnnnnnnnnnnnnnnnnnnnnnnnnnnnnnnnnnnnnnnnnnnnnnnnnnnnnnnnnnnnnnnnnnnnnnnnnnnnnnnnnnnnnnnnnnnnnnnnnnnnnnnnnnnnnnnnnnnnnnnnnnnnnnnnnnnnnnnnnnnnnnnnnnnnnnnnnnnnnnnnnnnnnnnnnnnnnnnnnnnnnnnnnnnnnnnnnnnnnnnnnnnnnnnnnnnnnnnnnnnnnnnnnnnnnnnnnnnnnnnnnnnnnnnnnnnnnnnnnnnnnnnnnnnnnnnnnnnnnnnnnnnnnnnnnnnnnnnnnnnnnnnnnnnnnnnnnnnnnnnnnnnnnnnnnnnnnnnnnnnnnnnnnnnnnnnnnnnnnnnnnnnnnnnnnnnnnnnnnnnnnnnnnnnnnnnnnnnnnnnnnnnnnnnnnnnnnnnnnnnnnnnnnnnnnnnnnnnnnnnnnnnnnnnnnnnnnnnnnnnnnnnnnnnnnnnnnnnnnnnnnnnnnnnnnnnnnnnnnnnnnnnnnnnnnnnnnnnnnnnnnnnnnnnnnnnnnnnnnnnnnnnnnnnnnnnnnnnnnnnnnnnnnnnnnnnnnnnnnnnnnnnnnnnnnnnnnnnnnnnnnnnnnnnnnnnnnnnnnnnnnnnnnnnnnnnnnnnnnnnnnnnnnnnnnnnnnnnnnnnnnnnnnnnnnnnnnnnnnnnnnnnnnnnnnnnnnnnnnnnnnnnnnnnnnnnnnnnnnnnnnnnnnnnnnnnnnnnnnnnnnnnnnnnnnnnnnnnnnnnnnnnnnnnnnnnnnnnnnnnnnnnnnnnnnnnnnnnnnnnnnnnnnnnnnnnnnnnnnnnnnnnnnnnnnnnnnnnnnnnnnnnnnnnnnnnnnnnnnnnnnnnnnnnnnnnnnnnnnnnnnnnnnnnnnnnnnnnnnnnnnnnnnnnnnnnnnnnnnnnnnnnnnnnnnnnnnnnnnnnnnnnnnnnnnnnnnnnnnnnnnnnnnnnnnnnnnnnnnnnnnnnnnnnnnnnnnnnnnnnnnnnnnnnnnnnnnnnnnnnnnnnnnnnnnnnnnnnnnnnnnnnnnnnnnnnnnnnnnnnnnnnnnnnnnnnnnnnnnnnnnnnnnnnnnnnnnnnnnnnnnnnnnnnnnnnnnnnnnnnnnnnnnnnnnnnnnnnnnnnnnnnnnnnnnnnnnnnnnnnnnnnnnnnnnnnnnnnnnnnnnnnnnnnnnnnnnnnnnnnnnnnnnnnnnnnnnnnnnnnnnnnnnnnnnnnnnnnnnnnnnnnnnnnnnnnnnnnnnnnnnnnnnnnnnnnnnnnnnnnnnnnnnnnnnnnnnnnnnnnnnnnnnnnnnnnnnnnnnnnnnnnnnnnnnnnnnnnnnnnnnnnnnnnnnnnnnnnnnnnnnnnnnnnnnnnnnnnnnnnnnnnnnnnnnnnnnnnnnnnnnnnnnnnnnnnnnnnnnnnnnnnnnnnnnnnnnnnnnnnnnnnnnnnnnnnnnnnnnnnnnnnnnnnnnnnnnnnnnnnnnnnnnnnnnnnnnnnnnnnnnnnnnnnnnnnnnnnnnnnnnnnnnnnnnnnnnnnnnnnnnnnnnnnnnnnnnnnnnnnnnnnnnnnnnnnnnnnnnnnnnnnnnnnnnnnnnnnnnnnnnnnnnnnnnnnnnnnnnnnnnnnnnnnnnnnnnnnnnnnnnnnnnnnnnnnnnnnnnnnnnnnnnnnnnnnnnnnnnnnnnnnnnnnnnnnnnnnnnnnnnnnnnnnnnnnnnnnnnnnnnnnnnnnnnnnnnnnnnnnnnnnnnnnnnnnnnnnnnnnnnnnnnnnnnnnnnnnnnnnnnnnnnnnnnnnnnnnnnnnnnnnnnnnnnnnnnnnnnnnnnnnnnnnnnnnnnnnnnnnnnnnnnnnnnnnnnnnnnnnnnnnnnnnnnnnnnnnnnnnnnnnnnnnnnnnnnnnnnnnnnnnnnnnnnnnnnnnnnnnnnnnnnnnnnnnnnnnnnnnnnnnnnnnnnnnnnnnnnnnnnnnnnnnnnnnnnnnnnnnnnnnnnnnnnnnnnnnnnnnnnnnnnnnnnnnnnnnnnnnnnnnnnnnnnnnnnnnnnnnnnnnnnnnnnnnnnnnnnnnnnnnnnnnnnnnnnnnnnnnnnnnnnnnnnnnnnnnnnnnnnnnnnnnnnnnnnnnnnnnnnnnnnnnnnnnnnnnnnnnnnnnnnnnnnnnnnnnnnnnnnnnnnnnnnnnnnnnnnnnnnnnnnnnnnnnnnnnnnnnnnnnnnnnnnnnnnnnnnnnnnnnnnnnnnnnnnnnnnnnnnnnnnnnnnnnnnnnnnnnnnnnnnnnnnnnnnnnnnnnnnnnnnnnnnnnnnnnnnnnnnnnnnnnnnnnnnnnnnnnnnnnnnnnnnnnnnnnnnnnnnnnnnnnnnnnnnnnnnnnnnnnnnnnnnnnnnnnnnnnnnnnnnnnnnnnnnnnnnnnnnnnnnnnnnnnnnnnnnnnnnnnnnnnnnnnnnnnnnnnnnnnnnnnnnnnnnnnnnnnnnnnnnnnnnnnnnnnnnnnnnnnnnnnnnnnnnnnnnnnnnnnnnnnnnnnnnnnnnnnnnnnnnnnnnnnnnnnnnnnnnnnnnnnnnnnnnnnnnnnnnnnnnnnnnnnnnnnnnnnnnnnnnnnnnnnnnnnnnnnnnnnnnnnnnnnnnnnnnnnnnnnnnnnnnnnnnnnnnnnnnnnnnnnnnnnnnnnnnnnnnnnnnnnnnnnnnnnnnnnnnnnnnnnnnnnnnnnnnnnnnnnnnnnnnnnnnnnnnnnnnnnnnnnnnnnnnnnnnnnnnnnnnnnnnnnnnnnnnnnnnnnnnnnnnnnnnnnnnnnnnnnnnnnnnnnnnnnnnnnnnnnnnnnnnnnnnnnnnnnnnnnnnnnnnnnnnnnnnnnnnnnnnnnnnnnnnnnnnnnnnnnnnnnnnnnnnnnnnnnnnnnnnnnnnnnnnnnnnnnnnnnnnnnnnnnnnnnnnnnnnnnnnnnnnnnnnnnnnnnnnnnnnnnnnnnnnnnnnnnnnnnnnnnnnnnnnnnnnnnnnnnnnnnnnnnnnnnnnnnnnnnnnnnnnnnnnnnnnnnnnnnnnnnnnnnnnnnnnnnnnnnnnnnnnnnnnnnnnnnnnnnnnnnnnnnnnnnnnnnnnnnnnnnnnnnnnnnnnnnnnnnnnnnnnnnnnnnnnnnnnnnnnnnnnnnnnnnnnnnnnnnnnnnnnnnnnnnnnnnnnnnnnnnnnnnnnnnnnnnnnnnnnnnnnnnnnnnnnnnnnnnnnnnnnnnnnnnnnnnnnnnnnnnnnnnnnnnnnnnnnnnnnnnnnnnnnnnnnnnnnnnnnnnnnnnnnnnngcttcctgcgccgtgccgtcacgttgcgcaacatgcgcagcgcggccgaggcgggcaggccctaccggctgccacaggtctacagcgaaatgatcgggcaggacgccgaaagcgagaagcaggcaggtgatatcgatctgctggcgcttcgcaaggcgcgcgaagcaagccccgtgttggacttgttcggcagcgggctgggcatcaagtcaaggctgaaagtcagccatttcctgccgcaggtgaacgtgctgccagaggtgttcactggggtaagaaaagatctggacgacacggaagaagccttggatctgatggacaagtccgacatggcaacctttctcggtcgcagcgaaagcaacaacaaacgggcagccgccgctgcggtggtcaagcaactggagggtcaagtcaggcgacttgagaagaagggggaagccgtccccgacgacgtggccaaggcgctggctgtcgccaaggcggagtttgacaaacacaagggggatatgggcgacatgcagaacagcacccgtaccatcgtgcagcactatgccttgccggcggggctggagctatcgggccgcatcgtggtcgagaacgtccgcgacacggacatggagttgctggactatgcgctggaacagttcagcctgaaaccggttctgggcgcccacagcgcgcgagggtgcggagaactggccggcacatttcggttcttcgacggggatggcaagctgttgaaaacggtggtggttggggactacaaaccctcacgcgtgatgcttttttctccagatgaatagcaaaaagtaaaaaaattcaaggacttaagatcgttcggatcaagccgcccttgaatggggtggctactagaagggcaaccacatgctccagtccacctctgcggatcaagccgcccttgaatggggtggctactagaagtcgaacgcctggacccaggtggcccgtgacgatcaagccgcccttgaatggggtggctactagaagaagtgcgggaagtcgccgccctcagtgaaggatcaagccgcccttgaatggggtggctactagaagtagaacagctggatgggcgcggcgcccttggatcaagccgcccttgaatggggtggctaatagaagtgcagatccgtcacgcgcccatcgcggtaggatcaagccgcccctgaatggggtggctactagaagggcacggtgatcgacggcaatctgttggtcaatcaagccgcccggtaatggggtggctactagaaacaggtcatgaccgcgcaagcgatccgcaatggtcaagccgcccggtagttgggtggctactagaagatcgttgaccaggctacggacgtggcagagggtcaagccgcccagcatttgggtggctgatggattccgtggccgatcacggagattggcttcccggtaagccactcggacagggaaagccttgattgatcaaaatgggttcgaatgcccgggatgaaatgttcccgcgcggatgcagatcggacaggaagaccaatgtttcgctcaactgaacaagcgaatttcagcgccatcgtcgcaaggcacatggcgagcccggacggccccttgctcatggagggagcgacgggtctgggcaagacgcgcgcctacctcgctgcggtcatgagggtggctgctgcaggcaggcgcgttgcgatagcaatgcctagtcaccagttgatcgatcaattgttgacgtctgccgatctggctgccacccaggtggatagtgtgcgagttctggcctttcggccctctcgtttcttggacgacaaaaaggaataccagacccaacgcaccgccacgttggaagccgaagtgatggtctgcaccagcgcgtcggtcatcatcgaccagcgcctgaagggaggctacaacggcgccaccgagcgggattacctagtgttcgatgaagcggatcagttgcccgatgctgctgcgttgcaaagcgactgcgaaatcagtgcacagcaattgagtgacctcggggttgcggtgcaaagcgcacagcaggctgccaccgaagttttgatgaagaaggggctggaacccgaggtccgggccgccgccctgatgattctggaagccgtccaggaaccggcgtggtaccacaaggcaggggtgaccgatgacggcggcatcgcgctgtttcacaagatgcccggtcgattgctcaagcgcattgccaaccgcaaccaagtggccttcatcagcgcaacgctcacagtcggggacaggtttgatgatttcaagcgggcacttggcatccagaagcagagcgacttgtcgtccatcatcgagcctcagcggcacgggcaactcacgtttgttgtcgccgatgcagaggtcgatacgccagagtggcgtggcctgacgcaggcgaccatcaatcaggccgcaggaaagggcacagtgctggtggtgacgcccagccattcactggcgcaggaactgggacaactggtggacggagccactgtgcggagcgccgccgagaccgcaaccgaggcagcagcacgcatgggggacagcaacgttctgatcgcagccggtgcttgggcagggctggacacgcccattcgctggaaatccatcgtggtgccccgtgtgccttacgaacgccctgtgatccttgacggcgaggttgaaagcagctttctggatacacgaaatacggctgtgcgtcgcttgcgtcaggtcatcggccgtggcctccgaacgcccgaagccgaatgcacgatctacgtgctggaccgtcgctaccgcaacgtggaggcgtttattcccaagcggtttcgcgcacagtgggcgggtcgcttgtatctggaggggcgccgcaacgaagtcacgctgtcgaagatcgagcgcgacccgtcggtacgcaaggcggcgttaaagcattacggcctgaagtgcatgggctgcggattcattccaagggtcgagagccagcttgacgtgcatcacctgaatccggtggcaggaggcgagcgcctgacgggaatcagggacgtcgccgtcctgtgtgccaactgtcaccggctggtgcattcgactgatcccccgatggcagtagagacgcttggggacctaggtgcaacggggggctcggcatgagccataagacctgacagcgatggcgggacaagggagctaagccggtctgttcgtctacggctacacggctacttcacagcgctggtctacgatcaaccatcctcgttcccgtccatgggggcctccacagggacccatttcgacaagtctggccgttttcgtgctctgcgaacggtgccgacaaagattgccttaggctttctaggcgccggagccaccatctgggccatcgcttggtcgttcagaactttgagcagtgcttctcgcgggaacatccacgaagttccgtacttgactccggggagcttatgagcccgcgccttgctctcaaccgtgcaggtgctgcaggacagtagattcgcgacctcttgagtggtaagtaccaacggcggaatggccgcgtcgtgcggcataggccgggaatgtatttcgtcgttcacggggagtccttcttgggtgtgacctgcccctgacagcggtacaaggctgacagggggcggtcaggtcggcgggaggcgtctgtcagtccgtcatagcctattggcagatggcgcccagccactttcgcactggtggcgcgctcacgacacgtgccaatggtgcccgcgtcgggctcaggtccctaaaagtaatatctccaaaactagttccaggcggcgagccagagtcagtctggcatccaaatggatgttcatccgggtgagctcattgaggaaaccggttttgtcgtgactcccagtcactcaaactcaaccccgataaactgaaacagcctattggaccttcataaggtggctcgcccaccacgccattagagcccgacgcttgtctagaaattcattcttgtcatagatgccacgaacccgatcagcgggcgcgtgtgagaggctgtactcaatggcttccgtcctgttcggcccatggtagggccacccgtcgtgcgcaactgtgctgaagaccttgcgcagtccgtgggcggtcagttcttcgccccagcccatgcgctgcaacaggtcattgaccgcgttttcgctgagcatgcgccctttgtagttgccgtcaatgtgaacgaacaccagcccagccttgacgtcgcgcagggcttgcccggcctctcgttgccactcccgaacctgccgcagaacctctgccgcctcgtggctcagtgggatcgtccaaggaaccctgcgcttcattctgtttgccgggaccctgacgatgggcgtatccccttccagtccctcgacttcatcccatcgcagtgccctgagttcaagggttcgcgcagctgtcagggtcagcagacgcagcaactgcgctgtcaccgggtagcgttcgccagtgtctgccttgagcactgaccgccagaagtcaggcaatctggcgacgtcaaagaaccgacgtccttctacctttggcttgtccagaaaggtgcgcgcggccgtgacagggtttacgcctgcgaaccaccccttgctggcagcgaaggcgagggcgcgctcaaggtccgcgcttgagcggcgcagggtttctgctccgctgaatccggccccctcgcgtttg

SEQ ID NO: 160 - DNA, 13220 bp, Artificial Sequence
  Synthetic Oligonucleotide
  misc_feature (1)..(9536): n is a, c, g, or t
nnnnnnnnnnnnnnnnnnnnnnnnnnnnnnnnnnnnnnnnnnnnnnnnnnnnnnnnnnnnnnnnnnnnnnnnnnnnnnnnnnnnnnnnnnnnnnnnnnnnnnnnnnnnnnnnnnnnnnnnnnnnnnnnnnnnnnnnnnnnnnnnnnnnnnnnnnnnnnnnnnnnnnnnnnnnnnnnnnnnnnnnnnnnnnnnnnnnnnnnnnnnnnnnnnnnnnnnnnnnnnnnnnnnnnnnnnnnnnnnnnnnnnnnnnnnnnnnnnnnnnnnnnnnnnnnnnnnnnnnnnnnnnnnnnnnnnnnnnnnnnnnnnnnnnnnnnnnnnnnnnnnnnnnnnnnnnnnnnnnnnnnnnnnnnnnnnnnnnnnnnnnnnnnnnnnnnnnnnnnnnnnnnnnnnnnnnnnnnnnnnnnnnnnnnnnnnnnnnnnnnnnnnnnnnnnnnnnnnnnnnnnnnnnnnnnnnnnnnnnnnnnnnnnnnnnnnnnnnnnnnnnnnnnnnnnnnnnnnnnnnnnnnnnnnnnnnnnnnnnnnnnnnnnnnnnnnnnnnnnnnnnnnnnnnnnnnnnnnnnnnnnnnnnnnnnnnnnnnnnnnnnnnnnnnnnnnnnnnnnnnnnnnnnnnnnnnnnnnnnnnnnnnnnnnnnnnnnnnnnnnnnnnnnnnnnnnnnnnnnnnnnnnnnnnnnnnnnnnnnnnnnnnnnnnnnnnnnnnnnnnnnnnnnnnnnnnnnnnnnnnnnnnnnnnnnnnnnnnnnnnnnnnnnnnnnnnnnnnnnnnnnnnnnnnnnnnnnnnnnnnnnnnnnnnnnnnnnnnnnnnnnnnnnnnnnnnnnnnnnnnnnnnnnnnnnnnnnnnnnnnnnnnnnnnnnnnnnnnnnnnnnnnnnnnnnnnnnnnnnnnnnnnnnnnnnnnnnnnnnnnnnnnnnnnnnnnnnnnnnnnnnnnnnnnnnnnnnnnnnnnnnnnnnnnnnnnnnnnnnnnnnnnnnnnnnnnnnnnnnnnnnnnnnnnnnnnnnnnnnnnnnnnnnnnnnnnnnnnnnnnnnnnnnnnnnnnnnnnnnnnnnnnnnnnnnnnnnnnnnnnnnnnnnnnnnnnnnnnnnnnnnnnnnnnnnnnnnnnnnnnnnnnnnnnnnnnnnnnnnnnnnnnnnnnnnnnnnnnnnnnnnnnnnnnnnnnnnnnnnnnnnnnnnnnnnnnnnnnnnnnnnnnnnnnnnnnnnnnnnnnnnnnnnnnnnnnnnnnnnnnnnnnnnnnnnnnnnnnnnnnnnnnnnnnnnnnnnnnnnnnnnnnnnnnnnnnnnnnnnnnnnnnnnnnnnnnnnnnnnnnnnnnnnnnnnnnnnnnnnnnnnnnnnnnnnnnnnnnnnnnnnnnnnnnnnnnnnnnnnnnnnnnnnnnnnnnnnnnnnnnnnnnnnnnnnnnnnnnnnnnnnnnnnnnnnnnnnnnnnnnnnnnnnnnnnnnnnnnnnnnnnnnnnnnnnnnnnnnnnnnnnnnnnnnnnnnnnnnnnnnnnnnnnnnnnnnnnnnnnnnnnnnnnnnnnnnnnnnnnnnnnnnnnnnnnnnnnnnnnnnnnnnnnnnnnnnnnnnnnnnnnnnnnnnnnnnnnnnnnnnnnnnnnnnnnnnnnnnnnnnnnnnnnnnnnnnnnnnnnnnnnnnnnnnnnnnnnnnnnnnnnnnnnnnnnnnnnnnnnnnnnnnnnnnnnnnnnnnnnnnnnnnnnnnnnnnnnnnnnnnnnnnnnnnnnnnnnnnnnnnnnnnnnnnnnnnnnnnnnnnnnnnnnnnnnnnnnnnnnnnnnnnnnnnnnnnnnnnnnnnnnnnnnnnnnnnnnnnnnnnnnnnnnnnnnnnnnnnnnnnnnnnnnnnnnnnnnnnnnnnnnnnnnnnnnnnnnnnnnnnnnnnnnnnnnnnnnnnnnnnnnnnnnnnnnnnnnnnnnnnnnnnnnnnnnnnnnnnnnnnnnnnnnnnnnnnnnnnnnnnnnnnnnnnnnnnnnnnnnnnnnnnnnnnnnnnnnnnnnnnnnnnnnnnnnnnnnnnnnnnnnnnnnnnnnnnnnnnnnnnnnnnnnnnnnnnnnnnnnnnnnnnnnnnnnnnnnnnnnnnnnnnnnnnnnnnnnnnnnnnnnnnnnnnnnnnnnnnnnnnnnnnnnnnnnnnnnnnnnnnnnnnnnnnnnnnnnnnnnnnnnnnnnnnnnnnnnnnnnnnnnnnnnnnnnnnnnnnnnnnnnnnnnnnnnnnnnnnnnnnnnnnnnnnnnnnnnnnnnnnnnnnnnnnnnnnnnnnnnnnnnnnnnnnnnnnnnnnnnnnnnnnnnnnnnnnnnnnnnnnnnnnnnnnnnnnnnnnnnnnnnnnnnnnnnnnnnnnnnnnnnnnnnnnnnnnnnnnnnnnnnnnnnnnnnnnnnnnnnnnnnnnnnnnnnnnnnnnnnnnnnnnnnnnnnnnnnnnnnnnnnnnnnnnnnnnnnnnnnnnnnnnnnnnnnnnnnnnnnnnnnnnnnnnnnnnnnnnnnnnnnnnnnnnnnnnnnnnnnnnnnnnnnnnnnnnnnnnnnnnnnnnnnnnnnnnnnnnnnnnnnnnnnnnnnnnnnnnnnnnnnnnnnnnnnnnnnnnnnnnnnnnnnnnnnnnnnnnnnnnnnnnnnnnnnnnnnnnnnnnnnnnnnnnnnnnnnnnnnnnnnnnnnnnnnnnnnnnnnnnnnnnnnnnnnnnnnnnnnnnnnnnnnnnnnnnnnnnnnnnnnnnnnnnnnnnnnnnnnnnnnnnnnnnnnnnnnnnnnnnnnnnnnnnnnnnnnnnnnnnnnnnnnnnnnnnnnnnnnnnnnnnnnnnnnnnnnnnnnnnnnnnnnnnnnnnnnnnnnnnnnnnnnnnnnnnnnnnnnnnnnnnnnnnnnnnnnnnnnnnnnnnnnnnnnnnnnnnnnnnnnnnnnnnnnnnnnnnnnnnnnnnnnnnnnnnnnnnnnnnnnnnnnnnnnnnnnnnnnnnnnnnnnnnnnnnnnnnnnnnnnnnnnnnnnnnnnnnnnnnnnnnnnnnnnnnnnnnnnnnnnnnnnnnnnnnnnnnnnnnnnnnnnnnnnnnnnnnnnnnnnnnnnnnnnnnnnnnnnnnnnnnnnnnnnnnnnnnnnnnnnnnnnnnnnnnnnnnnnnnnnnnnnnnnnnnnnnnnnnnnnnnnnnnnnnnnnnnnnnnnnnnnnnnnnnnnnnnnnnnnnnnnnnnnnnnnnnnnnnnnnnnnnnnnnnnnnnnnnnnnnnnnnnnnnnnnnnnnnnnnnnnnnnnnnnnnnnnnnnnnnnnnnnnnnnnnnnnnnnnnnnnnnnnnnnnnnnnnnnnnnnnnnnnnnnnnnnnnnnnnnnnnnnnnnnnnnnnnnnnnnnnnnnnnnnnnnnnnnnnnnnnnnnnnnnnnnnnnnnnnnnnnnnnnnnnnnnnnnnnnnnnnnnnnnnnnnnnnnnnnnnnnnnnnnnnnnnnnnnnnnnnnnnnnnnnnnnnnnnnnnnnnnnnnnnnnnnnnnnnnnnnnnnnnnnnnnnnnnnnnnnnnnnnnnnnnnnnnnnnnnnnnnnnnnnnnnnnnnnnnnnnnnnnnnnnnnnnnnnnnnnnnnnnnnnnnnnnnnnnnnnnnnnnnnnnnnnnnnnnnnnnnnnnnnnnnnnnnnnnnnnnnnnnnnnnnnnnnnnnnnnnnnnnnnnnnnnnnnnnnnnnnnnnnnnnnnnnnnnnnnnnnnnnnnnnnnnnnnnnnnnnnnnnnnnnnnnnnnnnnnnnnnnnnnnnnnnnnnnnnnnnnnnnnnnnnnnnnnnnnnnnnnnnnnnnnnnnnnnnnnnnnnnnnnnnnnnnnnnnnnnnnnnnnnnnnnnnnnnnnnnnnnnnnnnnnnnnnnnnnnnnnnnnnnnnnnnnnnnnnnnnnnnnnnnnnnnnnnnnnnnnnnnnnnnnnnnnnnnnnnnnnnnnnnnnnnnnnnnnnnnnnnnnnnnnnnnnnnnnnnnnnnnnnnnnnnnnnnnnnnnnnnnnnnnnnnnnnnnnnnnnnnnnnnnnnnnnnnnnnnnnnnnnnnnnnnnnnnnnnnnnnnnnnnnnnnnnnnnnnnnnnnnnnnnnnnnnnnnnnnnnnnnnnnnnnnnnnnnnnnnnnnnnnnnnnnnnnnnnnnnnnnnnnnnnnnnnnnnnnnnnnnnnnnnnnnnnnnnnnnnnnnnnnnnnnnnnnnnnnnnnnnnnnnnnnnnnnnnnnnnnnnnnnnnnnnnnnnnnnnnnnnnnnnnnnnnnnnnnnnnnnnnnnnnnnnnnnnnnnnnnnnnnnnnnnnnnnnnnnnnnnnnnnnnnnnnnnnnnnnnnnnnnnnnnnnnnnnnnnnnnnnnnnnnnnnnnnnnnnnnnnnnnnnnnnnnnnnnnnnnnnnnnnnnnnnnnnnnnnnnnnnnnnnnnnnnnnnnnnnnnnnnnnnnnnnnnnnnnnnnnnnnnnnnnnnnnnnnnnnnnnnnnnnnnnnnnnnnnnnnnnnnnnnnnnnnnnnnnnnnnnnnnnnnnnnnnnnnnnnnnnnnnnnnnnnnnnnnnnnnnnnnnnnnnnnnnnnnnnnnnnnnnnnnnnnnnnnnnnnnnnnnnnnnnnnnnnnnnnnnnnnnnnnnnnnnnnnnnnnnnnnnnnnnnnnnnnnnnnnnnnnnnnnnnnnnnnnnnnnnnnnnnnnnnnnnnnnnnnnnnnnnnnnnnnnnnnnnnnnnnnnnnnnnnnnnnnnnnnnnnnnnnnnnnnnnnnnnnnnnnnnnnnnnnnnnnnnnnnnnnnnnnnnnnnnnnnnnnnnnnnnnnnnnnnnnnnnnnnnnnnnnnnnnnnnnnnnnnnnnnnnnnnnnnnnnnnnnnnnnnnnnnnnnnnnnnnnnnnnnnnnnnnnnnnnnnnnnnnnnnnnnnnnnnnnnnnnnnnnnnnnnnnnnnnnnnnnnnnnnnnnnnnnnnnnnnnnnnnnnnnnnnnnnnnnnnnnnnnnnnnnnnnnnnnnnnnnnnnnnnnnnnnnnnnnnnnnnnnnnnnnnnnnnnnnnnnnnnnnnnnnnnnnnnnnnnnnnnnnnnnnnnnnnnnnnnnnnnnnnnnnnnnnnnnnnnnnnnnnnnnnnnnnnnnnnnnnnnnnnnnnnnnnnnnnnnnnnnnnnnnnnnnnnnnnnnnnnnnnnnnnnnnnnnnnnnnnnnnnnnnnnnnnnnnnnnnnnnnnnnnnnnnnnnnnnnnnnnnnnnnnnnnnnnnnnnnnnnnnnnnnnnnnnnnnnnnnnnnnnnnnnnnnnnnnnnnnnnnnnnnnnnnnnnnnnnnnnnnnnnnnnnnnnnnnnnnnnnnnnnnnnnnnnnnnnnnnnnnnnnnnnnnnnnnnnnnnnnnnnnnnnnnnnnnnnnnnnnnnnnnnnnnnnnnnnnnnnnnnnnnnnnnnnnnnnnnnnnnnnnnnnnnnnnnnnnnnnnnnnnnnnnnnnnnnnnnnnnnnnnnnnnnnnnnnnnnnnnnnnnnnnnnnnnnnnnnnnnnnnnnnnnnnnnnnnnnnnnnnnnnnnnnnnnnnnnnnnnnnnnnnnnnnnnnnnnnnnnnnnnnnnnnnnnnnnnnnnnnnnnnnnnnnnnnnnnnnnnnnnnnnnnnnnnnnnnnnnnnnnnnnnnnnnnnnnnnnnnnnnnnnnnnnnnnnnnnnnnnnnnnnnnnnnnnnnnnnnnnnnnnnnnnnnnnnnnnnnnnnnnnnnnnnnnnnnnnnnnnnnnnnnnnnnnnnnnnnnnnnnnnnnnnnnnnnnnnnnnnnnnnnnnnnnnnnnnnnnnnnnnnnnnnnnnnnnnnnnnnnnnnnnnnnnnnnnnnnnnnnnnnnnnnnnnnnnnnnnnnnnnnnnnnnnnnnnnnnnnnnnnnnnnnnnnnnnnnnnnnnnnnnnnnnnnnnnnnnnnnnnnnnnnnnnnnnnnnnnnnnnnnnnnnnnnnnnnnnnnnnnnnnnnnnnnnnnnnnnnnnnnnnnnnnnnnnnnnnnnnnnnnnnnnnnnnnnnnnnnnnnnnnnnnnnnnnnnnnnnnnnnnnnnnnnnnnnnnnnnnnnnnnnnnnnnnnnnnnnnnnnnnnnnnnnnnnnnnnnnnnnnnnnnnnnnnnnnnnnnnnnnnnnnnnnnnnnnnnnnnnnnnnnnnnnnnnnnnnnnnnnnnnnnnnnnnnnnnnnnnnnnnnnnnnnnnnnnnnnnnnnnnnnnnnnnnnnnnnnnnnnnnnnnnnnnnnnnnnnnnnnnnnnnnnnnnnnnnnnnnnnnnnnnnnnnnnnnnnnnnnnnnnnnnnnnnnnnnnnnnnnnnnnnnnnnnnnnnnnnnnnnnnnnnnnnnnnnnnnnnnnnnnnnnnnnnnnnnnnnnnnnnnnnnnnnnnnnnnnnnnnnnnnnnnnnnnnnnnnnnnnnnnnnnnnnnnnnnnnnnnnnnnnnnnnnnnnnnnnnnnnnnnnnnnnnnnnnnnnnnnnnnnnnnnnnnnnnnnnnnnnnnnnnnnnnnnnnnnnnnnnnnnnnnnnnnnnnnnnnnnnnnnnnnnnnnnnnnnnnnnnnnnnnnnnnnnnnnnnnnnnnnnnnnnnnnnnnnnnnnnnnnnnnnnnnnnnnnnnnnnnnnnnnnnnnnnnnnnnnnnnnnnnnnnnnnnnnnnnnnnnnnnnnnnnnnnnnnnnnnnnnnnnnnnnnnnnnnnnnnnnnnnnnnnnnnnnnnnnnnnnnnnnnnnnnnnnnnnnnnnnnnnnnnnnnnnnnnnnnnnnnnnnnnnnnnnnnnnnnnnnnnnnnnnnnnnnnnnnnnnnnnnnnnnnnnnnnnnnnnnnnnnnnnnnnnnnnnnnnnnnnnnnnnnnnnnnnnnnnnnnnnnnnnnnnnnnnnnnnnnnnnnnnnnnnnnnnnnnnnnnnnnnnnnnnnnnnnnnnnnnnnnnnnnnnnnnnnnnnnnnnnnnnnnnnnnnnnnnnnnnnnnnnnnnnnnnnnnnnnnnnnnnnnnnnnnnnnnnnnnnnnnnnnnnnnnnnnnnnnnnnnnnnnnnnnnnnnnnnnnnnnnnnnnnnnnnnnnnnnnnnnnnnnnnnnnnnnnnnnnnnnnnnnnnnnnnnnnnnnnnnnnnnnnnnnnnnnnnnnnnnnnnnnnnnnnnnnnnnnnnnnnnnnnnnnnnnnnnnnnnnnnnnnnnnnnnnnnnnnnnnnnnnnnnnnnnnnnnnnnnnnnnnnnnnnnnnnnnnnnnnnnnnnnnnnnnnnnnnnnnnnnnnnnnnnnnnnnnnnnnnnnnnnnnnnnnnnnnnnnnnnnnnnnnnnnnnnnnnnnnnnnnnnnnnnnnnnnnnnnnnnnnnnnnnnnnnnnnnnnnnnnnnnnnnnnnnnnnnnnnnnnnnnnnnnnnnnnnnnnnnnnnnnnnnnnnnnnnnnnnnnnnnnnnnnnnnnnnnnnnnnnnnnnnnnnnnnnnnnnnnnnnnnnnnnnnnnnnnnnnnnnnnnnnnnnnnnnnnnnnnnnnnnnnnnnnnnnnnnnnnnnnnnnnnnnnnnnnnnnnnnnnnnnnnnnnnnnnnnnnnnnnnnnnnnnnnnnnnnnnnnnnnnnnnnnnnnnnnnnnnnnnnnnnnnnnnnnnnnnnnnnnnnnnnnnnnnnnnnnnnnnnnnnnnnnnnnnnnnnnnnnnnnnnnnnnnnnnnnnnnnnnnnnnnnnnnnnnnnnnnnnnnnnnnnnnnnnnnnnnnnnnnnnnnnnnnnnnnnnnnnnnnnnnnnnnnnnnnnnnnnnnnnnnnnnnnnnnnnnnnnnnnnnnnnnnnnnnnnnnnnnnnnnnnnnnnnnnnnnnnnnnnnnnnnnnnnnnnnnnnnnnnnnnnnnnnnnnnnnnnnnnnnnnnnnnnnnnnnnnnnnnnnnnnnnnnnnnnnnnnnnnnnnnnnnnnnnnnnnnnnnnnnnnnnnnnnnnnnnnnnnnnnnnnnnnnnnnnnnnnnnnnnnnnnnnnnnnnnnnnnnnnnnnnnnnnnnnnnnnnnnnnnnnnnnnnnnnnnnnnnnnnnnnnnnnnnnnnnnnnnnnnnnnnnnnnnnnnnnnnnnnnnnnnnnnnnnnnnnnnnnnnnnnnnnnnnnnnnnnnnnnnnnnnnnnnnnnnnnnnnnnnnnnnnnnnnnnnnnnnnnnnnnnnnnnnnnnnnnnnnnnnnnnnnnnnnnnnnnnnnnnnnnnnnnnnnnnnnnnnnnnnnnnnnnnnnnnnnnnnnnnnnnnnnnnnnnnnnnnnnnnnnnnnnnnnnnnnnnnnnnnnnnnnnnnnnnnnnnnnnnnnnnnnnnnnnnnnnnnnnnnnnnnnnnnnnnnnnnnnnnnnnnnnnnnnnnnnnnnnnnnnnnnnnnnnnnnnnnnnnnnnnnnnnnnnnnnnnnnnnnnnnnnnnnnnnnnnnnnnnnnnnnnnnnnnnnnnnnnnnnnnnnnnnnnnnnnnnnnnnnnnnnnnnnnnnnnnnnnnnnnnnnnnnnnnnnnnnnnnnnnnnnnnnnnnnnnnnnnnnnnnnnnnnnnnnnnnnnnnnnnnnnnnnnnnnnnnnnnnnnnnnnnnnnnnnnnnnnnnnnnnnnnnnnnnnnnnnnnnnnnnnnnnnnnnnnnnnnnnnnnnnnnnnnnnnnnnnnnnnnnnnnnnnnnnnnnnnnnnnnnnnnnnnnnnnnnnnnnnnnnnnnnnnnnnnnnnnnnnnnnnnnnnnnnnnnnnnnnnnnnnnnnnnnnnnnnnnnnnnnnnnnnnnnnnnnnnnnnnnnnnnnnnnnnnnnnnnnnnnnnnnnnnnnnnnnnnnnnnnnnnnnnnnnnnnnnnnnnnnnnnnnnnnnnnnnnnnnnnnnnnnnnnnnnnnnnnnnnnnnnnnnnnnnnnnnnnnnnnnnnnnnnnnnnnnnnnnnnnnnnnnnnnnnnnnnnnnnnnnnnnnnnnnnnnnnnnnnnnnnnnnnnnnnnnnnnnnnnnnnnnnnnnnnnnnnnnnnnnnnnnnnnnnnnnnnnnnnnnnnnnnnnnnnnnnnnnnnnnnnnnnnnnnnnnnnnnnnnnnnnnnnnnnnnnnnnnnnnnnnnnnnnnnnnnnnnnnnnnnnnnnnnnnnnnnnnnnnnnnnnnnnnnnnnnnnnnnnnnnnnnnnnnnnnnnnnnnnnnnnnnnnnnnnnnnnnnnnnnnnnnnnnnnnnnnnnnnnnnnnnnnnnnnnnnnnnnnnnnnnnnnnnnnnnnnnnnnnnnnnnnnnnnnnnnnnnnnnnnnnnnnnnnnnnnnnnnnnnnnnnnnnnnnnnnnnnnnnnnnnnnnnnnnnnnnnnnnnnnnnnnnnnnnnnnnnnnnnnnnnnnnnnnnnnnnnnnnnnnnnnnnnnnnnnnnnnnnnnnnnnnnnnnnnnnnnnnnnnnnnnnnnnnnnnnnnnnnnnnnnnnnnnnnnnnnnnnnnnnnnnnnnnnnnnnnnnnnnnnnnnnnnnnnnnnnnnnnnnnnnnnnnnnnnnnnnnnnnnnnnnnnnnnnnnnnnnnnnnnnnnnnnnnnnnnnnnnnnnnnnnnnnnnnnnnnnnnnnnnnnnnnnnnnnnnnnnnnnnnnnnnnnnnnnnnnnnnnnnnnnnnnnnnnnnnnnnnnnnnnnnnnnnnnnnnnnnnnnnnnnnnnnnnnnnnnnnnnnnnnnnnnnnnnnnnnnnnnnnnnnnnnnnnnnnnnnnnnnnnnnnnnnnnnnnnnnnnnnnnnnnnnnnnnnctccttaacaaacgtcggtgaagccacttgttgtttgagtggctactggaacgtgcatcggacagataccagatagacgtccggtgaagccacttgctgtttgagtggctactggaagtttttatgcacggtgttgccccagtgtgcagatgaagccacttgttgtttaagtggctactgaaactaattgatgcagtctgcggcgagcggcgcaggtgaagccacttgttgtttgagtggctactggaacttgaacgtaaatacagtttgtgatggtactggtgaagccatttgttgtttgagtggctactgaaagatgaatggattgattggcaattgctagccgctcacttgatgactggctattgaagaaagacgaagtcttatcaagccgcaatttcactgctttcagaaagcgtggctcaaaaactcaaatgaaagcaaatcagcagtagtatcagaaatgttcagatcagcagaacaggctaatttttatcagcgactcaaagcgcatttgagtgaaccgactgcgcctttgctgcttgaaggcacaacaggtcttggcaagacaagagcctacttagcagcagttgctgatgctgttgctcaaggaaagaaagttgcgttgattcttcccacgcacatgctgattgaacagttgttgaattcagcagatcgcaaagcagtcttaccagattctgtttcagttcaagcgtttttgcctagatcacgatttgagtcaaagcaagactacgctgcatacagagaatcagcacgatcagccgatgtgatgttagcaacaagcgcatctgtgatcattgatcagcggttgagaggtgattacaacgggtctactacacgagaagttctgatttttgacgaagcagatcagttacctgacgcagcagcacttcagtctgattgtgaaatcacaggcaaagtacttgcggaatacggtatcaaagcaacttcagcaaagcaagcagcgacagaagtcctttcaaagcgagatgtgccacctgagatccgagcgatagcgatgttgatctttgaagagatcggcgaacccgcttggtataaaagcataggcttgactgaagacggtggtgtcatgctgtatcaccgactgcctgggcgaatgctaaagcgtatttctaatcagaaaaatgtagcattcatttcagcaacactgagcgtgggtggcacttttgatgactttaagcgatctatgggcattgctcatcagagtcatttgtcgggaatcattgaacccaagaatcacggcaatgttcgctttcatgtcgctgatcttgaagtcaacacccaagaatggttagcaggaacactgaaggcaatacaggaagcaccgaaaccctgtcttgttgtgacaccaagccacgatcttgctgaaacactgaacggtttgacgcataaaagcgtattgcgaagcagagaagaaacatcgtctcaagcagcagcgaggatgggcgatgctgaaacactgattgcagcaggcgcatgggcagggcttgatacaccgattccctgggcaagtatcgtcgtgccaagaattccctatgaccgacccatcattctagatgatcagattgaaagcagttttcttcacacacgcaacactgcgatccgaagaatgagacaggtgattgggcgtgggctcagaacgccagaagcgcactgcgaaatctatattcttgatgggcgttataaaaatatagagtcgttcatacctcagcgattccaacaacagtggaaagaaaagggtgtcgttgaaggcaaacgcatggagatcacgctgtcaaaggctgaacgagatccttctgtgcggagaaaagcacttgctcactatggcaaaaagtgtgctgtctgtgattttgagccaagagtggacagtcaacttgaagttcaccatctgttcccgttagcaaatggtggtgaacgagtcacatcaatctcagatgttgtcgtgctttgcgcaaactgtcatcggttagcgcactctagcggggtgacaccgctgtctgttgaggtgatgcggactttgaacgcatcttgaattcgctacaccaaatcaactcgcttccaataagcaggacggttgttccagcactttgtcttgatcttctcgtagccgtgcgatcgcatcgtttgcgagaacaacttgctgatgcctttgctgtcgtatgctgaatcagcgtgaaagtaggtctggaagtgcccgattgcgtctgtaccaaaagagtttgcgatgagccagtattcaggcttcactgaatttataacatcagtcaaatgctcaacaggtctgtcaaagtgttcaaaatattcagacgcaaagaccaaatctgctcttacccttcggtgacttggaacaactttgaatccaacacgcttgcccaggcgtgcagcaagatttgcttgagccgtgtctggtagattcgtaccagttacttttgcagaggggaacatctccttcgatgctgctgtcgtgtagccaaagccacagcccaaatcaagaattgactgtgcttgaatgtctgagacgatacttctagtgaaaagactgctgtctttaccaatatcccgcaggtatcgtcttgagtagcgtatccaacagagccaaagctcgcagacatagtaggtgtctgagtaaactgaaaaatcaggctggtttcgcttcagtgaagtctgccaacgcttcttcaaatctgtgattcgcttcagatgcttcgggttgaactcacgcccgtcatgagactgaatgtgactcgtagcaatctggagcgcaaggtccgtgtctatgtctgtcacagtagcgcaatcagcaagaaactggatcaagtctgattttgaaatcgcatctagtgttgccatgcgtcctcgcacctctactcaacgcccattgaggcttaaagacagaaatcccagccaggaatcggttttacacctaaaacgctttgagatttacagatactaatcttttccgaacactgactgctgagtttctgaacacgatttccgacaagcatctacgcagtgcgaatcatcgtgcagagcaccacgatttctgaacacgccgaatcttgcgaaatagagactgaaagcccacaactcatctgacttttcgtcatcgtctttatgcgaaatggtacttcaagccgattctaatttccacacatttctgctgtcagttgcccatcgtgcagcctgaacgaactcacgttgctcttccgaaagtaccgaatagaacttgctgacagaagcaatcgtttcaagtacatcgtcgggattcgtgatgtgcttctgcgcagttaacattgactcaagaagattcaatcgttcttcaattctttgtctgatggtactcatggcaaaggtgctcctcagggtttgagtgaagtgtcagggatcagaacaatcaataagttcgggtgtcgtgaaagcattcgtttgacggttgaagtgaactcacgcaaatgtgcgtctgtcacttgtgtcttcgtgtcagcagaaatctgagtgattgcaagtgcagccttctcaactcgtcgcagatcggactctgaaagcttcatgctgctaatggtgctgattgagaagctgcgactgctgttggtacctgctgaagtctgtcggctgaagccctgctgcttatgtcaacacgac

SEQ ID NO: 161 - DNA, 13171 bp, Artificial Sequence; identical to SEQ ID NO: 3
  Synthetic Oligonucleotide
  misc_feature (1)..(6491): n is a, c, g, or t

SEQ ID NO: 162 - DNA, 13149 bp, Artificial Sequence
  Synthetic Oligonucleotide
  misc_feature (1)..(9998): n is a, c, g, or t
nnnnnnnnnnnnnnnnnnnnnnnnnnnnnnnnnnnnnnnnnnnnnnnnnnnnnnnnnnnnnnnnnnnnnnnnnnnnnnnnnnnnnnnnnnnnnnnnnnnnnnnnnnnnnnnnnnnnnnnnnnnnnnnnnnnnnnnnnnnnnnnnnnnnnnnnnnnnnnnnnnnnnnnnnnnnnnnnnnnnnnnnnnnnnnnnnnnnnnnnnnnnnnnnnnnnnnnnnnnnnnnnnnnnnnnnnnnnnnnnnnnnnnnnnnnnnnnnnnnnnnnnnnnnnnnnnnnnnnnnnnnnnnnnnnnnnnnnnnnnnnnnnnnnnnnnnnnnnnnnnnnnnnnnnnnnnnnnnnnnnnnnnnnnnnnnnnnnnnnnnnnnnnnnnnnnnnnnnnnnnnnnnnnnnnnnnnnnnnnnnnnnnnnnnnnnnnnnnnnnnnnnnnnnnnnnnnnnnnnnnnnnnnnnnnnnnnnnnnnnnnnnnnnnnnnnnnnnnnnnnnnnnnnnnnnnnnnnnnnnnnnnnnnnnnnnnnnnnnnnnnnnnnnnnnnnnnnnnnnnnnnnnnnnnnnnnnnnnnnnnnnnnnnnnnnnnnnnnnnnnnnnnnnnnnnnnnnnnnnnnnnnnnnnnnnnnnnnnnnnnnnnnnnnnnnnnnnnnnnnnnnnnnnnnnnnnnnnnnnnnnnnnnnnnnnnnnnnnnnnnnnnnnnnnnnnnnnnnnnnnnnnnnnnnnnnnnnnnnnnnnnnnnnnnnnnnnnnnnnnnnnnnnnnnnnnnnnnnnnnnnnnnnnnnnnnnnnnnnnnnnnnnnnnnnnnnnnnnnnnnnnnnnnnnnnnnnnnnnnnnnnnnnnnnnnnnnnnnnnnnnnnnnnnnnnnnnnnnnnnnnnnnnnnnnnnnnnnnnnnnnnnnnnnnnnnnnnnnnnnnnnnnnnnnnnnnnnnnnnnnnnnnnnnnnnnnnnnnnnnnnnnnnnnnnnnnnnnnnnnnnnnnnnnnnnnnnnnnnnnnnnnnnnnnnnnnnnnnnnnnnnnnnnnnnnnnnnnnnnnnnnnnnnnnnnnnnnnnnnnnnnnnnnnnnnnnnnnnnnnnnnnnnnnnnnnnnnnnnnnnnnnnnnnnnnnnnnnnnnnnnnnnnnnnnnnnnnnnnnnnnnnnnnnnnnnnnnnnnnnnnnnnnnnnnnnnnnnnnnnnnnnnnnnnnnnnnnnnnnnnnnnnnnnnnnnnnnnnnnnnnnnnnnnnnnnnnnnnnnnnnnnnnnnnnnnnnnnnnnnnnnnnnnnnnnnnnnnnnnnnnnnnnnnnnnnnnnnnnnnnnnnnnnnnnnnnnnnnnnnnnnnnnnnnnnnnnnnnnnnnnnnnnnnnnnnnnnnnnnnnnnnnnnnnnnnnnnnnnnnnnnnnnnnnnnnnnnnnnnnnnnnnnnnnnnnnnnnnnnnnnnnnnnnnnnnnnnnnnnnnnnnnnnnnnnnnnnnnnnnnnnnnnnnnnnnnnnnnnnnnnnnnnnnnnnnnnnnnnnnnnnnnnnnnnnnnnnnnnnnnnnnnnnnnnnnnnnnnnnnnnnnnnnnnnnnnnnnnnnnnnnnnnnnnnnnnnnnnnnnnnnnnnnnnnnnnnnnnnnnnnnnnnnnnnnnnnnnnnnnnnnnnnnnnnnnnnnnnnnnnnnnnnnnnnnnnnnnnnnnnnnnnnnnnnnnnnnnnnnnnnnnnnnnnnnnnnnnnnnnnnnnnnnnnnnnnnnnnnnnnnnnnnnnnnnnnnnnnnnnnnnnnnnnnnnnnnnnnnnnnnnnnnnnnnnnnnnnnnnnnnnnnnnnnnnnnnnnnnnnnnnnnnnnnnnnnnnnnnnnnnnnnnnnnnnnnnnnnnnnnnnnnnnnnnnnnnnnnnnnnnnnnnnnnnnnnnnnnnnnnnnnnnnnnnnnnnnnnnnnnnnnnnnnnnnnnnnnnnnnnnnnnnnnnnnnnnnnnnnnnnnnnnnnnnnnnnnnnnnnnnnnnnnnnnnnnnnnnnnnnnnnnnnnnnnnnnnnnnnnnnnnnnnnnnnnnnnnnnnnnnnnnnnnnnnnnnnnnnnnnnnnnnnnnnnnnnnnnnnnnnnnnnnnnnnnnnnnnnnnnnnnnnnnnnnnnnnnnnnnnnnnnnnnnnnnnnnnnnnnnnnnnnnnnnnnnnnnnnnnnnnnnnnnnnnnnnnnnnnnnnnnnnnnnnnnnnnnnnnnnnnnnnnnnnnnnnnnnnnnnnnnnnnnnnnnnnnnnnnnnnnnnnnnnnnnnnnnnnnnnnnnnnnnnnnnnnnnnnnnnnnnnnnnnnnnnnnnnnnnnnnnnnnnnnnnnnnnnnnnnnnnnnnnnnnnnnnnnnnnnnnnnnnnnnnnnnnnnnnnnnnnnnnnnnnnnnnnnnnnnnnnnnnnnnnnnnnnnnnnnnnnnnnnnnnnnnnnnnnnnnnnnnnnnnnnnnnnnnnnnnnnnnnnnnnnnnnnnnnnnnnnnnnnnnnnnnnnnnnnnnnnnnnnnnnnnnnnnnnnnnnnnnnnnnnnnnnnnnnnnnnnnnnnnnnnnnnnnnnnnnnnnnnnnnnnnnnnnnnnnnnnnnnnnnnnnnnnnnnnnnnnnnnnnnnnnnnnnnnnnnnnnnnnnnnnnnnnnnnnnnnnnnnnnnnnnnnnnnnnnnnnnnnnnnnnnnnnnnnnnnnnnnnnnnnnnnnnnnnnnnnnnnnnnnnnnnnnnnnnnnnnnnnnnnnnnnnnnnnnnnnnnnnnnnnnnnnnnnnnnnnnnnnnnnnnnnnnnnnnnnnnnnnnnnnnnnnnnnnnnnnnnnnnnnnnnnnnnnnnnnnnnnnnnnnnnnnnnnnnnnnnnnnnnnnnnnnnnnnnnnnnnnnnnnnnnnnnnnnnnnnnnnnnnnnnnnnnnnnnnnnnnnnnnnnnnnnnnnnnnnnnnnnnnnnnnnnnnnnnnnnnnnnnnnnnnnnnnnnnnnnnnnnnnnnnnnnnnnnnnnnnnnnnnnnnnnnnnnnnnnnnnnnnnnnnnnnnnnnnnnnnnnnnnnnnnnnnnnnnnnnnnnnnnnnnnnnnnnnnnnnnnnnnnnnnnnnnnnnnnnnnnnnnnnnnnnnnnnnnnnnnnnnnnnnnnnnnnnnnnnnnnnnnnnnnnnnnnnnnnnnnnnnnnnnnnnnnnnnnnnnnnnnnnnnnnnnnnnnnnnnnnnnnnnnnnnnnnnnnnnnnnnnnnnnnnnnnnnnnnnnnnnnnnnnnnnnnnnnnnnnnnnnnnnnnnnnnnnnnnnnnnnnnnnnnnnnnnnnnnnnnnnnnnnnnnnnnnnnnnnnnnnnnnnnnnnnnnnnnnnnnnnnnnnnnnnnnnnnnnnnnnnnnnnnnnnnnnnnnnnnnnnnnnnnnnnnnnnnnnnnnnnnnnnnnnnnnnnnnnnnnnnnnnnnnnnnnnnnnnnnnnnnnnnnnnnnnnnnnnnnnnnnnnnnnnnnnnnnnnnnnnnnnnnnnnnnnnnnnnnnnnnnnnnnnnnnnnnnnnnnnnnnnnnnnnnnnnnnnnnnnnnnnnnnnnnnnnnnnnnnnnnnnnnnnnnnnnnnnnnnnnnnnnnnnnnnnnnnnnnnnnnnnnnnnnnnnnnnnnnnnnnnnnnnnnnnnnnnnnnnnnnnnnnnnnnnnnnnnnnnnnnnnnnnnnnnnnnnnnnnnnnnnnnnnnnnnnnnnnnnnnnnnnnnnnnnnnnnnnnnnnnnnnnnnnnnnnnnnnnnnnnnnnnnnnnnnnnnnnnnnnnnnnnnnnnnnnnnnnnnnnnnnnnnnnnnnnnnnnnnnnnnnnnnnnnnnnnnnnnnnnnnnnnnnnnnnnnnnnnnnnnnnnnnnnnnnnnnnnnnnnnnnnnnnnnnnnnnnnnnnnnnnnnnnnnnnnnnnnnnnnnnnnnnnnnnnnnnnnnnnnnnnnnnnnnnnnnnnnnnnnnnnnnnnnnnnnnnnnnnnnnnnnnnnnnnnnnnnnnnnnnnnnnnnnnnnnnnnnnnnnnnnnnnnnnnnnnnnnnnnnnnnnnnnnnnnnnnnnnnnnnnnnnnnnnnnnnnnnnnnnnnnnnnnnnnnnnnnnnnnnnnnnnnnnnnnnnnnnnnnnnnnnnnnnnnnnnnnnnnnnnnnnnnnnnnnnnnnnnnnnnnnnnnnnnnnnnnnnnnnnnnnnnnnnnnnnnnnnnnnnnnnnnnnnnnnnnnnnnnnnnnnnnnnnnnnnnnnnnnnnnnnnnnnnnnnnnnnnnnnnnnnnnnnnnnnnnnnnnnnnnnnnnnnnnnnnnnnnnnnnnnnnnnnnnnnnnnnnnnnnnnnnnnnnnnnnnnnnnnnnnnnnnnnnnnnnnnnnnnnnnnnnnnnnnnnnnnnnnnnnnnnnnnnnnnnnnnnnnnnnnnnnnnnnnnnnnnnnnnnnnnnnnnnnnnnnnnnnnnnnnnnnnnnnnnnnnnnnnnnnnnnnnnnnnnnnnnnnnnnnnnnnnnnnnnnnnnnnnnnnnnnnnnnnnnnnnnnnnnnnnnnnnnnnnnnnnnnnnnnnnnnnnnnnnnnnnnnnnnnnnnnnnnnnnnnnnnnnnnnnnnnnnnnnnnnnnnnnnnnnnnnnnnnnnnnnnnnnnnnnnnnnnnnnnnnnnnnnnnnnnnnnnnnnnnnnnnnnnnnnnnnnnnnnnnnnnnnnnnnnnnnnnnnnnnnnnnnnnnnnnnnnnnnnnnnnnnnnnnnnnnnnnnnnnnnnnnnnnnnnnnnnnnnnnnnnnnnnnnnnnnnnnnnnnnnnnnnnnnnnnnnnnnnnnnnnnnnnnnnnnnnnnnnnnnnnnnnnnnnnnnnnnnnnnnnnnnnnnnnnnnnnnnnnnnnnnnnnnnnnnnnnnnnnnnnnnnnnnnnnnnnnnnnnnnnnnnnnnnnnnnnnnnnnnnnnnnnnnnnnnnnnnnnnnnnnnnnnnnnnnnnnnnnnnnnnnnnnnnnnnnnnnnnnnnnnnnnnnnnnnnnnnnnnnnnnnnnnnnnnnnnnnnnnnnnnnnnnnnnnnnnnnnnnnnnnnnnnnnnnnnnnnnnnnnnnnnnnnnnnnnnnnnnnnnnnnnnnnnnnnnnnnnnnnnnnnnnnnnnnnnnnnnnnnnnnnnnnnnnnnnnnnnnnnnnnnnnnnnnnnnnnnnnnnnnnnnnnnnnnnnnnnnnnnnnnnnnnnnnnnnnnnnnnnnnnnnnnnnnnnnnnnnnnnnnnnnnnnnnnnnnnnnnnnnnnnnnnnnnnnnnnnnnnnnnnnnnnnnnnnnnnnnnnnnnnnnnnnnnnnnnnnnnnnnnnnnnnnnnnnnnnnnnnnnnnnnnnnnnnnnnnnnnnnnnnnnnnnnnnnnnnnnnnnnnnnnnnnnnnnnnnnnnnnnnnnnnnnnnnnnnnnnnnnnnnnnnnnnnnnnnnnnnnnnnnnnnnnnnnnnnnnnnnnnnnnnnnnnnnnnnnnnnnnnnnnnnnnnnnnnnnnnnnnnnnnnnnnnnnnnnnnnnnnnnnnnnnnnnnnnnnnnnnnnnnnnnnnnnnnnnnnnnnnnnnnnnnnnnnnnnnnnnnnnnnnnnnnnnnnnnnnnnnnnnnnnnnnnnnnnnnnnnnnnnnnnnnnnnnnnnnnnnnnnnnnnnnnnnnnnnnnnnnnnnnnnnnnnnnnnnnnnnnnnnnnnnnnnnnnnnnnnnnnnnnnnnnnnnnnnnnnnnnnnnnnnnnnnnnnnnnnnnnnnnnnnnnnnnnnnnnnnnnnnnnnnnnnnnnnnnnnnnnnnnnnnnnnnnnnnnnnnnnnnnnnnnnnnnnnnnnnnnnnnnnnnnnnnnnnnnnnnnnnnnnnnnnnnnnnnnnnnnnnnnnnnnnnnnnnnnnnnnnnnnnnnnnnnnnnnnnnnnnnnnnnnnnnnnnnnnnnnnnnnnnnnnnnnnnnnnnnnnnnnnnnnnnnnnnnnnnnnnnnnnnnnnnnnnnnnnnnnnnnnnnnnnnnnnnnnnnnnnnnnnnnnnnnnnnnnnnnnnnnnnnnnnnnnnnnnnnnnnnnnnnnnnnnnnnnnnnnnnnnnnnnnnnnnnnnnnnnnnnnnnnnnnnnnnnnnnnnnnnnnnnnnnnnnnnnnnnnnnnnnnnnnnnnnnnnnnnnnnnnnnnnnnnnnnnnnnnnnnnnnnnnnnnnnnnnnnnnnnnnnnnnnnnnnnnnnnnnnnnnnnnnnnnnnnnnnnnnnnnnnnnnnnnnnnnnnnnnnnnnnnnnnnnnnnnnnnnnnnnnnnnnnnnnnnnnnnnnnnnnnnnnnnnnnnnnnnnnnnnnnnnnnnnnnnnnnnnnnnnnnnnnnnnnnnnnnnnnnnnnnnnnnnnnnnnnnnnnnnnnnnnnnnnnnnnnnnnnnnnnnnnnnnnnnnnnnnnnnnnnnnnnnnnnnnnnnnnnnnnnnnnnnnnnnnnnnnnnnnnnnnnnnnnnnnnnnnnnnnnnnnnnnnnnnnnnnnnnnnnnnnnnnnnnnnnnnnnnnnnnnnnnnnnnnnnnnnnnnnnnnnnnnnnnnnnnnnnnnnnnnnnnnnnnnnnnnnnnnnnnnnnnnnnnnnnnnnnnnnnnnnnnnnnnnnnnnnnnnnnnnnnnnnnnnnnnnnnnnnnnnnnnnnnnnnnnnnnnnnnnnnnnnnnnnnnnnnnnnnnnnnnnnnnnnnnnnnnnnnnnnnnnnnnnnnnnnnnnnnnnnnnnnnnnnnnnnnnnnnnnnnnnnnnnnnnnnnnnnnnnnnnnnnnnnnnnnnnnnnnnnnnnnnnnnnnnnnnnnnnnnnnnnnnnnnnnnnnnnnnnnnnnnnnnnnnnnnnnnnnnnnnnnnnnnnnnnnnnnnnnnnnnnnnnnnnnnnnnnnnnnnnnnnnnnnnnnnnnnnnnnnnnnnnnnnnnnnnnnnnnnnnnnnnnnnnnnnnnnnnnnnnnnnnnnnnnnnnnnnnnnnnnnnnnnnnnnnnnnnnnnnnnnnnnnnnnnnnnnnnnnnnnnnnnnnnnnnnnnnnnnnnnnnnnnnnnnnnnnnnnnnnnnnnnnnnnnnnnnnnnnnnnnnnnnnnnnnnnnnnnnnnnnnnnnnnnnnnnnnnnnnnnnnnnnnnnnnnnnnnnnnnnnnnnnnnnnnnnnnnnnnnnnnnnnnnnnnnnnnnnnnnnnnnnnnnnnnnnnnnnnnnnnnnnnnnnnnnnnnnnnnnnnnnnnnnnnnnnnnnnnnnnnnnnnnnnnnnnnnnnnnnnnnnnnnnnnnnnnnnnnnnnnnnnnnnnnnnnnnnnnnnnnnnnnnnnnnnnnnnnnnnnnnnnnnnnnnnnnnnnnnnnnnnnnnnnnnnnnnnnnnnnnnnnnnnnnnnnnnnnnnnnnnnnnnnnnnnnnnnnnnnnnnnnnnnnnnnnnnnnnnnnnnnnnnnnnnnnnnnnnnnnnnnnnnnnnnnnnnnnnnnnnnnnnnnnnnnnnnnnnnnnnnnnnnnnnnnnnnnnnnnnnnnnnnnnnnnnnnnnnnnnnnnnnnnnnnnnnnnnnnnnnnnnnnnnnnnnnnnnnnnnnnnnnnnnnnnnnnnnnnnnnnnnnnnnnnnnnnnnnnnnnnnnnnnnnnnnnnnnnnnnnnnnnnnnnnnnnnnnnnnnnnnnnnnnnnnnnnnnnnnnnnnnnnnnnnnnnnnnnnnnnnnnnnnnnnnnnnnnnnnnnnnnnnnnnnnnnnnnnnnnnnnnnnnnnnnnnnnnnnnnnnnnnnnnnnnnnnnnnnnnnnnnnnnnnnnnnnnnnnnnnnnnnnnnnnnnnnnnnnnnnnnnnnnnnnnnnnnnnnnnnnnnnnnnnnnnnnnnnnnnnnnnnnnnnnnnnnnnnnnnnnnnnnnnnnnnnnnnnnnnnnnnnnnnnnnnnnnnnnnnnnnnnnnnnnnnnnnnnnnnnnnnnnnnnnnnnnnnnnnnnnnnnnnnnnnnnnnnnnnnnnnnnnnnnnnnnnnnnnnnnnnnnnnnnnnnnnnnnnnnnnnnnnnnnnnnnnnnnnnnnnnnnnnnnnnnnnnnnnnnnnnnnnnnnnnnnnnnnnnnnnnnnnnnnnnnnnnnnnnnnnnnnnnnnnnnnnnnnnnnnnnnnnnnnnnnnnnnnnnnnnnnnnnnnnnnnnnnnnnnnnnnnnnnnnnnnnnnnnnnnnnnnnnnnnnnnnnnnnnnnnnnnnnnnnnnnnnnnnnnnnnnnnnnnnnnnnnnnnnnnnnnnnnnnnnnnnnnnnnnnnnnnnnnnnnnnnnnnnnnnnnnnnnnnnnnnnnnnnnnnnnnnnnnnnnnnnnnnnnnnnnnnnnnnnnnnnnnnnnnnnnnnnnnnnnnnnnnnnnnnnnnnnnnnnnnnnnnnnnnnnnnnnnnnnnnnnnnnnnnnnnnnnnnnnnnnnnnnnnnnnnnnnnnnnnnnnnnnnnnnnnnnnnnnnnnnnnnnnnnnnnnnnnnnnnnnnnnnnnnnnnnnnnnnnnnnnnnnnnnnnnnnnnnnnnnnnnnnnnnnnnnnnnnnnnnnnnnnnnnnnnnnnnnnnnnnnnnnnnnnnnnnnnnnnnnnnnnnnnnnnnnnnnnnnnnnnnnnnnnnnnnnnnnnnnnnnnnnnnnnnnnnnnnnnnnnnnnnnnnnnnnnnnnnnnnnnnnnnnnnnnnnnnnnnnnnnnnnnnnnnnnnnnnnnnnnnnnnnnnnnnnnnnnnnnnnnnnnnnnnnnnnnnnnnnnnnnnnnnnnnnnnnnnnnnnnnnnnnnnnnnnnnnnnnnnnnnnnnnnnnnnnnnnnnnnnnnnnnnnnnnnnnnnnnnnnnnnnnnnnnnnnnnnnnnnnnnnnnnnnnnnnnnnnnnnnnnnnnnnnnnnnnnnnnnnnnnnnnnnnnnnnnnnnnnnnnnnnnnnnnnnnnnnnnnnnnnnnnnnnnnnnnnnnnnnnnnnnnnnnnnnnnnnnnnnnnnnnnnnnnnnnnnnnnnnnnnnnnnnnnnnnnnnnnnnnnnnnnnnnnnnnnnnnnnnnnnnnnnnnnnnnnnnnnnnnnnnnnnnnnnnnnnnnnnnnnnnnnnnnnnnnnnnnnnnnnnnnnnnnnnnnnnnnnnnnnnnnnnnnnnnnnnnnnnnnnnnnnnnnnnnnnnnnnnnnnnnnnnnnnnnnnnnnnnnnnnnnnnnnnnnnnnnnnnnnnnnnnnnnnnnnnnnnnnnnnnnnnnnnnnnnnnnnnnnnnnnnnnnnnnnnnnnnnnnnnnnnnnnnnnnnnnnnnnnnnnnnnnnnnnnnnnnnnnnnnnnnnnnnnnnnnnnnnnnnnnnnnnnnnnnnnnnnnnnnnnnnnnnnnnnnnnnnnnnnnnnnnnnnnnnnnnnnnnnnnnnnnnnnnnnnnnnnnnnnnnnnnnnnnnnnnnnnnnnnnnnnnnnnnnnnnnnnnnnnnnnnnnnnnnnnnnnnnnnnnnnnnnnnnnnnnnnnnnnnnnnnnnnnnnnnnnnnnnnnnnnnnnnnnnnnnnnnnnnnnnnnnnnnnnnnnnnnnnnnnnnnnnnnnnnnnnnnnnnnnnnnnnnnnnnnnnnnnnnnnnnnnnnnnnnnnnnnnnnnnnnnnnnnnnnnnnnnnnnnnnnnnnnnnnnnnnnnnnnnnnnnnnnnnnnnnnnnnnnnnnnnnnnnnnnnnnnnnnnnnnnnnnnnnnnnnnnnnnnnnnnnnnnnnnnnnnnnnnnnnnnnnnnnnnnnnnnnnnnnnnnnnnnnnnnnnnnnnnnnnnnnnnnnnnnnnnnnnnnnnnnnnnnnnnnnnnnnnnnnnnnnnnnnnnnnnnnnnnnnnnnnnnnnnnnnnnnnnnnnnnnnnnnnnnnnnnnnnnnnnnnnnnnnnnnnnnnnnnnnnnnnnnnnnnnnnnnnnnnnnnnnnnnnnnnnnnnnnnnnnnnnnnnnnnnnnnnnnnnnnnnnnnnnnnnnnnnnnnnnnnnnnnnnnnnnnnnnnnnnnnnnnnnnnnnnnnnnnnnnnnnnnnnnnnnnnnnnnnnnnnnnnnnnnnnnnnnnnnnnnnnnnnnnnnnnnnnnnnnnnnnnnnnnnnnnnnnnnnnnnnnnnnnnnnnnnnnnnnnnnnnnnnnnnnnnnnnnnnnnnnnnnnnnnnnnnnnnnnnnnnnnnnnnnnnnnnnnnnnnnnnnnnnnnnnnnnnnnnnnnnnnnnnnnnnnnnnnnnnnnnnnnnnccccacgtcttacttggccgccaaggtgacggccagtcggcggatgcgccaagcaattggccgtgggcttagaacacctgaggcggtgtgcacggttgtggttttggatgcgcgggcacacaacttaggtcgctttgtgccagagcgttttgcggcagattggtcgtctcggcaagtgtttgacgagggtgcccgccatgcggtggtgctgtccaaagcggagcgcgaccccgctttggccaaagccgcgctcagacactacggcgctcaatgccaacaagcgggttgttccgtgacagaggcgtgtcagctggacgtgcaccaccttgaccccgtaagcgaaggcgtgcgccgcacaaccttgaaggatgtgaccgtgctgtgtgcaaaccaccaccgacaggcccaccacgacatgaaaatggggctgaacgtgtcgtagcgcaacaaaaaacccgccatacctttgggtacgcgggttttgggagttctggcaaggcctgaaacctaaatgtggtggtgataggtggacttgaaccaccgaccccagcattatgaatgctgtgctctaaccaactgagctatatcaccgagcctgaaattatagccaaaattctcagggctttggcttgccgccaaaagtttttgttagccattttgtcgcgcctgtacgacgcgccaagcccttggttattggtgtttgaaggcgggtttgcgcttgtttatgaacgcatccatgccctctttttggtcttcggttgcaaacagcgcgtggaacagacggcgctcaaaacgcacgccttcgctgaggctgccttcaaacgcttggttcaccgcttcctttgccgccatgacactggggagggagtagttgcaaatcatcagggctgcgcccaaggcctcggtcatgagttggtcatcggcgaccacgcggctcaccagtccgccgcgctcggcttctgcagcgtccatcatgcggcctgtgagggccatgtccatggccttggctttgccaacggcgcgtggcaggcgctgcgtgccacctgcgccagggataacgcccaacttgatttcgggttggccaaatttggcgctctcgctggcaatgatgacgtcgcacatcatggccaattcacagccgccgccgagggcaaagccgctgacggcggcaataacgggcttgcgaacgctgcgaatggtttcccagttgcgcgtgatgtagtctgacttgtagacgtcagcaaaggtgtaggtggccatggcgccaatgtcggcaccagcggcaaaggctttttcactgcctgtgagcacaatgcagccaatgtcagggtcggcgtcgaatgcggttagcgccgcgccaagctcgtccattagcgcactgttgagggcattgagttgtttggggcggtttagggtgagtatgcccacgcggccttcggtgcggattaaaaccagttgctcactcatgtctgtgttctccaatgtggtgcgaaaagttgcttagaaaaagttgtttcgaaagttgcttcgacgtaagcggttgatcatagccaagcggtgagcttgctagggtctttcaccaccagttcggcgatctggttggcgtgggtcgatggccagatgagggggcacgacaacatgcggccatcgcgcgcgacaccggcaaccaatgggtgctgggctacgtcggcgtggcgtctcgcaatgttctccacatcgctcagtgactttacccgccattgatcggtgccatcaaatagtgtcacccattcgtcacccgccgccatgcccgcttgttcgcctgcaccgcctcttgccacgtgggtgatgcggatgccgtctcgctcaacgacacgcatgcccaagcgctgggcgagggtgccgctcttggccgccacggcgacaccgtaatgactaagcagtgcgtgtaccggcaggtcttcggtgctgtgtacccagtgcgcgagctgtgtggcgacgttggcgtgcccttgctggttgagcagggcgtagatgtcggcctcactgatggtgccgcctttgcttttgacccataggccgcgcatgagggtgtcgagatcgccgccttgttggcgcagcatgaggtcggtgcacagcgctattagcgcccctttggtgtagtagctaacggtggcgttgggcgtgttttcgccaatgcggtagtacttgacccacgcgtcatagctagactgggcaacgctttgcagatgccgccctggggtggccgcaacgtggttaatggatttggccagcagcgtgagataggtgggcgtatcaatgagtttggcgcgttgcagaaacaggtcatcgtagtagctggtaaagccttcaaagaaccacagcagctcggtgtagttctcttggttgaagtcgatgcttgcaaactcggatgggcgcaggcgcttgacgttccatgtgtggaagtactcatggctaatgaggccaagtaattggttgtagccagcgccttgtgcatgggggggcgctgcctcgccagcgacggccgttaggggcaagtcggcacgctggcaaatgagtgcggtgctggcgatgtgctctagcccgccgtagccgttttcagtggcgtgaagcatgaagacgtagcggtcaaagggtagttggcgttgcggttgtttgccgtgccaaaacgtgatctctgtttcgcaaattcggcgggtgtcggcaactaattttttgacatcaaacccgggcgcggtgtggttgccaatgcccgtgacaacgagttcatgcggtacgccagagaccttaaaccgactgacgtaaaaatcacccaaggtaaagggactgtcggcgagctcgccgtagttgcgggcggtgtagcgcccgaagccacgcgcgtcgatttgccgcgcgggcaatgcggtagacagccgccacgcattgaacgcgggcgcggtggggcgctcgacggagatggtttgtatctcgtcttcgcccccgaccacttgcaaacacaggctggtggggttgaagaagccgcgggtgttgtccaaaaaggcggttcgcaccgaggcgtcaaaggcgtagatttggtaattgagctccagcgggcgtttgccgtcggattccactagccactcatttttactgcactgtgtgatttggcaag

SEQ ID NO: 163 - DNA, 13129 bp, Artificial Sequence
  Synthetic Oligonucleotide
  misc_feature (1)..(9553): n is a, c, g, or t
nnnnnnnnnnnnnnnnnnnnnnnnnnnnnnnnnnnnnnnnnnnnnnnnnnnnnnnnnnnnnnnnnnnnnnnnnnnnnnnnnnnnnnnnnnnnnnnnnnnnnnnnnnnnnnnnnnnnnnnnnnnnnnnnnnnnnnnnnnnnnnnnnnnnnnnnnnnnnnnnnnnnnnnnnnnnnnnnnnnnnnnnnnnnnnnnnnnnnnnnnnnnnnnnnnnnnnnnnnnnnnnnnnnnnnnnnnnnnnnnnnnnnnnnnnnnnnnnnnnnnnnnnnnnnnnnnnnnnnnnnnnnnnnnnnnnnnnnnnnnnnnnnnnnnnnnnnnnnnnnnnnnnnnnnnnnnnnnnnnnnnnnnnnnnnnnnnnnnnnnnnnnnnnnnnnnnnnnnnnnnnnnnnnnnnnnnnnnnnnnnnnnnnnnnnnnnnnnnnnnnnnnnnnnnnnnnnnnnnnnnnnnnnnnnnnnnnnnnnnnnnnnnnnnnnnnnnnnnnnnnnnnnnnnnnnnnnnnnnnnnnnnnnnnnnnnnnnnnnnnnnnnnnnnnnnnnnnnnnnnnnnnnnnnnnnnnnnnnnnnnnnnnnnnnnnnnnnnnnnnnnnnnnnnnnnnnnnnnnnnnnnnnnnnnnnnnnnnnnnnnnnnnnnnnnnnnnnnnnnnnnnnnnnnnnnnnnnnnnnnnnnnnnnnnnnnnnnnnnnnnnnnnnnnnnnnnnnnnnnnnnnnnnnnnnnnnnnnnnnnnnnnnnnnnnnnnnnnnnnnnnnnnnnnnnnnnnnnnnnnnnnnnnnnnnnnnnnnnnnnnnnnnnnnnnnnnnnnnnnnnnnnnnnnnnnnnnnnnnnnnnnnnnnnnnnnnnnnnnnnnnnnnnnnnnnnnnnnnnnnnnnnnnnnnnnnnnnnnnnnnnnnnnnnnnnnnnnnnnnnnnnnnnnnnnnnnnnnnnnnnnnnnnnnnnnnnnnnnnnnnnnnnnnnnnnnnnnnnnnnnnnnnnnnnnnnnnnnnnnnnnnnnnnnnnnnnnnnnnnnnnnnnnnnnnnnnnnnnnnnnnnnnnnnnnnnnnnnnnnnnnnnnnnnnnnnnnnnnnnnnnnnnnnnnnnnnnnnnnnnnnnnnnnnnnnnnnnnnnnnnnnnnnnnnnnnnnnnnnnnnnnnnnnnnnnnnnnnnnnnnnnnnnnnnnnnnnnnnnnnnnnnnnnnnnnnnnnnnnnnnnnnnnnnnnnnnnnnnnnnnnnnnnnnnnnnnnnnnnnnnnnnnnnnnnnnnnnnnnnnnnnnnnnnnnnnnnnnnnnnnnnnnnnnnnnnnnnnnnnnnnnnnnnnnnnnnnnnnnnnnnnnnnnnnnnnnnnnnnnnnnnnnnnnnnnnnnnnnnnnnnnnnnnnnnnnnnnnnnnnnnnnnnnnnnnnnnnnnnnnnnnnnnnnnnnnnnnnnnnnnnnnnnnnnnnnnnnnnnnnnnnnnnnnnnnnnnnnnnnnnnnnnnnnnnnnnnnnnnnnnnnnnnnnnnnnnnnnnnnnnnnnnnnnnnnnnnnnnnnnnnnnnnnnnnnnnnnnnnnnnnnnnnnnnnnnnnnnnnnnnnnnnnnnnnnnnnnnnnnnnnnnnnnnnnnnnnnnnnnnnnnnnnnnnnnnnnnnnnnnnnnnnnnnnnnnnnnnnnnnnnnnnnnnnnnnnnnnnnnnnnnnnnnnnnnnnnnnnnnnnnnnnnnnnnnnnnnnnnnnnnnnnnnnnnnnnnnnnnnnnnnnnnnnnnnnnnnnnnnnnnnnnnnnnnnnnnnnnnnnnnnnnnnnnnnnnnnnnnnnnnnnnnnnnnnnnnnnnnnnnnnnnnnnnnnnnnnnnnnnnnnnnnnnnnnnnnnnnnnnnnnnnnnnnnnnnnnnnnnnnnnnnnnnnnnnnnnnnnnnnnnnnnnnnnnnnnnnnnnnnnnnnnnnnnnnnnnnnnnnnnnnnnnnnnnnnnnnnnnnnnnnnnnnnnnnnnnnnnnnnnnnnnnnnnnnnnnnnnnnnnnnnnnnnnnnnnnnnnnnnnnnnnnnnnnnnnnnnnnnnnnnnnnnnnnnnnnnnnnnnnnnnnnnnnnnnnnnnnnnnnnnnnnnnnnnnnnnnnnnnnnnnnnnnnnnnnnnnnnnnnnnnnnnnnnnnnnnnnnnnnnnnnnnnnnnnnnnnnnnnnnnnnnnnnnnnnnnnnnnnnnnnnnnnnnnnnnnnnnnnnnnnnnnnnnnnnnnnnnnnnnnnnnnnnnnnnnnnnnnnnnnnnnnnnnnnnnnnnnnnnnnnnnnnnnnnnnnnnnnnnnnnnnnnnnnnnnnnnnnnnnnnnnnnnnnnnnnnnnnnnnnnnnnnnnnnnnnnnnnnnnnnnnnnnnnnnnnnnnnnnnnnnnnnnnnnnnnnnnnnnnnnnnnnnnnnnnnnnnnnnnnnnnnnnnnnnnnnnnnnnnnnnnnnnnnnnnnnnnnnnnnnnnnnnnnnnnnnnnnnnnnnnnnnnnnnnnnnnnnnnnnnnnnnnnnnnnnnnnnnnnnnnnnnnnnnnnnnnnnnnnnnnnnnnnnnnnnnnnnnnnnnnnnnnnnnnnnnnnnnnnnnnnnnnnnnnnnnnnnnnnnnnnnnnnnnnnnnnnnnnnnnnnnnnnnnnnnnnnnnnnnnnnnnnnnnnnnnnnnnnnnnnnnnnnnnnnnnnnnnnnnnnnnnnnnnnnnnnnnnnnnnnnnnnnnnnnnnnnnnnnnnnnnnnnnnnnnnnnnnnnnnnnnnnnnnnnnnnnnnnnnnnnnnnnnnnnnnnnnnnnnnnnnnnnnnnnnnnnnnnnnnnnnnnnnnnnnnnnnnnnnnnnnnnnnnnnnnnnnnnnnnnnnnnnnnnnnnnnnnnnnnnnnnnnnnnnnnnnnnnnnnnnnnnnnnnnnnnnnnnnnnnnnnnnnnnnnnnnnnnnnnnnnnnnnnnnnnnnnnnnnnnnnnnnnnnnnnnnnnnnnnnnnnnnnnnnnnnnnnnnnnnnnnnnnnnnnnnnnnnnnnnnnnnnnnnnnnnnnnnnnnnnnnnnnnnnnnnnnnnnnnnnnnnnnnnnnnnnnnnnnnnnnnnnnnnnnnnnnnnnnnnnnnnnnnnnnnnnnnnnnnnnnnnnnnnnnnnnnnnnnnnnnnnnnnnnnnnnnnnnnnnnnnnnnnnnnnnnnnnnnnnnnnnnnnnnnnnnnnnnnnnnnnnnnnnnnnnnnnnnnnnnnnnnnnnnnnnnnnnnnnnnnnnnnnnnnnnnnnnnnnnnnnnnnnnnnnnnnnnnnnnnnnnnnnnnnnnnnnnnnnnnnnnnnnnnnnnnnnnnnnnnnnnnnnnnnnnnnnnnnnnnnnnnnnnnnnnnnnnnnnnnnnnnnnnnnnnnnnnnnnnnnnnnnnnnnnnnnnnnnnnnnnnnnnnnnnnnnnnnnnnnnnnnnnnnnnnnnnnnnnnnnnnnnnnnnnnnnnnnnnnnnnnnnnnnnnnnnnnnnnnnnnnnnnnnnnnnnnnnnnnnnnnnnnnnnnnnnnnnnnnnnnnnnnnnnnnnnnnnnnnnnnnnnnnnnnnnnnnnnnnnnnnnnnnnnnnnnnnnnnnnnnnnnnnnnnnnnnnnnnnnnnnnnnnnnnnnnnnnnnnnnnnnnnnnnnnnnnnnnnnnnnnnnnnnnnnnnnnnnnnnnnnnnnnnnnnnnnnnnnnnnnnnnnnnnnnnnnnnnnnnnnnnnnnnnnnnnnnnnnnnnnnnnnnnnnnnnnnnnnnnnnnnnnnnnnnnnnnnnnnnnnnnnnnnnnnnnnnnnnnnnnnnnnnnnnnnnnnnnnnnnnnnnnnnnnnnnnnnnnnnnnnnnnnnnnnnnnnnnnnnnnnnnnnnnnnnnnnnnnnnnnnnnnnnnnnnnnnnnnnnnnnnnnnnnnnnnnnnnnnnnnnnnnnnnnnnnnnnnnnnnnnnnnnnnnnnnnnnnnnnnnnnnnnnnnnnnnnnnnnnnnnnnnnnnnnnnnnnnnnnnnnnnnnnnnnnnnnnnnnnnnnnnnnnnnnnnnnnnnnnnnnnnnnnnnnnnnnnnnnnnnnnnnnnnnnnnnnnnnnnnnnnnnnnnnnnnnnnnnnnnnnnnnnnnnnnnnnnnnnnnnnnnnnnnnnnnnnnnnnnnnnnnnnnnnnnnnnnnnnnnnnnnnnnnnnnnnnnnnnnnnnnnnnnnnnnnnnnnnnnnnnnnnnnnnnnnnnnnnnnnnnnnnnnnnnnnnnnnnnnnnnnnnnnnnnnnnnnnnnnnnnnnnnnnnnnnnnnnnnnnnnnnnnnnnnnnnnnnnnnnnnnnnnnnnnnnnnnnnnnnnnnnnnnnnnnnnnnnnnnnnnnnnnnnnnnnnnnnnnnnnnnnnnnnnnnnnnnnnnnnnnnnnnnnnnnnnnnnnnnnnnnnnnnnnnnnnnnnnnnnnnnnnnnnnnnnnnnnnnnnnnnnnnnnnnnnnnnnnnnnnnnnnnnnnnnnnnnnnnnnnnnnnnnnnnnnnnnnnnnnnnnnnnnnnnnnnnnnnnnnnnnnnnnnnnnnnnnnnnnnnnnnnnnnnnnnnnnnnnnnnnnnnnnnnnnnnnnnnnnnnnnnnnnnnnnnnnnnnnnnnnnnnnnnnnnnnnnnnnnnnnnnnnnnnnnnnnnnnnnnnnnnnnnnnnnnnnnnnnnnnnnnnnnnnnnnnnnnnnnnnnnnnnnnnnnnnnnnnnnnnnnnnnnnnnnnnnnnnnnnnnnnnnnnnnnnnnnnnnnnnnnnnnnnnnnnnnnnnnnnnnnnnnnnnnnnnnnnnnnnnnnnnnnnnnnnnnnnnnnnnnnnnnnnnnnnnnnnnnnnnnnnnnnnnnnnnnnnnnnnnnnnnnnnnnnnnnnnnnnnnnnnnnnnnnnnnnnnnnnnnnnnnnnnnnnnnnnnnnnnnnnnnnnnnnnnnnnnnnnnnnnnnnnnnnnnnnnnnnnnnnnnnnnnnnnnnnnnnnnnnnnnnnnnnnnnnnnnnnnnnnnnnnnnnnnnnnnnnnnnnnnnnnnnnnnnnnnnnnnnnnnnnnnnnnnnnnnnnnnnnnnnnnnnnnnnnnnnnnnnnnnnnnnnnnnnnnnnnnnnnnnnnnnnnnnnnnnnnnnnnnnnnnnnnnnnnnnnnnnnnnnnnnnnnnnnnnnnnnnnnnnnnnnnnnnnnnnnnnnnnnnnnnnnnnnnnnnnnnnnnnnnnnnnnnnnnnnnnnnnnnnnnnnnnnnnnnnnnnnnnnnnnnnnnnnnnnnnnnnnnnnnnnnnnnnnnnnnnnnnnnnnnnnnnnnnnnnnnnnnnnnnnnnnnnnnnnnnnnnnnnnnnnnnnnnnnnnnnnnnnnnnnnnnnnnnnnnnnnnnnnnnnnnnnnnnnnnnnnnnnnnnnnnnnnnnnnnnnnnnnnnnnnnnnnnnnnnnnnnnnnnnnnnnnnnnnnnnnnnnnnnnnnnnnnnnnnnnnnnnnnnnnnnnnnnnnnnnnnnnnnnnnnnnnnnnnnnnnnnnnnnnnnnnnnnnnnnnnnnnnnnnnnnnnnnnnnnnnnnnnnnnnnnnnnnnnnnnnnnnnnnnnnnnnnnnnnnnnnnnnnnnnnnnnnnnnnnnnnnnnnnnnnnnnnnnnnnnnnnnnnnnnnnnnnnnnnnnnnnnnnnnnnnnnnnnnnnnnnnnnnnnnnnnnnnnnnnnnnnnnnnnnnnnnnnnnnnnnnnnnnnnnnnnnnnnnnnnnnnnnnnnnnnnnnnnnnnnnnnnnnnnnnnnnnnnnnnnnnnnnnnnnnnnnnnnnnnnnnnnnnnnnnnnnnnnnnnnnnnnnnnnnnnnnnnnnnnnnnnnnnnnnnnnnnnnnnnnnnnnnnnnnnnnnnnnnnnnnnnnnnnnnnnnnnnnnnnnnnnnnnnnnnnnnnnnnnnnnnnnnnnnnnnnnnnnnnnnnnnnnnnnnnnnnnnnnnnnnnnnnnnnnnnnnnnnnnnnnnnnnnnnnnnnnnnnnnnnnnnnnnnnnnnnnnnnnnnnnnnnnnnnnnnnnnnnnnnnnnnnnnnnnnnnnnnnnnnnnnnnnnnnnnnnnnnnnnnnnnnnnnnnnnnnnnnnnnnnnnnnnnnnnnnnnnnnnnnnnnnnnnnnnnnnnnnnnnnnnnnnnnnnnnnnnnnnnnnnnnnnnnnnnnnnnnnnnnnnnnnnnnnnnnnnnnnnnnnnnnnnnnnnnnnnnnnnnnnnnnnnnnnnnnnnnnnnnnnnnnnnnnnnnnnnnnnnnnnnnnnnnnnnnnnnnnnnnnnnnnnnnnnnnnnnnnnnnnnnnnnnnnnnnnnnnnnnnnnnnnnnnnnnnnnnnnnnnnnnnnnnnnnnnnnnnnnnnnnnnnnnnnnnnnnnnnnnnnnnnnnnnnnnnnnnnnnnnnnnnnnnnnnnnnnnnnnnnnnnnnnnnnnnnnnnnnnnnnnnnnnnnnnnnnnnnnnnnnnnnnnnnnnnnnnnnnnnnnnnnnnnnnnnnnnnnnnnnnnnnnnnnnnnnnnnnnnnnnnnnnnnnnnnnnnnnnnnnnnnnnnnnnnnnnnnnnnnnnnnnnnnnnnnnnnnnnnnnnnnnnnnnnnnnnnnnnnnnnnnnnnnnnnnnnnnnnnnnnnnnnnnnnnnnnnnnnnnnnnnnnnnnnnnnnnnnnnnnnnnnnnnnnnnnnnnnnnnnnnnnnnnnnnnnnnnnnnnnnnnnnnnnnnnnnnnnnnnnnnnnnnnnnnnnnnnnnnnnnnnnnnnnnnnnnnnnnnnnnnnnnnnnnnnnnnnnnnnnnnnnnnnnnnnnnnnnnnnnnnnnnnnnnnnnnnnnnnnnnnnnnnnnnnnnnnnnnnnnnnnnnnnnnnnnnnnnnnnnnnnnnnnnnnnnnnnnnnnnnnnnnnnnnnnnnnnnnnnnnnnnnnnnnnnnnnnnnnnnnnnnnnnnnnnnnnnnnnnnnnnnnnnnnnnnnnnnnnnnnnnnnnnnnnnnnnnnnnnnnnnnnnnnnnnnnnnnnnnnnnnnnnnnnnnnnnnnnnnnnnnnnnnnnnnnnnnnnnnnnnnnnnnnnnnnnnnnnnnnnnnnnnnnnnnnnnnnnnnnnnnnnnnnnnnnnnnnnnnnnnnnnnnnnnnnnnnnnnnnnnnnnnnnnnnnnnnnnnnnnnnnnnnnnnnnnnnnnnnnnnnnnnnnnnnnnnnnnnnnnnnnnnnnnnnnnnnnnnnnnnnnnnnnnnnnnnnnnnnnnnnnnnnnnnnnnnnnnnnnnnnnnnnnnnnnnnnnnnnnnnnnnnnnnnnnnnnnnnnnnnnnnnnnnnnnnnnnnnnnnnnnnnnnnnnnnnnnnnnnnnnnnnnnnnnnnnnnnnnnnnnnnnnnnnnnnnnnnnnnnnnnnnnnnnnnnnnnnnnnnnnnnnnnnnnnnnnnnnnnnnnnnnnnnnnnnnnnnnnnnnnnnnnnnnnnnnnnnnnnnnnnnnnnnnnnnnnnnnnnnnnnnnnnnnnnnnnnnnnnnnnnnnnnnnnnnnnnnnnnnnnnnnnnnnnnnnnnnnnnnnnnnnnnnnnnnnnnnnnnnnnnnnnnnnnnnnnnnnnnnnnnnnnnnnnnnnnnnnnnnnnnnnnnnnnnnnnnnnnnnnnnnnnnnnnnnnnnnnnnnnnnnnnnnnnnnnnnnnnnnnnnnnnnnnnnnnnnnnnnnnnnnnnnnnnnnnnnnnnnnnnnnnnnnnnnnnnnnnnnnnnnnnnnnnnnnnnnnnnnnnnnnnnnnnnnnnnnnnnnnnnnnnnnnnnnnnnnnnnnnnnnnnnnnnnnnnnnnnnnnnnnnnnnnnnnnnnnnnnnnnnnnnnnnnnnnnnnnnnnnnnnnnnnnnnnnnnnnnnnnnnnnnnnnnnnnnnnnnnnnnnnnnnnnnnnnnnnnnnnnnnnnnnnnnnnnnnnnnnnnnnnnnnnnnnnnnnnnnnnnnnnnnnnnnnnnnnnnnnnnnnnnnnnnnnnnnnnnnnnnnnnnnnnnnnnnnnnnnnnnnnnnnnnnnnnnnnnnnnnnnnnnnnnnnnnnnnnnnnnnnnnnnnnnnnnnnnnnnnnnnnnnnnnnnnnnnnnnnnnnnnnnnnnnnnnnnnnnnnnnnnnnnnnnnnnnnnnnnnnnnnnnnnnnnnnnnnnnnnnnnnnnnnnnnnnnnnnnnnnnnnnnnnnnnnnnnnnnnnnnnnnnnnnnnnnnnnnnnnnnnnnnnnnnnnnnnnnnnnnnnnnnnnnnnnnnnnnnnnnnnnnnnnnnnnnnnnnnnnnnnnnnnnnnnnnnnnnnnnnnnnnnnnnnnnnnnnnnnnnnnnnnnnnnnnnnnnnnnnnnnnnnnnnnnnnnnnnnnnnnnnnnnnnnnnnnnnnnnnnnnnnnnnnnnnnnnnnnnnnnnnnnnnnnnnnnnnnnnnnnnnnnnnnnnnnnnnnnnnnnnnnnnnnnnnnnnnnnnnnnnnnnnnnnnnnnnnnnnnnnnnnnnnnnnnnnnnnnnnnnnnnnnnnnnnnnnnnnnnnnnnnnnnnnnnnnnnnnnnnnnnnnnnnnnnnnnnnnnnnnnnnnnnnnnnnnnnnnnnnnnnnnnnnnnnnnnnnnnnnnnnnnnnnnnnnnnnnnnnnnnnnnnnnnnnnnnnnnnnnnnnnnnnnnnnnnnnnnnnnnnnnnnnnnnnnnnnnnnnnnnnnnnnnnnnnnnnnnnnnnnnnnnnnnnnnnnnnnnnnnnnnnnnnnnnnnnnnnnnnnnnnnnnnnnnnnnnnnnnnnnnnnnnnnnnnnnnnnnnnnnnnnnnnnnnnnnnnnnnnnnnnnnnnnnnnnnnnnnnnnnnnnnnnnnnnnnnnnnnnnnnnnnnnnnnnnnnnnnnnnnnnnnnnnnnnnnnnnnnnnnnnnnnnnnnnnnnnnnnnnnnnnnnnnnnnnnnnnnnnnnnnnnnnnnnnnnnnnnnnnnnnnnnnnnnnnnnnnnnnnnnnnnnnnnnnnnnnnnnnnnnnnnnnnnnnnnnnnnnnnnnnnnnnnnnnnnnnnnnnnnnnnnnnnnnnnnnnnnnnnnnnnnnnnnnnnnnnnnnnnnnnnnnnnnnnnnnnnnnnnnnnnnnnnnnnnnnnnnnnnnnnnnnnnnnnnnnnnnnnnnnnnnnnnnnnnnnnnnnnnnnnnnnnnnnnnnnnnnnnnnnnnnnnnnnnnnnnnnnnnnnnnnnnnnnnnnnnnnnnnnnnnnnnnnnnnnnnnnnnnnnnnnnnnnnnnnnnnnnnnnnnnnnnnnnnnnnnnnnnnnnnnnnnnnnnnnnnnnnnnnnnnnnnnnnnnnnnnnnnnnnnnnnnnnnnnnnnnnnnnnnnnnnnnnnnnnnnnnnnnnnnnnnnnnnnnnnnnnnnnnnnnnnnnnnnnnnnnnnnnnnnnnnnnnnnnnnnnnnnnnnnnnnnnnnnnnnnnnnnnnnnnnnnnnnnnnnnnnnnnnnnnnnnnnnnnnnnnnnnnnnnnnnnnnnnnnnnnnnnnnnnnnnnnnnnnnnnnnnnnnnnnnnnnnnnnnnnnnnnnnnnnnnnnnnnnnnnnnnnnnnnnnnnnnnnnnnnnnnnnnnnnnnnnnnnnnnnnnnnnnnnnnnnnnnnnnnnnnnnnnnnnnnnnnnnnnnnnnnnnnnnnnnnnnnnnnnnnnnnnnnnnnnnnnnnnnnnnnnnnnnnnnnnnnnnnnnnnnnnnnnnnnnnnnnnnnnnnnnnnnnnnnnnnnnnnnnnnnnnnnnnnnnnnnnnattaaggtggccacccgcgaactgcgcaaagccaaaaaagaaaacgatctcgccaaatgcgacgaattcgaagccaagctcgaagaactcaaagccctcaagaaggcgcacaaagccggtgacgaatcgagcaacaccaaacacttggtagagatggaggccatccccgcgggaattcaaatggtgggcaaactcatcataaagcgggccacgccgctcgacctcggcacactcacgggcgcgcttaacgcgatcagcgaattccccatgatgggtgcccagcgggcccgtggctgcggcgaggtaagtggcacggcaaccgtctgccacacccgaggtgaagtgttggcgcaaatcgccttcggcggttttgtgccagctgtactggagtggaccgatgcgggcactgcctttatgaacggcgccgaaacggtcgcagtcgccgcgtgaagggcccttaccgcagcacacagcaggcgcaatacgccaagctcatcacgcgcgctgttagcaaacccggtgcgcccctgctggcgggcgccgcgcccgggcttggtaagacacacggctacgccatccctttgttatgcagtggcaaaaaagtagcgatcgccatgagcacgcgccaactgatcgatcaattcatggcaagcgacgcgcttaccgctgcgcaagccgcgttagcggccgaggggcggccggctgccacccttgtcgccctgcaaccccgccgtcagtttgaaacggcggcggcctaccgcgcgcacaaaacagcggcgcttcacgccgacgtgttggtgctcacacacatgggtgtgctcattgatacccacatccccgcctacgcccagttgcgtcagcgcgacgtcttgttgtttgacgaagccgatcttttggctgatgccgccgacttgcgcagcacctatcgcattgaggcggaggccttagcccacgcaggccttgaaaacgccgcaccggcagaggtggtggaaaccatcattaaaaaaaccgatgaccccgaggaaaaagcggttgccatagccatccagcgcgctttggcaaagccggcttggtacaaagtggtgggcaaagatgacaacggcgatttggtgctcacccaccgcatgccggggcgcatgttgcgcccgctcatcaatgacataccgcggtgcattttcaccagtggcaccctcacggtctcaaatcgttttgaccactttgtcaaagccattggcctgaccgccgtggcacccgaaagccaacacattgaccccgtgcaacacggccaattgcgcgtggaggtagtcagtgagaccctcaccccagaagcacaagccgcacgcatcaagcaggcgaagacaccggtattggtgctgaccaccagccacgcgaccacggcggcgttgggcgaattgtgccccggtgccatctgccgcgcacccggtgaagccctcatggatgcggtggcgcggtgtcctgatgatggcatcttgatcgccgctggcgcctggtctggccttgatgcgccgcgcttgcggtggcaaaccgtggtcatccccaaaacaccttacggcaaaccactcatcctggatgcccagcagataagcgcttacgtggacagcaaggtcgttgccatcaggcgcaccaaccaagggttacaccgtgggctgcgcactaccgatgccacctgcaccttgctgttactcgatcctcgtagccgtcgtgccgatttacgccaagccattccccgtcgttacttggtggattgggacagcgtggccgagggctcggtcgttttgcgtacacacctcgcccgtgaacgcgacaacagcctgcgtaaaaaaaccctgcggctgcgcgggcagcactgcgaacaccccggctgtacggttacccaagcgtatttgctggatgtgcatcacctcaacccgattgccaacggcccccgcaacacgggcatcgatgacctgcgggtgctctgtaaaaatcaccatacggatgcccaccaagccatgcgagacgctgattttttaaaagtgaaaacacccgaaaagcctgcagaaacaggcacttaggccatagctggtcaagctacgccgtaaatgcgtagttactggaactagccaagcgactgcacatcttctccgccaggtcaagctacgccgtaaatgcgtagttactggaacgtaaccgtcgcaacgaaagtgcgtgtgtcaggtcaagctacgccgtaaatgcgtagttactggaacattgctgttgtaatcagcccgatgcgcacaggtcaagctacgccgtaaatgcgtagttacttttagcagccagttttgctggtcttaagcggtccaatgccctgacttgccgcccatcttttcaagcaagcgcacacccgtcatggtcatgccgcggtcggcggctttgcacatgtcgtagatggtcagcaagccgacttgtacggcggtgagggcttccatttcaacgccggtggggccggtggtttcggcggtgacggtgcaatgaacatgggggggctggtcaccggtggtgaaggccacgcgcacatggctgagcgccaaggggtggcacaggggaatgaggtcagcggtgcgcttggaggcttgtatcgccgccacgcgtgcgatgcctaacacgtcgccctttttggcgttgccatcgcgaatcagggccaaagtgtcggcgtgcatttcaatgcgaccttctgctgtagcgctgcgcttggtgttggctttgtcacccacgtccaccatgtgggcttggccttgtgcatcaaagtgggtcaggggtgaggggggctggctggacacggtgcaatctccgaaactttgcaaaacttagggcatcatacccacatgccttaccccttgtttgttgctcggcgtcgccctcgtttggcgtgggcgttgccgtgggctttgggtgccgccctgttgctggggccaacaacactcaccgttgcgcaaccccgtgcggccttgcccaacttggggggtggggtgtcgttatcgctgggggatgagcgtcggttgggtcaacaaatcatgccccgcttgcacaacagtggcttggtggtggaagacccgctgctcaaccaatacctcgccgatctgtggcgccctgtgtttgcaacggcgcgcgcgcgcggtgatgtgcccgatgacatgttgcagcagttcgcttggcagttgtggttgctcagccccaaagccatcaacgcatttgcattgcccgggggttactttggcttccacctggggctgttggcatcggccacggatgacgccgcgctggcctcggtactggcgcacgagttgagccatgtgacgcagcgccatattgcccgcatcattcaagcccaagagagccaagcgccttggttgattggcgccatgattttgggtgccgccaccatcgccgccagccccgatgccggtgccgcactgattgtgggtgggcaggcggcgtctatccaaaaccagctcaacttctcacgcgacatggagcaagaggcggaccgccaaggcttggtggtgttgtcggaggcgggttttgatccga

SEQ ID NO: 164 - DNA, 13129 bp, Artificial Sequence; identical to SEQ ID NO: 163
  Synthetic Oligonucleotide
  misc_feature (1)..(9553): n is a, c, g, or t

SEQ ID NO: 165 - DNA, 13125 bp, Artificial Sequence
  Synthetic Oligonucleotide
  misc_feature (1)..(9974): n is a, c, g, or t
nnnnnnnnnnnnnnnnnnnnnnnnnnnnnnnnnnnnnnnnnnnnnnnnnnnnnnnnnnnnnnnnnnnnnnnnnnnnnnnnnnnnnnnnnnnnnnnnnnnnnnnnnnnnnnnnnnnnnnnnnnnnnnnnnnnnnnnnnnnnnnnnnnnnnnnnnnnnnnnnnnnnnnnnnnnnnnnnnnnnnnnnnnnnnnnnnnnnnnnnnnnnnnnnnnnnnnnnnnnnnnnnnnnnnnnnnnnnnnnnnnnnnnnnnnnnnnnnnnnnnnnnnnnnnnnnnnnnnnnnnnnnnnnnnnnnnnnnnnnnnnnnnnnnnnnnnnnnnnnnnnnnnnnnnnnnnnnnnnnnnnnnnnnnnnnnnnnnnnnnnnnnnnnnnnnnnnnnnnnnnnnnnnnnnnnnnnnnnnnnnnnnnnnnnnnnnnnnnnnnnnnnnnnnnnnnnnnnnnnnnnnnnnnnnnnnnnnnnnnnnnnnnnnnnnnnnnnnnnnnnnnnnnnnnnnnnnnnnnnnnnnnnnnnnnnnnnnnnnnnnnnnnnnnnnnnnnnnnnnnnnnnnnnnnnnnnnnnnnnnnnnnnnnnnnnnnnnnnnnnnnnnnnnnnnnnnnnnnnnnnnnnnnnnnnnnnnnnnnnnnnnnnnnnnnnnnnnnnnnnnnnnnnnnnnnnnnnnnnnnnnnnnnnnnnnnnnnnnnnnnnnnnnnnnnnnnnnnnnnnnnnnnnnnnnnnnnnnnnnnnnnnnnnnnnnnnnnnnnnnnnnnnnnnnnnnnnnnnnnnnnnnnnnnnnnnnnnnnnnnnnnnnnnnnnnnnnnnnnnnnnnnnnnnnnnnnnnnnnnnnnnnnnnnnnnnnnnnnnnnnnnnnnnnnnnnnnnnnnnnnnnnnnnnnnnnnnnnnnnnnnnnnnnnnnnnnnnnnnnnnnnnnnnnnnnnnnnnnnnnnnnnnnnnnnnnnnnnnnnnnnnnnnnnnnnnnnnnnnnnnnnnnnnnnnnnnnnnnnnnnnnnnnnnnnnnnnnnnnnnnnnnnnnnnnnnnnnnnnnnnnnnnnnnnnnnnnnnnnnnnnnnnnnnnnnnnnnnnnnnnnnnnnnnnnnnnnnnnnnnnnnnnnnnnnnnnnnnnnnnnnnnnnnnnnnnnnnnnnnnnnnnnnnnnnnnnnnnnnnnnnnnnnnnnnnnnnnnnnnnnnnnnnnnnnnnnnnnnnnnnnnnnnnnnnnnnnnnnnnnnnnnnnnnnnnnnnnnnnnnnnnnnnnnnnnnnnnnnnnnnnnnnnnnnnnnnnnnnnnnnnnnnnnnnnnnnnnnnnnnnnnnnnnnnnnnnnnnnnnnnnnnnnnnnnnnnnnnnnnnnnnnnnnnnnnnnnnnnnnnnnnnnnnnnnnnnnnnnnnnnnnnnnnnnnnnnnnnnnnnnnnnnnnnnnnnnnnnnnnnnnnnnnnnnnnnnnnnnnnnnnnnnnnnnnnnnnnnnnnnnnnnnnnnnnnnnnnnnnnnnnnnnnnnnnnnnnnnnnnnnnnnnnnnnnnnnnnnnnnnnnnnnnnnnnnnnnnnnnnnnnnnnnnnnnnnnnnnnnnnnnnnnnnnnnnnnnnnnnnnnnnnnnnnnnnnnnnnnnnnnnnnnnnnnnnnnnnnnnnnnnnnnnnnnnnnnnnnnnnnnnnnnnnnnnnnnnnnnnnnnnnnnnnnnnnnnnnnnnnnnnnnnnnnnnnnnnnnnnnnnnnnnnnnnnnnnnnnnnnnnnnnnnnnnnnnnnnnnnnnnnnnnnnnnnnnnnnnnnnnnnnnnnnnnnnnnnnnnnnnnnnnnnnnnnnnnnnnnnnnnnnnnnnnnnnnnnnnnnnnnnnnnnnnnnnnnnnnnnnnnnnnnnnnnnnnnnnnnnnnnnnnnnnnnnnnnnnnnnnnnnnnnnnnnnnnnnnnnnnnnnnnnnnnnnnnnnnnnnnnnnnnnnnnnnnnnnnnnnnnnnnnnnnnnnnnnnnnnnnnnnnnnnnnnnnnnnnnnnnnnnnnnnnnnnnnnnnnnnnnnnnnnnnnnnnnnnnnnnnnnnnnnnnnnnnnnnnnnnnnnnnnnnnnnnnnnnnnnnnnnnnnnnnnnnnnnnnnnnnnnnnnnnnnnnnnnnnnnnnnnnnnnnnnnnnnnnnnnnnnnnnnnnnnnnnnnnnnnnnnnnnnnnnnnnnnnnnnnnnnnnnnnnnnnnnnnnnnnnnnnnnnnnnnnnnnnnnnnnnnnnnnnnnnnnnnnnnnnnnnnnnnnnnnnnnnnnnnnnnnnnnnnnnnnnnnnnnnnnnnnnnnnnnnnnnnnnnnnnnnnnnnnnnnnnnnnnnnnnnnnnnnnnnnnnnnnnnnnnnnnnnnnnnnnnnnnnnnnnnnnnnnnnnnnnnnnnnnnnnnnnnnnnnnnnnnnnnnnnnnnnnnnnnnnnnnnnnnnnnnnnnnnnnnnnnnnnnnnnnnnnnnnnnnnnnnnnnnnnnnnnnnnnnnnnnnnnnnnnnnnnnnnnnnnnnnnnnnnnnnnnnnnnnnnnnnnnnnnnnnnnnnnnnnnnnnnnnnnnnnnnnnnnnnnnnnnnnnnnnnnnnnnnnnnnnnnnnnnnnnnnnnnnnnnnnnnnnnnnnnnnnnnnnnnnnnnnnnnnnnnnnnnnnnnnnnnnnnnnnnnnnnnnnnnnnnnnnnnnnnnnnnnnnnnnnnnnnnnnnnnnnnnnnnnnnnnnnnnnnnnnnnnnnnnnnnnnnnnnnnnnnnnnnnnnnnnnnnnnnnnnnnnnnnnnnnnnnnnnnnnnnnnnnnnnnnnnnnnnnnnnnnnnnnnnnnnnnnnnnnnnnnnnnnnnnnnnnnnnnnnnnnnnnnnnnnnnnnnnnnnnnnnnnnnnnnnnnnnnnnnnnnnnnnnnnnnnnnnnnnnnnnnnnnnnnnnnnnnnnnnnnnnnnnnnnnnnnnnnnnnnnnnnnnnnnnnnnnnnnnnnnnnnnnnnnnnnnnnnnnnnnnnnnnnnnnnnnnnnnnnnnnnnnnnnnnnnnnnnnnnnnnnnnnnnnnnnnnnnnnnnnnnnnnnnnnnnnnnnnnnnnnnnnnnnnnnnnnnnnnnnnnnnnnnnnnnnnnnnnnnnnnnnnnnnnnnnnnnnnnnnnnnnnnnnnnnnnnnnnnnnnnnnnnnnnnnnnnnnnnnnnnnnnnnnnnnnnnnnnnnnnnnnnnnnnnnnnnnnnnnnnnnnnnnnnnnnnnnnnnnnnnnnnnnnnnnnnnnnnnnnnnnnnnnnnnnnnnnnnnnnnnnnnnnnnnnnnnnnnnnnnnnnnnnnnnnnnnnnnnnnnnnnnnnnnnnnnnnnnnnnnnnnnnnnnnnnnnnnnnnnnnnnnnnnnnnnnnnnnnnnnnnnnnnnnnnnnnnnnnnnnnnnnnnnnnnnnnnnnnnnnnnnnnnnnnnnnnnnnnnnnnnnnnnnnnnnnnnnnnnnnnnnnnnnnnnnnnnnnnnnnnnnnnnnnnnnnnnnnnnnnnnnnnnnnnnnnnnnnnnnnnnnnnnnnnnnnnnnnnnnnnnnnnnnnnnnnnnnnnnnnnnnnnnnnnnnnnnnnnnnnnnnnnnnnnnnnnnnnnnnnnnnnnnnnnnnnnnnnnnnnnnnnnnnnnnnnnnnnnnnnnnnnnnnnnnnnnnnnnnnnnnnnnnnnnnnnnnnnnnnnnnnnnnnnnnnnnnnnnnnnnnnnnnnnnnnnnnnnnnnnnnnnnnnnnnnnnnnnnnnnnnnnnnnnnnnnnnnnnnnnnnnnnnnnnnnnnnnnnnnnnnnnnnnnnnnnnnnnnnnnnnnnnnnnnnnnnnnnnnnnnnnnnnnnnnnnnnnnnnnnnnnnnnnnnnnnnnnnnnnnnnnnnnnnnnnnnnnnnnnnnnnnnnnnnnnnnnnnnnnnnnnnnnnnnnnnnnnnnnnnnnnnnnnnnnnnnnnnnnnnnnnnnnnnnnnnnnnnnnnnnnnnnnnnnnnnnnnnnnnnnnnnnnnnnnnnnnnnnnnnnnnnnnnnnnnnnnnnnnnnnnnnnnnnnnnnnnnnnnnnnnnnnnnnnnnnnnnnnnnnnnnnnnnnnnnnnnnnnnnnnnnnnnnnnnnnnnnnnnnnnnnnnnnnnnnnnnnnnnnnnnnnnnnnnnnnnnnnnnnnnnnnnnnnnnnnnnnnnnnnnnnnnnnnnnnnnnnnnnnnnnnnnnnnnnnnnnnnnnnnnnnnnnnnnnnnnnnnnnnnnnnnnnnnnnnnnnnnnnnnnnnnnnnnnnnnnnnnnnnnnnnnnnnnnnnnnnnnnnnnnnnnnnnnnnnnnnnnnnnnnnnnnnnnnnnnnnnnnnnnnnnnnnnnnnnnnnnnnnnnnnnnnnnnnnnnnnnnnnnnnnnnnnnnnnnnnnnnnnnnnnnnnnnnnnnnnnnnnnnnnnnnnnnnnnnnnnnnnnnnnnnnnnnnnnnnnnnnnnnnnnnnnnnnnnnnnnnnnnnnnnnnnnnnnnnnnnnnnnnnnnnnnnnnnnnnnnnnnnnnnnnnnnnnnnnnnnnnnnnnnnnnnnnnnnnnnnnnnnnnnnnnnnnnnnnnnnnnnnnnnnnnnnnnnnnnnnnnnnnnnnnnnnnnnnnnnnnnnnnnnnnnnnnnnnnnnnnnnnnnnnnnnnnnnnnnnnnnnnnnnnnnnnnnnnnnnnnnnnnnnnnnnnnnnnnnnnnnnnnnnnnnnnnnnnnnnnnnnnnnnnnnnnnnnnnnnnnnnnnnnnnnnnnnnnnnnnnnnnnnnnnnnnnnnnnnnnnnnnnnnnnnnnnnnnnnnnnnnnnnnnnnnnnnnnnnnnnnnnnnnnnnnnnnnnnnnnnnnnnnnnnnnnnnnnnnnnnnnnnnnnnnnnnnnnnnnnnnnnnnnnnnnnnnnnnnnnnnnnnnnnnnnnnnnnnnnnnnnnnnnnnnnnnnnnnnnnnnnnnnnnnnnnnnnnnnnnnnnnnnnnnnnnnnnnnnnnnnnnnnnnnnnnnnnnnnnnnnnnnnnnnnnnnnnnnnnnnnnnnnnnnnnnnnnnnnnnnnnnnnnnnnnnnnnnnnnnnnnnnnnnnnnnnnnnnnnnnnnnnnnnnnnnnnnnnnnnnnnnnnnnnnnnnnnnnnnnnnnnnnnnnnnnnnnnnnnnnnnnnnnnnnnnnnnnnnnnnnnnnnnnnnnnnnnnnnnnnnnnnnnnnnnnnnnnnnnnnnnnnnnnnnnnnnnnnnnnnnnnnnnnnnnnnnnnnnnnnnnnnnnnnnnnnnnnnnnnnnnnnnnnnnnnnnnnnnnnnnnnnnnnnnnnnnnnnnnnnnnnnnnnnnnnnnnnnnnnnnnnnnnnnnnnnnnnnnnnnnnnnnnnnnnnnnnnnnnnnnnnnnnnnnnnnnnnnnnnnnnnnnnnnnnnnnnnnnnnnnnnnnnnnnnnnnnnnnnnnnnnnnnnnnnnnnnnnnnnnnnnnnnnnnnnnnnnnnnnnnnnnnnnnnnnnnnnnnnnnnnnnnnnnnnnnnnnnnnnnnnnnnnnnnnnnnnnnnnnnnnnnnnnnnnnnnnnnnnnnnnnnnnnnnnnnnnnnnnnnnnnnnnnnnnnnnnnnnnnnnnnnnnnnnnnnnnnnnnnnnnnnnnnnnnnnnnnnnnnnnnnnnnnnnnnnnnnnnnnnnnnnnnnnnnnnnnnnnnnnnnnnnnnnnnnnnnnnnnnnnnnnnnnnnnnnnnnnnnnnnnnnnnnnnnnnnnnnnnnnnnnnnnnnnnnnnnnnnnnnnnnnnnnnnnnnnnnnnnnnnnnnnnnnnnnnnnnnnnnnnnnnnnnnnnnnnnnnnnnnnnnnnnnnnnnnnnnnnnnnnnnnnnnnnnnnnnnnnnnnnnnnnnnnnnnnnnnnnnnnnnnnnnnnnnnnnnnnnnnnnnnnnnnnnnnnnnnnnnnnnnnnnnnnnnnnnnnnnnnnnnnnnnnnnnnnnnnnnnnnnnnnnnnnnnnnnnnnnnnnnnnnnnnnnnnnnnnnnnnnnnnnnnnnnnnnnnnnnnnnnnnnnnnnnnnnnnnnnnnnnnnnnnnnnnnnnnnnnnnnnnnnnnnnnnnnnnnnnnnnnnnnnnnnnnnnnnnnnnnnnnnnnnnnnnnnnnnnnnnnnnnnnnnnnnnnnnnnnnnnnnnnnnnnnnnnnnnnnnnnnnnnnnnnnnnnnnnnnnnnnnnnnnnnnnnnnnnnnnnnnnnnnnnnnnnnnnnnnnnnnnnnnnnnnnnnnnnnnnnnnnnnnnnnnnnnnnnnnnnnnnnnnnnnnnnnnnnnnnnnnnnnnnnnnnnnnnnnnnnnnnnnnnnnnnnnnnnnnnnnnnnnnnnnnnnnnnnnnnnnnnnnnnnnnnnnnnnnnnnnnnnnnnnnnnnnnnnnnnnnnnnnnnnnnnnnnnnnnnnnnnnnnnnnnnnnnnnnnnnnnnnnnnnnnnnnnnnnnnnnnnnnnnnnnnnnnnnnnnnnnnnnnnnnnnnnnnnnnnnnnnnnnnnnnnnnnnnnnnnnnnnnnnnnnnnnnnnnnnnnnnnnnnnnnnnnnnnnnnnnnnnnnnnnnnnnnnnnnnnnnnnnnnnnnnnnnnnnnnnnnnnnnnnnnnnnnnnnnnnnnnnnnnnnnnnnnnnnnnnnnnnnnnnnnnnnnnnnnnnnnnnnnnnnnnnnnnnnnnnnnnnnnnnnnnnnnnnnnnnnnnnnnnnnnnnnnnnnnnnnnnnnnnnnnnnnnnnnnnnnnnnnnnnnnnnnnnnnnnnnnnnnnnnnnnnnnnnnnnnnnnnnnnnnnnnnnnnnnnnnnnnnnnnnnnnnnnnnnnnnnnnnnnnnnnnnnnnnnnnnnnnnnnnnnnnnnnnnnnnnnnnnnnnnnnnnnnnnnnnnnnnnnnnnnnnnnnnnnnnnnnnnnnnnnnnnnnnnnnnnnnnnnnnnnnnnnnnnnnnnnnnnnnnnnnnnnnnnnnnnnnnnnnnnnnnnnnnnnnnnnnnnnnnnnnnnnnnnnnnnnnnnnnnnnnnnnnnnnnnnnnnnnnnnnnnnnnnnnnnnnnnnnnnnnnnnnnnnnnnnnnnnnnnnnnnnnnnnnnnnnnnnnnnnnnnnnnnnnnnnnnnnnnnnnnnnnnnnnnnnnnnnnnnnnnnnnnnnnnnnnnnnnnnnnnnnnnnnnnnnnnnnnnnnnnnnnnnnnnnnnnnnnnnnnnnnnnnnnnnnnnnnnnnnnnnnnnnnnnnnnnnnnnnnnnnnnnnnnnnnnnnnnnnnnnnnnnnnnnnnnnnnnnnnnnnnnnnnnnnnnnnnnnnnnnnnnnnnnnnnnnnnnnnnnnnnnnnnnnnnnnnnnnnnnnnnnnnnnnnnnnnnnnnnnnnnnnnnnnnnnnnnnnnnnnnnnnnnnnnnnnnnnnnnnnnnnnnnnnnnnnnnnnnnnnnnnnnnnnnnnnnnnnnnnnnnnnnnnnnnnnnnnnnnnnnnnnnnnnnnnnnnnnnnnnnnnnnnnnnnnnnnnnnnnnnnnnnnnnnnnnnnnnnnnnnnnnnnnnnnnnnnnnnnnnnnnnnnnnnnnnnnnnnnnnnnnnnnnnnnnnnnnnnnnnnnnnnnnnnnnnnnnnnnnnnnnnnnnnnnnnnnnnnnnnnnnnnnnnnnnnnnnnnnnnnnnnnnnnnnnnnnnnnnnnnnnnnnnnnnnnnnnnnnnnnnnnnnnnnnnnnnnnnnnnnnnnnnnnnnnnnnnnnnnnnnnnnnnnnnnnnnnnnnnnnnnnnnnnnnnnnnnnnnnnnnnnnnnnnnnnnnnnnnnnnnnnnnnnnnnnnnnnnnnnnnnnnnnnnnnnnnnnnnnnnnnnnnnnnnnnnnnnnnnnnnnnnnnnnnnnnnnnnnnnnnnnnnnnnnnnnnnnnnnnnnnnnnnnnnnnnnnnnnnnnnnnnnnnnnnnnnnnnnnnnnnnnnnnnnnnnnnnnnnnnnnnnnnnnnnnnnnnnnnnnnnnnnnnnnnnnnnnnnnnnnnnnnnnnnnnnnnnnnnnnnnnnnnnnnnnnnnnnnnnnnnnnnnnnnnnnnnnnnnnnnnnnnnnnnnnnnnnnnnnnnnnnnnnnnnnnnnnnnnnnnnnnnnnnnnnnnnnnnnnnnnnnnnnnnnnnnnnnnnnnnnnnnnnnnnnnnnnnnnnnnnnnnnnnnnnnnnnnnnnnnnnnnnnnnnnnnnnnnnnnnnnnnnnnnnnnnnnnnnnnnnnnnnnnnnnnnnnnnnnnnnnnnnnnnnnnnnnnnnnnnnnnnnnnnnnnnnnnnnnnnnnnnnnnnnnnnnnnnnnnnnnnnnnnnnnnnnnnnnnnnnnnnnnnnnnnnnnnnnnnnnnnnnnnnnnnnnnnnnnnnnnnnnnnnnnnnnnnnnnnnnnnnnnnnnnnnnnnnnnnnnnnnnnnnnnnnnnnnnnnnnnnnnnnnnnnnnnnnnnnnnnnnnnnnnnnnnnnnnnnnnnnnnnnnnnnnnnnnnnnnnnnnnnnnnnnnnnnnnnnnnnnnnnnnnnnnnnnnnnnnnnnnnnnnnnnnnnnnnnnnnnnnnnnnnnnnnnnnnnnnnnnnnnnnnnnnnnnnnnnnnnnnnnnnnnnnnnnnnnnnnnnnnnnnnnnnnnnnnnnnnnnnnnnnnnnnnnnnnnnnnnnnnnnnnnnnnnnnnnnnnnnnnnnnnnnnnnnnnnnnnnnnnnnnnnnnnnnnnnnnnnnnnnnnnnnnnnnnnnnnnnnnnnnnnnnnnnnnnnnnnnnnnnnnnnnnnnnnnnnnnnnnnnnnnnnnnnnnnnnnnnnnnnnnnnnnnnnnnnnnnnnnnnnnnnnnnnnnnnnnnnnnnnnnnnnnnnnnnnnnnnnnnnnnnnnnnnnnnnnnnnnnnnnnnnnnnnnnnnnnnnnnnnnnnnnnnnnnnnnnnnnnnnnnnnnnnnnnnnnnnnnnnnnnnnnnnnnnnnnnnnnnnnnnnnnnnnnnnnnnnnnnnnnnnnnnnnnnnnnnnnnnnnnnnnnnnnnnnnnnnnnnnnnnnnnnnnnnnnnnnnnnnnnnnnnnnnnnnnnnnnnnnnnnnnnnnnnnnnnnnnnnnnnnnnnnnnnnnnnnnnnnnnnnnnnnnnnnnnnnnnnnnnnnnnnnnnnnnnnnnnnnnnnnnnnnnnnnnnnnnnnnnnnnnnnnnnnnnnnnnnnnnnnnnnnnnnnnnnnnnnnnnnnnnnnnnnnnnnnnnnnnnnnnnnnnnnnnnnnnnnnnnnnnnnnnnnnnnnnnnnnnnnnnnnnnnnnnnnnnnnnnnnnnnnnnnnnnnnnnnnnnnnnnnnnnnnnnnnnnnnnnnnnnnnnnnnnnnnnnnnnnnnnnnnnnnnnnnnnnnnnnnnnnnnnnnnnnnnnnnnnnnnnnnnnnnnnnnnnnnnnnnnnnnnnnnnnnnnnnnnnnnnnnnnnnnnnnnnnnnnnnnnnnnnnnnnnnnnnnnnnnnnnnnnnnnnnnnnnnnnnnnnnnnnnnnnnnnnnnnnnnnnnnnnnnnnnnnnnnnnnnnnnnnnnnnnnnnnnnnnnnnnnnnnnnnnnnnnnnnnnnnnnnnnnnnnnnnnnnnnnnnnnnnnnnnnnnnnnnnnnnnnnnnnnnnnnnnnnnnnnnnnnnnnnnnnnnnnnnnnnnnnnnnnnnnnnnnnnnnnnnnnnnnnnnnnnnnnnnnnnnnnnnnnnnnnnnnnnnnnnnnnnnnnnnnnnnnnnnnnnnnnnnnnnnnnnnnnnnnnnnnnnnnnnnnnnnnnnnnnnnnnnnnnnnnnnnnnnnnnnnnnnnnnnnnnnnnnnnnnnnnnnnnnnnnnnnnnnnnnnnnnnnnnnnnnnnnnnnnnnnnnnnnnnnnnnnnnnnnnnnnnnnnnnnnnnnnnnnnnnnnnnnnnnnnnnnnnnnnnnnnnnnnnnnnnnnnnnnnnnnnnnnnnnnnnnnnnnnnnnnnnnnnnnnnnnnnnnnnnnnnnnnnnnnnnnnnnnnnnnnnnnnnnnnnnnnnnnnnnnnnnnnnnnnnnnnnnnnnnnnnnnnnnnnnnnnnnnnnnnnnnnnnnnnnnnnnnnnnnnnnnnnnnnnnnnnnnnnnnnnnnnnnnnnnnnnnnnnnnnnnnnnnnnnnnnnnnnnnnnnnnnnnnnnnnnnnnnnnnnnnnnnnnnnnnnnnnnnnnnnccccacgtcttacttggccgccaaggtgacggccagtcggcggatgcgccaagcaattggccgtgggcttagaacacctgaggcggtgtgcacggttgtggttttggatgcgcgggcacacaacttaggtcgctttgtgccagagcgttttgcggcagattggtcgtctcggcaagtgtttgacgagggtgcccgccatgcggtggtgctgtccaaagcggagcgcgaccccgctttggccaaagccgcgctcagacactacggcgctcaatgccaacaagcgggttgttccgtgacagaggcgtgtcagctggacgtgcaccaccttgaccccgtaagcgaaggcgtgcgccgcacaaccttgaaggatgtgaccgtgctgtgtgcaaaccaccaccgacaggcccaccacgacatgaaaatggggctgaacgtgtcgtagcgcaacaaaaaacccgccatacctttgggtacgcgggttttgggagttctggcaaggcctgaaacctaaatgtggtggtgataggtggacttgaaccaccgaccccagcattatgaatgctgtgctctaaccaactgagctatatcaccgagcctgaaattatagccaaaattctcagggctttggcttgccgccaaaagtttttgttagccattttgtcgcgcctgtacgacgcgccaagcccttggttattggtgtttgaaggcgggtttgcgcttgtttatgaacgcatccatgccctctttttggtcttcggttgcaaacagcgcgtggaacagacggcgctcaaaacgcacgccttcgctgaggctgccttcaaacgcttggttcaccgcttcctttgccgccatgacactggggagggagtagttgcaaatcatcagggctgcgcccaaggcctcggtcatgagttggtcatcggcgaccacgcggctcaccagtccgccgcgctcggcttctgcagcgtccatcatgcggcctgtgagggccatgtccatggccttggctttgccaacggcgcgtggcaggcgctgcgtgccacctgcgccagggataacgcccaacttgatttcgggttggccaaatttggcgctctcgctggcaatgatgacgtcgcacatcatggccaattcacagccgccgccgagggcaaagccgctgacggcggcaataacgggcttgcgaacgctgcgaatggtttcccagttgcgcgtgatgtagtctgacttgtagacgtcagcaaaggtgtaggtggccatggcgccaatgtcggcaccagcggcaaaggctttttcactgcctgtgagcacaatgcagccaatgtcagggtcggcgtcgaatgcggttagcgccgcgccaagctcgtccattagcgcactgttgagggcattgagttgtttggggcggtttagggtgagtatgcccacgcggccttcggtgcggattaaaaccagttgctcactcatgtctgtgttctccaatgtggtgcgaaaagttgcttagaaaaagttgtttcgaaagttgcttcgacgtaagcggttgatcatagccaagcggtgagcttgctagggtctttcaccaccagttcggcgatctggttggcgtgggtcgatggccagatgagggggcacgacaacatgcggccatcgcgcgcgacaccggcaaccaatgggtgctgggctacgtcggcgtggcgtctcgcaatgttctccacatcgctcagtgactttacccgccattgatcggtgccatcaaatagtgtcacccattcgtcacccgccgccatgcccgcttgttcgcctgcaccgcctcttgccacgtgggtgatgcggatgccgtctcgctcaacgacacgcatgcccaagcgctgggcgagggtgccgctcttggccgccacggcgacaccgtaatgactaagcagtgcgtgtaccggcaggtcttcggtgctgtgtacccagtgcgcgagctgtgtggcgacgttggcgtgcccttgctggttgagcagggcgtagatgtcggcctcactgatggtgccgcctttgcttttgacccataggccgcgcatgagggtgtcgagatcgccgccttgttggcgcagcatgaggtcggtgcacagcgctattagcgcccctttggtgtagtagctaacggtggcgttgggcgtgttttcgccaatgcggtagtacttgacccacgcgtcatagctagactgggcaacgctttgcagatgccgccctggggtggccgcaacgtggttaatggatttggccagcagcgtgagataggtgggcgtatcaatgagtttggcgcgttgcagaaacaggtcatcgtagtagctggtaaagccttcaaagaaccacagcagctcggtgtagttctcttggttgaagtcgatgcttgcaaactcggatgggcgcaggcgcttgacgttccatgtgtggaagtactcatggctaatgaggccaagtaattggttgtagccagcgccttgtgcatgggggggcgctgcctcgccagcgacggccgttaggggcaagtcggcacgctggcaaatgagtgcggtgctggcgatgtgctctagcccgccgtagccgttttcagtggcgtgaagcatgaagacgtagcggtcaaagggtagttggcgttgcggttgtttgccgtgccaaaacgtgatctctgtttcgcaaattcggcgggtgtcggcaactaattttttgacatcaaacccgggcgcggtgtggttgccaatgcccgtgacaacgagttcatgcggtacgccagagaccttaaaccgactgacgtaaaaatcacccaaggtaaagggactgtcggcgagctcgccgtagttgcgggcggtgtagcgcccgaagccacgcgcgtcgatttgccgcgcgggcaatgcggtagacagccgccacgcattgaacgcgggcgcggtggggcgctcgacggagatggtttgtatctcgtcttcgcccccgaccacttgcaaacacaggctggtggggttgaagaagccgcgggtgttgtccaaaaaggcggttcgcaccgaggcgtcaaaggcgtagatttggtaattgagctccagcgggcgtttgccgtcggattccactagccactcatttttactgcactgtgtgatttggcaag

SEQ ID NO: 166 - DNA, 13121 bp, Artificial Sequence
  Synthetic Oligonucleotide
  misc_feature (1)..(6470): n is a, c, g, or t
nnnnnnnnnnnnnnnnnnnnnnnnnnnnnnnnnnnnnnnnnnnnnnnnnnnnnnnnnnnnnnnnnnnnnnnnnnnnnnnnnnnnnnnnnnnnnnnnnnnnnnnnnnnnnnnnnnnnnnnnnnnnnnnnnnnnnnnnnnnnnnnnnnnnnnnnnnnnnnnnnnnnnnnnnnnnnnnnnnnnnnnnnnnnnnnnnnnnnnnnnnnnnnnnnnnnnnnnnnnnnnnnnnnnnnnnnnnnnnnnnnnnnnnnnnnnnnnnnnnnnnnnnnnnnnnnnnnnnnnnnnnnnnnnnnnnnnnnnnnnnnnnnnnnnnnnnnnnnnnnnnnnnnnnnnnnnnnnnnnnnnnnnnnnnnnnnnnnnnnnnnnnnnnnnnnnnnnnnnnnnnnnnnnnnnnnnnnnnnnnnnnnnnnnnnnnnnnnnnnnnnnnnnnnnnnnnnnnnnnnnnnnnnnnnnnnnnnnnnnnnnnnnnnnnnnnnnnnnnnnnnnnnnnnnnnnnnnnnnnnnnnnnnnnnnnnnnnnnnnnnnnnnnnnnnnnnnnnnnnnnnnnnnnnnnnnnnnnnnnnnnnnnnnnnnnnnnnnnnnnnnnnnnnnnnnnnnnnnnnnnnnnnnnnnnnnnnnnnnnnnnnnnnnnnnnnnnnnnnnnnnnnnnnnnnnnnnnnnnnnnnnnnnnnnnnnnnnnnnnnnnnnnnnnnnnnnnnnnnnnnnnnnnnnnnnnnnnnnnnnnnnnnnnnnnnnnnnnnnnnnnnnnnnnnnnnnnnnnnnnnnnnnnnnnnnnnnnnnnnnnnnnnnnnnnnnnnnnnnnnnnnnnnnnnnnnnnnnnnnnnnnnnnnnnnnnnnnnnnnnnnnnnnnnnnnnnnnnnnnnnnnnnnnnnnnnnnnnnnnnnnnnnnnnnnnnnnnnnnnnnnnnnnnnnnnnnnnnnnnnnnnnnnnnnnnnnnnnnnnnnnnnnnnnnnnnnnnnnnnnnnnnnnnnnnnnnnnnnnnnnnnnnnnnnnnnnnnnnnnnnnnnnnnnnnnnnnnnnnnnnnnnnnnnnnnnnnnnnnnnnnnnnnnnnnnnnnnnnnnnnnnnnnnnnnnnnnnnnnnnnnnnnnnnnnnnnnnnnnnnnnnnnnnnnnnnnnnnnnnnnnnnnnnnnnnnnnnnnnnnnnnnnnnnnnnnnnnnnnnnnnnnnnnnnnnnnnnnnnnnnnnnnnnnnnnnnnnnnnnnnnnnnnnnnnnnnnnnnnnnnnnnnnnnnnnnnnnnnnnnnnnnnnnnnnnnnnnnnnnnnnnnnnnnnnnnnnnnnnnnnnnnnnnnnnnnnnnnnnnnnnnnnnnnnnnnnnnnnnnnnnnnnnnnnnnnnnnnnnnnnnnnnnnnnnnnnnnnnnnnnnnnnnnnnnnnnnnnnnnnnnnnnnnnnnnnnnnnnnnnnnnnnnnnnnnnnnnnnnnnnnnnnnnnnnnnnnnnnnnnnnnnnnnnnnnnnnnnnnnnnnnnnnnnnnnnnnnnnnnnnnnnnnnnnnnnnnnnnnnnnnnnnnnnnnnnnnnnnnnnnnnnnnnnnnnnnnnnnnnnnnnnnnnnnnnnnnnnnnnnnnnnnnnnnnnnnnnnnnnnnnnnnnnnnnnnnnnnnnnnnnnnnnnnnnnnnnnnnnnnnnnnnnnnnnnnnnnnnnnnnnnnnnnnnnnnnnnnnnnnnnnnnnnnnnnnnnnnnnnnnnnnnnnnnnnnnnnnnnnnnnnnnnnnnnnnnnnnnnnnnnnnnnnnnnnnnnnnnnnnnnnnnnnnnnnnnnnnnnnnnnnnnnnnnnnnnnnnnnnnnnnnnnnnnnnnnnnnnnnnnnnnnnnnnnnnnnnnnnnnnnnnnnnnnnnnnnnnnnnnnnnnnnnnnnnnnnnnnnnnnnnnnnnnnnnnnnnnnnnnnnnnnnnnnnnnnnnnnnnnnnnnnnnnnnnnnnnnnnnnnnnnnnnnnnnnnnnnnnnnnnnnnnnnnnnnnnnnnnnnnnnnnnnnnnnnnnnnnnnnnnnnnnnnnnnnnnnnnnnnnnnnnnnnnnnnnnnnnnnnnnnnnnnnnnnnnnnnnnnnnnnnnnnnnnnnnnnnnnnnnnnnnnnnnnnnnnnnnnnnnnnnnnnnnnnnnnnnnnnnnnnnnnnnnnnnnnnnnnnnnnnnnnnnnnnnnnnnnnnnnnnnnnnnnnnnnnnnnnnnnnnnnnnnnnnnnnnnnnnnnnnnnnnnnnnnnnnnnnnnnnnnnnnnnnnnnnnnnnnnnnnnnnnnnnnnnnnnnnnnnnnnnnnnnnnnnnnnnnnnnnnnnnnnnnnnnnnnnnnnnnnnnnnnnnnnnnnnnnnnnnnnnnnnnnnnnnnnnnnnnnnnnnnnnnnnnnnnnnnnnnnnnnnnnnnnnnnnnnnnnnnnnnnnnnnnnnnnnnnnnnnnnnnnnnnnnnnnnnnnnnnnnnnnnnnnnnnnnnnnnnnnnnnnnnnnnnnnnnnnnnnnnnnnnnnnnnnnnnnnnnnnnnnnnnnnnnnnnnnnnnnnnnnnnnnnnnnnnnnnnnnnnnnnnnnnnnnnnnnnnnnnnnnnnnnnnnnnnnnnnnnnnnnnnnnnnnnnnnnnnnnnnnnnnnnnnnnnnnnnnnnnnnnnnnnnnnnnnnnnnnnnnnnnnnnnnnnnnnnnnnnnnnnnnnnnnnnnnnnnnnnnnnnnnnnnnnnnnnnnnnnnnnnnnnnnnnnnnnnnnnnnnnnnnnnnnnnnnnnnnnnnnnnnnnnnnnnnnnnnnnnnnnnnnnnnnnnnnnnnnnnnnnnnnnnnnnnnnnnnnnnnnnnnnnnnnnnnnnnnnnnnnnnnnnnnnnnnnnnnnnnnnnnnnnnnnnnnnnnnnnnnnnnnnnnnnnnnnnnnnnnnnnnnnnnnnnnnnnnnnnnnnnnnnnnnnnnnnnnnnnnnnnnnnnnnnnnnnnnnnnnnnnnnnnnnnnnnnnnnnnnnnnnnnnnnnnnnnnnnnnnnnnnnnnnnnnnnnnnnnnnnnnnnnnnnnnnnnnnnnnnnnnnnnnnnnnnnnnnnnnnnnnnnnnnnnnnnnnnnnnnnnnnnnnnnnnnnnnnnnnnnnnnnnnnnnnnnnnnnnnnnnnnnnnnnnnnnnnnnnnnnnnnnnnnnnnnnnnnnnnnnnnnnnnnnnnnnnnnnnnnnnnnnnnnnnnnnnnnnnnnnnnnnnnnnnnnnnnnnnnnnnnnnnnnnnnnnnnnnnnnnnnnnnnnnnnnnnnnnnnnnnnnnnnnnnnnnnnnnnnnnnnnnnnnnnnnnnnnnnnnnnnnnnnnnnnnnnnnnnnnnnnnnnnnnnnnnnnnnnnnnnnnnnnnnnnnnnnnnnnnnnnnnnnnnnnnnnnnnnnnnnnnnnnnnnnnnnnnnnnnnnnnnnnnnnnnnnnnnnnnnnnnnnnnnnnnnnnnnnnnnnnnnnnnnnnnnnnnnnnnnnnnnnnnnnnnnnnnnnnnnnnnnnnnnnnnnnnnnnnnnnnnnnnnnnnnnnnnnnnnnnnnnnnnnnnnnnnnnnnnnnnnnnnnnnnnnnnnnnnnnnnnnnnnnnnnnnnnnnnnnnnnnnnnnnnnnnnnnnnnnnnnnnnnnnnnnnnnnnnnnnnnnnnnnnnnnnnnnnnnnnnnnnnnnnnnnnnnnnnnnnnnnnnnnnnnnnnnnnnnnnnnnnnnnnnnnnnnnnnnnnnnnnnnnnnnnnnnnnnnnnnnnnnnnnnnnnnnnnnnnnnnnnnnnnnnnnnnnnnnnnnnnnnnnnnnnnnnnnnnnnnnnnnnnnnnnnnnnnnnnnnnnnnnnnnnnnnnnnnnnnnnnnnnnnnnnnnnnnnnnnnnnnnnnnnnnnnnnnnnnnnnnnnnnnnnnnnnnnnnnnnnnnnnnnnnnnnnnnnnnnnnnnnnnnnnnnnnnnnnnnnnnnnnnnnnnnnnnnnnnnnnnnnnnnnnnnnnnnnnnnnnnnnnnnnnnnnnnnnnnnnnnnnnnnnnnnnnnnnnnnnnnnnnnnnnnnnnnnnnnnnnnnnnnnnnnnnnnnnnnnnnnnnnnnnnnnnnnnnnnnnnnnnnnnnnnnnnnnnnnnnnnnnnnnnnnnnnnnnnnnnnnnnnnnnnnnnnnnnnnnnnnnnnnnnnnnnnnnnnnnnnnnnnnnnnnnnnnnnnnnnnnnnnnnnnnnnnnnnnnnnnnnnnnnnnnnnnnnnnnnnnnnnnnnnnnnnnnnnnnnnnnnnnnnnnnnnnnnnnnnnnnnnnnnnnnnnnnnnnnnnnnnnnnnnnnnnnnnnnnnnnnnnnnnnnnnnnnnnnnnnnnnnnnnnnnnnnnnnnnnnnnnnnnnnnnnnnnnnnnnnnnnnnnnnnnnnnnnnnnnnnnnnnnnnnnnnnnnnnnnnnnnnnnnnnnnnnnnnnnnnnnnnnnnnnnnnnnnnnnnnnnnnnnnnnnnnnnnnnnnnnnnnnnnnnnnnnnnnnnnnnnnnnnnnnnnnnnnnnnnnnnnnnnnnnnnnnnnnnnnnnnnnnnnnnnnnnnnnnnnnnnnnnnnnnnnnnnnnnnnnnnnnnnnnnnnnnnnnnnnnnnnnnnnnnnnnnnnnnnnnnnnnnnnnnnnnnnnnnnnnnnnnnnnnnnnnnnnnnnnnnnnnnnnnnnnnnnnnnnnnnnnnnnnnnnnnnnnnnnnnnnnnnnnnnnnnnnnnnnnnnnnnnnnnnnnnnnnnnnnnnnnnnnnnnnnnnnnnnnnnnnnnnnnnnnnnnnnnnnnnnnnnnnnnnnnnnnnnnnnnnnnnnnnnnnnnnnnnnnnnnnnnnnnnnnnnnnnnnnnnnnnnnnnnnnnnnnnnnnnnnnnnnnnnnnnnnnnnnnnnnnnnnnnnnnnnnnnnnnnnnnnnnnnnnnnnnnnnnnnnnnnnnnnnnnnnnnnnnnnnnnnnnnnnnnnnnnnnnnnnnnnnnnnnnnnnnnnnnnnnnnnnnnnnnnnnnnnnnnnnnnnnnnnnnnnnnnnnnnnnnnnnnnnnnnnnnnnnnnnnnnnnnnnnnnnnnnnnnnnnnnnnnnnnnnnnnnnnnnnnnnnnnnnnnnnnnnnnnnnnnnnnnnnnnnnnnnnnnnnnnnnnnnnnnnnnnnnnnnnnnnnnnnnnnnnnnnnnnnnnnnnnnnnnnnnnnnnnnnnnnnnnnnnnnnnnnnnnnnnnnnnnnnnnnnnnnnnnnnnnnnnnnnnnnnnnnnnnnnnnnnnnnnnnnnnnnnnnnnnnnnnnnnnnnnnnnnnnnnnnnnnnnnnnnnnnnnnnnnnnnnnnnnnnnnnnnnnnnnnnnnnnnnnnnnnnnnnnnnnnnnnnnnnnnnnnnnnnnnnnnnnnnnnnnnnnnnnnnnnnnnnnnnnnnnnnnnnnnnnnnnnnnnnnnnnnnnnnnnnnnnnnnnnnnnnnnnnnnnnnnnnnnnnnnnnnnnnnnnnnnnnnnnnnnnnnnnnnnnnnnnnnnnnnnnnnnnnnnnnnnnnnnnnnnnnnnnnnnnnnnnnnnnnnnnnnnnnnnnnnnnnnnnnnnnnnnnnnnnnnnnnnnnnnnnnnnnnnnnnnnnnnnnnnnnnnnnnnnnnnnnnnnnnnnnnnnnnnnnnnnnnnnnnnnnnnnnnnnnnnnnnnnnnnnnnnnnnnnnnnnnnnnnnnnnnnnnnnnnnnnnnnnnnnnnnnnnnnnnnnnnnnnnnnnnnnnnnnnnnnnnnnnnnnnnnnnnnnnnnnnnnnnnnnnnnnnnnnnnnnnnnnnnnnnnnnnnnnnnnnnnnnnnnnnnnnnnnnnnnnnnnnnnnnnnnnnnnnnnnnnnnnnnnnnnnnnnnnnnnnnnnnnnnnnnnnnnnnnnnnnnnnnnnnnnnnnnnnnnnnnnnnnnnnnnnnnnnnnnnnnnnnnnnnnnnnnnnnnnnnnnnnnnnnnnnnnnnnnnnnnnnnnnnnnnnnnnnnnnnnnnnnnnnnnnnnnnnnnnnnnnnnnnnnnnnnnnnnnnnnnnnnnnnnnnnnnnnnnnnnnnnnnnnnnnnnnnnnnnnnnnnnnnnnnnnnnnnnnnnnnnnnnnnnnnnnnnnnnnnnnnnnnnnnnnnnnnnnnnnnnnnnnnnnnnnnnnnnnnnnnnnnnnnnnnnnnnnnnnnnnnnnnnnnnnnnnnnnnnnnnnnnnnnnnnnnnnnnnnnnnnnnnnnnnnnnnnnnnnnnnnnnnnnnnnnnnnnnnnnnnnnnnnnnnnnnnnnnnnnnnnnnnnnnnnnnnnnnnnnnnnnnnnnnnnnnnnnnnnnnnnnnnnnnnnnnnnnnnnnnnnnnnnnnnnnnnnnnnnnnnnnnnnnnnnnnnnnnnnnnnnnnnnnnnnnnnnnnnnnnnnnnnnnnnnnnnnnnnnnnnnnnnnnnnnnnnnnnnnnnnnnnnnnnnnnnnnnnnnnnnnnnnnnnnnnnnnnnnnnnnnnnnnnnnnnnnnnnnnnnnnnnnnnnnnnnnnnnnnnnnnnnnnnnnnnnnnnnnnnnnnnnnnnnnnnnnnnnnnnnnnnnnnnnnnnnnnnnnnnnnnnnnnnnnnnnnnnnnnnnnnnncggcaaagttcacctcaccgcattgggtgaacatggggttgatcagccaagggtctatgcccagcaatttgctgaaacgcttggccacttcgtcgtaactggtgaaatgctggcttttgcggcgtacgcaccagcccgcgtgcaaaggcggcagcaaatactgctcgtgcaggtcttccaagatgccggggatgcccgcgctcaggtcgttgttgagcaaaatcgtgcaggggtcgaagtctttcagtcccaagcgggttttgttgcgaatcaccggctcgagcttgacagtttcgccgttgggcaactcgatggtggtgtcttctttgatttcggggttaatcgagccaatgcgtacattcagccccgccatgttgaagatgcgtgccagctgcgccacattgctcaggtaaaacatgttgcgggtgtggttctcgggaatcagcaacaggttgcgcgcttcgggacaaattttctcgatggccaccatggctgcttgcaccgccagtggcagcatctcgggcgtgaggttgttccagccgccggggtagaggttggtgtccacgggcgcaagcttgaagcccgcgttgcgaatgtcgaccgagctgtaaaaaggcggcgtgtgctccatccactccatgcgaaaccagcgctcgatggcgggcatagagtcgaggatgcgctgctcaagctcgttgatggggccggtcagcgcggtgatgaggtgaggaaccatagggtcgttgggtaagagtaaggtttgaatgtgggggtgattctgacagcttcaagccgagggcttgagactggctccacgatggttgggaatgcctgtgtagcttttttgattttgggcaacaggggttaggagaatttgattatcaagaaaacccagactcccccttatttttgtaacctataagatatatttttatacataattacaagtattattgatatttattaattctttcagtttgatgcctgctagcaggcgaaggttgatggaatgggaggccaattgacaccctttatccttcgcgcccacttacgcacccccgtaatacggcgaggtcatgtcaccttggacgcgctgctgatgtcgtgtttagcttgcggcgatgtgtctcacttgctgatgtgcgaggacgacttgtactttgccagttcaggttttgtggtggatgcacatgcttcacagaaagcatcgtttgtggccagcatgcgcccagaacactcactacattggttagagcttcttaggcccaacaccaaagatggcgatctaaaaattggcttgggcagacagcgtgatgccggcaacatcatcaacgcctacaacgccatcgttgcaaacgccatcgagtggtatgccacaggtcatatgcaagccgtgctggaggtggtcaagcacattccttttataggtaagcgcagaaccgcaggttatggcgaagttgttcgctgggaagcagaagccggtgagttagatggcttggtgggctatgcagacgatcccttgcgcccagtacccacccaacgctggacttacggtggcgaatggatacctgaagaagcagcttggaaagcgccctactgggatgtacgcaaccgcacccgatgttttgtgcctcagttgtgacatgaacggccccgagttttttatgcaccatgccggctatcgcctgctgccgcttgaacgtcacacccaaaatgcggtggctgatgccgacaccttgctaagcatgtctttgccgttacacaccggcaagactctgcgcttgtcctcatgctggatggtgatcacgcaccaatgggttgccaccagtttcaaaacgttgccagagcttggttttcgccacgacatggaacgcaaaacagccattcaagccgccctcaagtcgggcgagccttgcatgttgctggcactgggcaaacgcaccatggccgcacgcgatctgtttgtcacctatgaccctcgcgctgcacgcttgtgcagcgaaggcgcagtgaaaacctacgacgccacccaggagaaaacatggacatcttgatagacaaacctccgcgtattcgcggttatgccctgcatcgcatcgtggagcaataccggcagggcaaacctgctttatgggctgacgagggtccacaactgcgcattcgccctgaagaggccaccccgcccatttacgacatcggcaaactactggccttcaccaccaccgcttgcgtatcgttcagcagcggacacaaacacaaatacctgccgctggaagactggcggggacgcagggtatggcttgacaagcaagggcataaacatggttttgaaattgtgggcgtgcacatcaggccagccatgcaagaggtaaatacgcacgacggcagacgcttcaagttggatgccaccgaatttaccggcctattgaaagtggtcgaaccccaaacctttgcactgtgcttgatcaaaggcattggcaaagtgggcaaggcctttggcctgaacctgctcatcgttcagtaagcaccgaaagacaaacatgaccacaaaaccaaccctgatcgccaacattgacttgcaaactttacaacccctcaccttctcccaccacagcacagagggcctgccactgctgacccgaggcgtggacgctgagggaagacaccagcgcactgtttacatccctgcggcacaactgcgtggccgattgcgccacgaagcggcactggccgagttgcgaactcgccccgaaaaagccaagctcgaagacgcttacctgttggccttaggccaagacctgcgtccgaatgaagacgatgaacccgaggccatcaaactgaaagagcaaatcacgtttcgccaaaaaaatcctttgctcgacatctttggcacgtggaaagtagccagccgtttgtttgtgtcgcacctcctacccagtgtcaatgtgcagcccgataaagtcaggcatatccgccgcgacctcgacaccaaccccgacatgatggccttgttggacgaagcggagcaagaccgcttatatgagcgacaaggcaatcaaggcttggcctccaaagccgagggtttgatcaaactcgccaaccgcgaattggccgctgcacgaaaagccaaagatgccgccaagatggatgaactccacgcaaaaattgaagaactcaaagcgctgaagcaaactcaaaaaggcgaagaccaatccgacaacaccaagcatttattagagctgcaaatcatccctgcaggcattaccctgagcggcaaactcacactccaacacgccacagcgtttgacctacttaccttgctcacagcctttcatggtttcagccgacaaccttatttgggcgcacaacgcgccagaggttgtggcgaggtggcaggccaagttagctttaaaacctcgggcggtgaggtgttggccgtgctgaactttggcagccaccaagatgcctcggtgcaatggactgaagcaggctatgcgtttgtacagccagaaacagctgctcacgcggcatgagctttcgcagccccgagcagcagcaatatgcccggctgattgaaaccgctttgcagcccggcccgccgcttttggcaggcgcggcacctgggttgggcaaaacccatggctacagcatccccttggtgcgatcgggactgcgcatagccattgccatgagcactcgccagttgatcgaccaatacctgggcagtgctgcacttgaagcggctttgcagggcacacatgtcagcgtggtggctttacaaacccgccacagttttagcagcgcccgggcctaccaagaacaccgccagcaagccttggccgctcaagtgctggtgctgacccacgccgctgcactcatcgacagtttgcaagctggctatgctcatcttcgtgagcgcgatgtggtgttgtttgacgaggccgacttgctggccgacgcagccgatttgcgcagcacctttcgtttggggcctgacaccctcaaagcctgcggtgctactgggttgtcacccaaggccgccgccgacaaagcgtttgagtccagcgacatcgaagaacgttgtgctgcacgcgccatcttgctggctttagaacgaccggctttttacaaggtggtgggctttgaagaagacggtgcattggtgctcaaacaccgcatgcctggtcgcatgctcaagccattggtgcaagcggccaagcgttgcgtcttcaccagtggcaccttgcaagtacagggccgttttgaccatttcacccgtgcgttgggcttgacgcaaatcgcacctgaaagtcgacacatcgaccccgaacaccacggcgcgctgaagatggatgtggcccccgacaacttggacacacccgccatggccctgcgcattgctgttgccaagcggccaacgctggtgctgaccaacagccacgacatgagccatcaactgggccaacacctgtccgaggcagtggtgcgcggcccccaagagccattggcagaagccgtgcaacgctgccctgacgacggcttgctgattgcggcgggagcttggtcgggcttggatgcgccgcgcctgcgctggcaaaccgttgtcatcccgcaaaccccttatggaccccctgcggtggtggatggccagcaactcaccacttacctcgacagcgccgtggtggccttgcgacgcacccaccaaggtttgcaccgaggccttcgtacacccgacgccgtctgtacattgttgttgttagacccgcgcagcgcacgccccgcattgcgcgaggccatcccaaagcgttttcaaaccgactgggccctgtttgaggaagggggtgccgtgttgcaaacccacttgaagcgagaacgccatgcccagctgcgcaaagccgccttgaaacactatggcatgcgttgcatggacgctggctgtccagccacctctgaccatttgcttgaggttcaccacacccgccccatcagccaaggcgaacgccgcaccacgctcaacgaggtggtggttttgtgcaaaaaccaccacgcccaagcccaccacgacatgaaaatggccgcttttttggctgctgaaaacgatgaaaacccaatgctttcaaggctttaggccgtgtcggctaaagccgccatgtttttgtgcggttactagaacgtcatcaacgcacagcaagccgccgaccttgctcaagccgccgtgtttttgtgcggttactagaactatcctcccgttgagtccacaaacaccgcagctcaagccgccatgtttttgtgcggttactagaaccgaaatacgtttaggcattgacagcctcctgctcaagccgccatgtttttgtgcggttactagaactccacgtccagcgggcaagcgtcgatttcagctcaagccgccatgtttttgtgcggttactagaacgtcttgttttgctcaacatcgagagcatctggctcaagccgccatgtttttgtgcggttactaaaattaggtctcgcgaaaatactcacgcattcccgctcaagccgccatgtttttgtgcggttactttgttgggattgccgcgctatcgctcgtaacagcatcaaatgtgagcctcaaaatactattaattaaataaaaaacaataatttagaatctttttaggtattctttgaaagtcttttaaatagacttgtcaaaaaagaaacgcctccactagggaggcgtcggtccggagatgcgatctccgggggggttaacgaaatgaattttataaggaaaacctaagtaatgtgcaaactcaatttcccaatttacccttaaaaaatcaatatttgttcttcttatgcaacgcgttgtcgcttatgtggacggatttaacctttactttggaatgaaaagcaaaggctggcgaaaactttactggctcaatttagttgcattggcaaatgcactgctaaagccagatcaacagttacaaaaggttcactacttcacgtcccgcattcgaacgacgagccgcaaccaagccgatattcaacgccaaaagacctaccttgaggcattggcacacctccctgatcttgatattcattttggacattttttggaaaaacctcggcaatgcaatgcctgtggtgctcaatggttgggctatgaagaaaaaatgaccgatgtcaacatggccgtacggttgctgaccgatgcctatgaagacctttttgattgcgccatattgatctctggtgacagcgacctcactactcctgtcactacgcttaggcgcctattcccttccaaacgcttgatcgtggctttcccacccgggcgcaagtccaacgagttgtcaaaagcatccaacggtttttttaccatcggtgaagctcatctgagacagtcgcaatttgcagatcaaatttccagaccagatggctatgccttaacacgaccagccacttggaaataagccgtcttacccccgcacttcccccgcgcccaacaccacatatttcaatgaggtaagaccctcaatacccaccgggccacgcgcatggaacttgtcggtggaaataccaatctcggcgcccaagccaaactcaaaaccgtcggcaaagcgggtgctggcgttgaccatcacgctggctgaatccacc

SEQ ID NO: 167 - DNA, 13093 bp, Artificial Sequence
  Synthetic Oligonucleotide
  misc_feature (1)..(7178): n is a, c, g, or t
nnnnnnnnnnnnnnnnnnnnnnnnnnnnnnnnnnnnnnnnnnnnnnnnnnnnnnnnnnnnnnnnnnnnnnnnnnnnnnnnnnnnnnnnnnnnnnnnnnnnnnnnnnnnnnnnnnnnnnnnnnnnnnnnnnnnnnnnnnnnnnnnnnnnnnnnnnnnnnnnnnnnnnnnnnnnnnnnnnnnnnnnnnnnnnnnnnnnnnnnnnnnnnnnnnnnnnnnnnnnnnnnnnnnnnnnnnnnnnnnnnnnnnnnnnnnnnnnnnnnnnnnnnnnnnnnnnnnnnnnnnnnnnnnnnnnnnnnnnnnnnnnnnnnnnnnnnnnnnnnnnnnnnnnnnnnnnnnnnnnnnnnnnnnnnnnnnnnnnnnnnnnnnnnnnnnnnnnnnnnnnnnnnnnnnnnnnnnnnnnnnnnnnnnnnnnnnnnnnnnnnnnnnnnnnnnnnnnnnnnnnnnnnnnnnnnnnnnnnnnnnnnnnnnnnnnnnnnnnnnnnnnnnnnnnnnnnnnnnnnnnnnnnnnnnnnnnnnnnnnnnnnnnnnnnnnnnnnnnnnnnnnnnnnnnnnnnnnnnnnnnnnnnnnnnnnnnnnnnnnnnnnnnnnnnnnnnnnnnnnnnnnnnnnnnnnnnnnnnnnnnnnnnnnnnnnnnnnnnnnnnnnnnnnnnnnnnnnnnnnnnnnnnnnnnnnnnnnnnnnnnnnnnnnnnnnnnnnnnnnnnnnnnnnnnnnnnnnnnnnnnnnnnnnnnnnnnnnnnnnnnnnnnnnnnnnnnnnnnnnnnnnnnnnnnnnnnnnnnnnnnnnnnnnnnnnnnnnnnnnnnnnnnnnnnnnnnnnnnnnnnnnnnnnnnnnnnnnnnnnnnnnnnnnnnnnnnnnnnnnnnnnnnnnnnnnnnnnnnnnnnnnnnnnnnnnnnnnnnnnnnnnnnnnnnnnnnnnnnnnnnnnnnnnnnnnnnnnnnnnnnnnnnnnnnnnnnnnnnnnnnnnnnnnnnnnnnnnnnnnnnnnnnnnnnnnnnnnnnnnnnnnnnnnnnnnnnnnnnnnnnnnnnnnnnnnnnnnnnnnnnnnnnnnnnnnnnnnnnnnnnnnnnnnnnnnnnnnnnnnnnnnnnnnnnnnnnnnnnnnnnnnnnnnnnnnnnnnnnnnnnnnnnnnnnnnnnnnnnnnnnnnnnnnnnnnnnnnnnnnnnnnnnnnnnnnnnnnnnnnnnnnnnnnnnnnnnnnnnnnnnnnnnnnnnnnnnnnnnnnnnnnnnnnnnnnnnnnnnnnnnnnnnnnnnnnnnnnnnnnnnnnnnnnnnnnnnnnnnnnnnnnnnnnnnnnnnnnnnnnnnnnnnnnnnnnnnnnnnnnnnnnnnnnnnnnnnnnnnnnnnnnnnnnnnnnnnnnnnnnnnnnnnnnnnnnnnnnnnnnnnnnnnnnnnnnnnnnnnnnnnnnnnnnnnnnnnnnnnnnnnnnnnnnnnnnnnnnnnnnnnnnnnnnnnnnnnnnnnnnnnnnnnnnnnnnnnnnnnnnnnnnnnnnnnnnnnnnnnnnnnnnnnnnnnnnnnnnnnnnnnnnnnnnnnnnnnnnnnnnnnnnnnnnnnnnnnnnnnnnnnnnnnnnnnnnnnnnnnnnnnnnnnnnnnnnnnnnnnnnnnnnnnnnnnnnnnnnnnnnnnnnnnnnnnnnnnnnnnnnnnnnnnnnnnnnnnnnnnnnnnnnnnnnnnnnnnnnnnnnnnnnnnnnnnnnnnnnnnnnnnnnnnnnnnnnnnnnnnnnnnnnnnnnnnnnnnnnnnnnnnnnnnnnnnnnnnnnnnnnnnnnnnnnnnnnnnnnnnnnnnnnnnnnnnnnnnnnnnnnnnnnnnnnnnnnnnnnnnnnnnnnnnnnnnnnnnnnnnnnnnnnnnnnnnnnnnnnnnnnnnnnnnnnnnnnnnnnnnnnnnnnnnnnnnnnnnnnnnnnnnnnnnnnnnnnnnnnnnnnnnnnnnnnnnnnnnnnnnnnnnnnnnnnnnnnnnnnnnnnnnnnnnnnnnnnnnnnnnnnnnnnnnnnnnnnnnnnnnnnnnnnnnnnnnnnnnnnnnnnnnnnnnnnnnnnnnnnnnnnnnnnnnnnnnnnnnnnnnnnnnnnnnnnnnnnnnnnnnnnnnnnnnnnnnnnnnnnnnnnnnnnnnnnnnnnnnnnnnnnnnnnnnnnnnnnnnnnnnnnnnnnnnnnnnnnnnnnnnnnnnnnnnnnnnnnnnnnnnnnnnnnnnnnnnnnnnnnnnnnnnnnnnnnnnnnnnnnnnnnnnnnnnnnnnnnnnnnnnnnnnnnnnnnnnnnnnnnnnnnnnnnnnnnnnnnnnnnnnnnnnnnnnnnnnnnnnnnnnnnnnnnnnnnnnnnnnnnnnnnnnnnnnnnnnnnnnnnnnnnnnnnnnnnnnnnnnnnnnnnnnnnnnnnnnnnnnnnnnnnnnnnnnnnnnnnnnnnnnnnnnnnnnnnnnnnnnnnnnnnnnnnnnnnnnnnnnnnnnnnnnnnnnnnnnnnnnnnnnnnnnnnnnnnnnnnnnnnnnnnnnnnnnnnnnnnnnnnnnnnnnnnnnnnnnnnnnnnnnnnnnnnnnnnnnnnnnnnnnnnnnnnnnnnnnnnnnnnnnnnnnnnnnnnnnnnnnnnnnnnnnnnnnnnnnnnnnnnnnnnnnnnnnnnnnnnnnnnnnnnnnnnnnnnnnnnnnnnnnnnnnnnnnnnnnnnnnnnnnnnnnnnnnnnnnnnnnnnnnnnnnnnnnnnnnnnnnnnnnnnnnnnnnnnnnnnnnnnnnnnnnnnnnnnnnnnnnnnnnnnnnnnnnnnnnnnnnnnnnnnnnnnnnnnnnnnnnnnnnnnnnnnnnnnnnnnnnnnnnnnnnnnnnnnnnnnnnnnnnnnnnnnnnnnnnnnnnnnnnnnnnnnnnnnnnnnnnnnnnnnnnnnnnnnnnnnnnnnnnnnnnnnnnnnnnnnnnnnnnnnnnnnnnnnnnnnnnnnnnnnnnnnnnnnnnnnnnnnnnnnnnnnnnnnnnnnnnnnnnnnnnnnnnnnnnnnnnnnnnnnnnnnnnnnnnnnnnnnnnnnnnnnnnnnnnnnnnnnnnnnnnnnnnnnnnnnnnnnnnnnnnnnnnnnnnnnnnnnnnnnnnnnnnnnnnnnnnnnnnnnnnnnnnnnnnnnnnnnnnnnnnnnnnnnnnnnnnnnnnnnnnnnnnnnnnnnnnnnnnnnnnnnnnnnnnnnnnnnnnnnnnnnnnnnnnnnnnnnnnnnnnnnnnnnnnnnnnnnnnnnnnnnnnnnnnnnnnnnnnnnnnnnnnnnnnnnnnnnnnnnnnnnnnnnnnnnnnnnnnnnnnnnnnnnnnnnnnnnnnnnnnnnnnnnnnnnnnnnnnnnnnnnnnnnnnnnnnnnnnnnnnnnnnnnnnnnnnnnnnnnnnnnnnnnnnnnnnnnnnnnnnnnnnnnnnnnnnnnnnnnnnnnnnnnnnnnnnnnnnnnnnnnnnnnnnnnnnnnnnnnnnnnnnnnnnnnnnnnnnnnnnnnnnnnnnnnnnnnnnnnnnnnnnnnnnnnnnnnnnnnnnnnnnnnnnnnnnnnnnnnnnnnnnnnnnnnnnnnnnnnnnnnnnnnnnnnnnnnnnnnnnnnnnnnnnnnnnnnnnnnnnnnnnnnnnnnnnnnnnnnnnnnnnnnnnnnnnnnnnnnnnnnnnnnnnnnnnnnnnnnnnnnnnnnnnnnnnnnnnnnnnnnnnnnnnnnnnnnnnnnnnnnnnnnnnnnnnnnnnnnnnnnnnnnnnnnnnnnnnnnnnnnnnnnnnnnnnnnnnnnnnnnnnnnnnnnnnnnnnnnnnnnnnnnnnnnnnnnnnnnnnnnnnnnnnnnnnnnnnnnnnnnnnnnnnnnnnnnnnnnnnnnnnnnnnnnnnnnnnnnnnnnnnnnnnnnnnnnnnnnnnnnnnnnnnnnnnnnnnnnnnnnnnnnnnnnnnnnnnnnnnnnnnnnnnnnnnnnnnnnnnnnnnnnnnnnnnnnnnnnnnnnnnnnnnnnnnnnnnnnnnnnnnnnnnnnnnnnnnnnnnnnnnnnnnnnnnnnnnnnnnnnnnnnnnnnnnnnnnnnnnnnnnnnnnnnnnnnnnnnnnnnnnnnnnnnnnnnnnnnnnnnnnnnnnnnnnnnnnnnnnnnnnnnnnnnnnnnnnnnnnnnnnnnnnnnnnnnnnnnnnnnnnnnnnnnnnnnnnnnnnnnnnnnnnnnnnnnnnnnnnnnnnnnnnnnnnnnnnnnnnnnnnnnnnnnnnnnnnnnnnnnnnnnnnnnnnnnnnnnnnnnnnnnnnnnnnnnnnnnnnnnnnnnnnnnnnnnnnnnnnnnnnnnnnnnnnnnnnnnnnnnnnnnnnnnnnnnnnnnnnnnnnnnnnnnnnnnnnnnnnnnnnnnnnnnnnnnnnnnnnnnnnnnnnnnnnnnnnnnnnnnnnnnnnnnnnnnnnnnnnnnnnnnnnnnnnnnnnnnnnnnnnnnnnnnnnnnnnnnnnnnnnnnnnnnnnnnnnnnnnnnnnnnnnnnnnnnnnnnnnnnnnnnnnnnnnnnnnnnnnnnnnnnnnnnnnnnnnnnnnnnnnnnnnnnnnnnnnnnnnnnnnnnnnnnnnnnnnnnnnnnnnnnnnnnnnnnnnnnnnnnnnnnnnnnnnnnnnnnnnnnnnnnnnnnnnnnnnnnnnnnnnnnnnnnnnnnnnnnnnnnnnnnnnnnnnnnnnnnnnnnnnnnnnnnnnnnnnnnnnnnnnnnnnnnnnnnnnnnnnnnnnnnnnnnnnnnnnnnnnnnnnnnnnnnnnnnnnnnnnnnnnnnnnnnnnnnnnnnnnnnnnnnnnnnnnnnnnnnnnnnnnnnnnnnnnnnnnnnnnnnnnnnnnnnnnnnnnnnnnnnnnnnnnnnnnnnnnnnnnnnnnnnnnnnnnnnnnnnnnnnnnnnnnnnnnnnnnnnnnnnnnnnnnnnnnnnnnnnnnnnnnnnnnnnnnnnnnnnnnnnnnnnnnnnnnnnnnnnnnnnnnnnnnnnnnnnnnnnnnnnnnnnnnnnnnnnnnnnnnnnnnnnnnnnnnnnnnnnnnnnnnnnnnnnnnnnnnnnnnnnnnnnnnnnnnnnnnnnnnnnnnnnnnnnnnnnnnnnnnnnnnnnnnnnnnnnnnnnnnnnnnnnnnnnnnnnnnnnnnnnnnnnnnnnnnnnnnnnnnnnnnnnnnnnnnnnnnnnnnnnnnnnnnnnnnnnnnnnnnnnnnnnnnnnnnnnnnnnnnnnnnnnnnnnnnnnnnnnnnnnnnnnnnnnnnnnnnnnnnnnnnnnnnnnnnnnnnnnnnnnnnnnnnnnnnnnnnnnnnnnnnnnnnnnnnnnnnnnnnnnnnnnnnnnnnnnnnnnnnnnnnnnnnnnnnnnnnnnnnnnnnnnnnnnnnnnnnnnnnnnnnnnnnnnnnnnnnnnnnnnnnnnnnnnnnnnnnnnnnnnnnnnnnnnnnnnnnnnnnnnnnnnnnnnnnnnnnnnnnnnnnnnnnnnnnnnnnnnnnnnnnnnnnnnnnnnnnnnnnnnnnnnnnnnnnnnnnnnnnnnnnnnnnnnnnnnnnnnnnnnnnnnnnnnnnnnnnnnnnnnnnnnnnnnnnnnnnnnnnnnnnnnnnnnnnnnnnnnnnnnnnnnnnnnnnnnnnnnnnnnnnnnnnnnnnnnnnnnnnnnnnnnnnnnnnnnnnnnnnnnnnnnnnnnnnnnnnnnnnnnnnnnnnnnnnnnnnnnnnnnnnnnnnnnnnnnnnnnnnnnnnnnnnnnnnnnnnnnnnnnnnnnnnnnnnnnnnnnnnnnnnnnnnnnnnnnnnnnnnnnnnnnnnnnnnnnnnnnnnnnnnnnnnnnnnnnnnnnnnnnnnnnnnnnnnnnnnnnnnnnnnnnnnnnnnnnnnnnnnnnnnnnnnnnnnnnnnnnnnnnnnnnnnnnnnnnnnnnnnnnnnnnnnnnnnnnnnnnnnnnnnnnnnnnnnnnnnnnnnnnnnnnnnnnnnnnnnnnnnnnnnnnnnnnnnnnnnnnnnnnnnnnnnnnnnnnnnnnnnnnnnnnnnnnnnnnnnnnnnnnnnnnnnnnnnnnnnnnnnnnnnnnnnnnnnnnnnnnnnnnnnnnnnnnnnnnnnnnnnnnnnnnnnnnnnnnnnnnnnnnnnnnnnnnnnnnnnnnnnnnnnnnnnnnnnnnnnnnnnnnnnnnnnnnnnnnnnnnnnnnnnnnnnnnnnnnnnnnnnnnnnnnnnnnnnnnnnnnnnnnnnnnnnnnnnnnnnnnnnnnnnnnnnnnnnnnnnnnnnnnnnnnnnnnnnnnnnnnnnnnnnnnnnnnnnnnnnnnnnnnnnnnnnnnnnnnnnnnnnnnnnnnnnnnnnnnnnnnnnnnnnnnnnnnnnnnnnnnnnnnnnnnnnnnnnnnnnnnnnnnnnnnnnnnnnnnnnnnnnnnnnnnnnnnnnnnnnnnnnnnnnnnnnnnnnnnnnnnnnnnnnnnnnnnnnnnnnnnnnnnnnnnnnnnnnnnnnnnnnnnnnnnnnnnnnnnnnnnnnnnnnnnnnnnnnnnnnnnnnnnnnnnnnnnnnnnnnnnnnnnnnnnnnnnnnnnnnnnnnnnnnnnnnnnnnnnnnnnnnnnnnnnnnnnnnnnnnnnnnnnnnnnnnnnnnnnnnnnnnnnnnnnnnnnnnnnnnnnnnnnnnnnnnnnnnnnnnnnnnnnnnnnnnnnnnnnnnnnnnnnnnnnnnnnnnnnnnnnnnnnnnnnnnnnnnnnnnnnnnnnnnnnnnnnnnnnnnnnnnnnnnnnnnnnnnnnnnnnnnnnnnnnnnnnnnnnnnnnnnnnnnnnnnnnnnnnnnnnnnnnnnnnnnnnnnnnnnnnnnnnnnnnnnnnnnnnnnnnnnnnnnnnnnnnnnnnnnnnnnnnnnnnnnnnnnnnnnnnnnnnnnnnnnnnnnnnnnnnnnnnnnnnnnnnnnnnnnnnnnnnnnnnnnnnnnnnnnnnnnnnnnnnnnnnnnnnnnnnnnnnnnnnnnnnnnnnnnnnnnnnnnnnnnnnnnnnnnnnnnnnnnnnnnnnnnnnnnnnnnnnnnnnnnnnnnnnnnnnnnnnnnnnnnnnnnnnnnnnnnnnnnnnnnnnnnnnnnnnnnnnnnnnnnnnnnnnnnnnnnnnnnnnnnnnnnnnnnnnnnnnnnnnnnnnnnnnnnnnnnnnnnnnnnnnnnnnnnnnnnnnnnnnnnnnnnnnnnnnnnnnnnnnnnnnnnnnnnnnnnnnnnnnnnnnnnnnnnnnnnnnnnnnnnnnnnnnnnnnnnnnnnnnnnnnnnnnnnnnnnnnnnnnnnnnnnnnnnccgccgtttttgcctgcgcgccccaaggaaggaggatgtgttcatgaagcgatcgtccgcgagatgcgccgcaaccgtggttgccgcgctggcctgcctcggcacggccgttggtgccaccgctcaggactcgaccatccggaccgagcgtcatggtctcaaggtggagacgctcgctaccggtctcgttgcaccctggagcgtggccctgctgccagacgggctgatcctcatcaccgagaaggcgggaaacctgcgggtgatgcgcaacggcaggttgttgcccggtccggttgccgggctaccgccagtcacgatgcgcggccagggcggtctgatggatgtcatcccccatcccgattatctgacgaatcggctgatctactggagttacgccgccggcacgcctgcggaggtcggcaccgacgtcgcgcgcggtcgtctctcgtgccaaggcgacaactgtaccgttgcggaggtgcaagtgatcttcagccagaagcccaaggcgagcgcggggcagcacttcggttcgcggcttgtctgggaccgcagcggcaacctcttcgtcaccctcggcgatcggggtcgtcaggacgaagcacagaatcccggcaaccatctgggaaccgtgctgcgaatcaccgaaacgggtggcatcccgaacgacaaccccttccgcaaccgcgagggtgtgctgccggagatctacactttcggcaatcgcaacgtgcagggcgccgcgctgcatccgcgcaccggcgaactttgggcgcacgagcacgggccccagggcggcgacgaactcaacatcttgcgcgccggacgcaactacggttggcccgtgatcacccatggacgcacctacgggctcggacgccagatcggggagggtaccgagcgtgccgacattccccgtgccctgaaggtctggctgccgcagtcgatagcgccttccggcctcaccttctacggcggccggctcttctccgggtggcgcaacagcctgttcctcggcgcgatgcgcacgcaggaactggtgcgtctgacactggacggcgataccgtcgtcgacgaagagcgcatcagcgggcttggtcgtgtgcgcgacgtgcgggagggcaccgacggcgcgctctatgtgttgtcggagtcgaccgggcgactgtaccggctgaccccggccaactgatcgggtgggcggtcgtgcgcggggcggaggcgcttggcttcccgtttctcccgcacgtctataatgcgcacggattcgggagctcgacatgaaccccaccagcatcagcaccatgcccagcgcgcacggcacctacaaagccgtggcaccggtgcgacccgctgcgcccgtggagcctccgggcggcaacatcgagagccgaccgccccctgaaccggcgcagccctcggtgcccccgcgggcgagcggtacgaccgacaaccttggacgtaatctcgacgtctacgcctgatccgcccatcaccttgtatgcttgcgtgttcccggatctccgggtcagcgaggagagtgcagatgggcatgttgtcggagttcaagacctttgcgatgcggggcaatgtcgtcgatctcgcggtcggcgtggtgatcggtggggccttcggcaagatcgtcggtgcgctggtcgagcaggtgatcatgccgccgctcggtctgctgattggcggtgtcgatttttcagcctggaagatcacgctcagggaagccggggtggacgctgccggcgtggcgcttccggccgtgcatctgggcatcggcgcgttcatcaataccatcgtgcagttcgtgatcgtcgccttcgccatcttcctggtgatcaaggcgatgaatcgggtcgtgaagaagcaggaggccgcaccggctgcgccggccgagccccccgcgccgcccgccgacgtggtgttgctgaccgagattcgcgacctgctcaaaagccgctgaccgccggtcgtcatgcctgccgcggtggctccgatcagttttacgccacgctggtacgcctgatgatggcgcttcgcgcacgttggcgccctgccccgccaggtaggtcgtgacggtggcgaccactccgactcgatccggacaggacagccgcaggacatgacttgggcgattcaagatgcgggaactccgcggctgtgaccggctgaggccgtgcgaccgagggtgcatcagacatcatgggtggccggcacgtaactctcgtagacctcgatgtctgcatcgagcgaacccagatgatgttccagcagcggcttgacgtccttccagtcgagaccgcccacgccggtggcgagacggggaagggcgatgctgccgatctgttcggtgtcgatgaacttgtgcagcgctcggagcgcgtggttgacgttggcgagagtggccttgcccggcctggagccgtggccgtaggctgcctcctgcgtgaggagattggcgatgcgctggccgctcgccccggcccatacccagcagtcacccgccttcgggtggctggtctggcagtagtggcggaaatccttgtacactgccggccagttttcccgcagcgccagcgcgaggccttgggcaaagttgtcgttgggcgccacgccgtggccgataagtgcggctttgctatgcagaaggttgccgctgacatatctgatcattagattctccgtgatcgtcgtgcgtacccatgttcgctccttccgggcgggcttcaatacgcattgatcctgagaaaggttgccgcggcggagtacaccactacgccccgaagatgttgtcggtactggaggcattgtcttgttccgttcgcccgagcagcgcgatttcttcgaaaaaatcctggcccatgtcagggcgccggagcagtcgaggtcctttgccaagggcgtcgatgggcccctgcttctcgagggtggtacgggtctgggcaagacgcgcgccgccctgatggcggccgtggaaaccgtccgatccggactgacggtcgcgatcgtcctcccctccgaaaccctcatgcagcggctgctggattccgtcgatttcgccgaggtcgtccccgcggatctggattggctggcgttccgacctgcggcgggcgacgcctcaccggacgagatcgaacgggtggcagacgcagcccgcgaggtgccgctgctcctctgcacggcgggctcggtcatcatcgaccgggtgctcagggggcgctacaacggtgccacgtcacgtgactacctgatcttcgacgatgcggaccgcttgcccgacagtgcactgaaggcgaccgattgcgaagtcactgcgtcgcagttgcgcgagttgggggtggttggcagcaacgtgcgggatgtcgccaccaaggtttcccgtgcgcctgctgcgtcccaggaggcgcgcgctgccgcgacgatgatcctcgagatgctggatgatcccgcgaagtatcactcggtgaccttcaacccggagaccgggctcgtcttgcggcacaaaatgccaggacgcctgatgaagcgggtcgccaacaacccgaacgctgccttcatcggtacgtcgcttgccctcggcaggagcttcgatgccttcaagcgtgccatgggcatcgtcagtccgagcggcttgtcatcgatcatcgagcccaagaaccacggcagcctgcgttgccaccacgccgcgcatgcgccgctgtccgaggaatggttcgccgcgctcaagcagggtatcgcgaaggcggcgcgaccctgcctcgtcgtcaccgcggacgagcagcaggcccgggccatcggcttgctgacgcccgaggcgtcggtacgcctttcaggcgactcgccgtcacccgaatcattgacgtccgctggagccgtgctgatcgctgcggcgaactggccgggactcgacgcgccgcgggagtggcgcagcatcatcatcgcccgcgtacccatcgacgccgaatggggtcaggacgaggatgccgacgaacacttcgtcgatccccgcaatcaggccgtcaggctgctcaagaacatcatcggctggggagttcgccgacccgatgccgaatgtgatctttatgtgctcgactatcgcccggggttggtggagtcgctgatcccggctcgattcaagggtgattgggcacagcggcgcgcgatgacgggacgcggggcggcggaggacagcgcgatcgaacgcctcatcgctgccgagcagcctggcaaggcgctgcgtgacgaggtgttccgggtgcttggcaagcgctgcatgacctgcgatctcgtgccgaagccggggataccgctcgagatccatctgctcgggccagtctcggtcagcgaagacgatcgatcgctggccgaggagatggcggtgctctgccagtcatgccaccggctcgcgcattcggtcacgccgccgctctcgatgcccatgctgcgcggcttccacgaacgcaagcgcgcgcgaacctgagtccgtcgccgttgcggcgcaaggcggcttccgtcagatcgccaccgcgtgcacggggctgtccgtggcggcgctacggcgccgcagcgcgaacatgcgcatggttccgtagcctttggcggcagccgtcagaccgacgtagtcgcagcagaactcgtccgcgtgctcgagttcgagcgccgcggcaaaagtttcggtgacatagacgagaccgggtggcgtcaccggctcgatgcgcgccgcaagactcacgtgcgcgccgaagaagttctgtttcagcagcagaggatcgtcggtttcgaacaccggaccgagatgaccgccgagtcgcaaggccaggggttcggcgaaagcgccgctgtcggcagccaacgcctgcatcgcgacctgcaggtcgagggcgcattccgccgcttcgcgggtccggcgaaaaacgaggaacatgccatcgccccaggtgttgaggctgagcacgcgcgcgcgatggctctcgatggcacgtgcgaccccgcccaggacaccatggacgaactgcggcatttcccgatccgatatggtgctgaagcgggtgaagtcgccgaacagcatggctcgcgcccgtcgccggttcctgcgctcgtccgcaggcggcgcagcgttggtttcttgcgcgtcttgcggtgcgttgccgggatccggcaacggaatgatgcgctgcggccttccggattcgcgccacagtccgacgtcgacggccgttccggccacgccgcgagcgggggtgccgtcccacaccgcaagttgcgccacgctcgtgaaaaggtgttgggaggcgagcacggcaaggcccatggcgatccggctcgagtaggtgaacaacgtgtcgtcgccgagcccggcgccatcggtcgcgtaacggaccgattgcgcggcggcgaggcaacgccgcatccgggtcacccattgcccgccggcgggccgcaccgaggtttcaatgaaatcgtccagaaggaacggcagtaccacatgcagctgcgcaccgcgatcgagcagcgcttcggcaaagaggatgtctgcacctgaggcgagcgaaccatagccgaagcccgctgcgtgctcgtccagtgtctcaccgatggcggcggcgatcgtcgcttcggccgcggccgggaagcgacccgggactccgggtgcggcgatcatgtgacccgtgtagtggatcaccgcgggcggcgtcagggacgccacccacgatggcggcagacccttggcctcggtcgcgtgcttgatcgaacgcgctgcggtggcgagcatggtgtagtcaccattgctcgcttcgcgtgcggcatcgagccttgcctcggccgacacgagatcgccattgatgatatgcgcttcgatcagggttgcgagggaccagaaccgatcttcgccctttgccgtgtcc

SEQ ID NO: 168 - DNA, 13029 bp, Artificial Sequence
  Synthetic Oligonucleotide
  misc_feature (1)..(9111): n is a, c, g, or t
nnnnnnnnnnnnnnnnnnnnnnnnnnnnnnnnnnnnnnnnnnnnnnnnnnnnnnnnnnnnnnnnnnnnnnnnnnnnnnnnnnnnnnnnnnnnnnnnnnnnnnnnnnnnnnnnnnnnnnnnnnnnnnnnnnnnnnnnnnnnnnnnnnnnnnnnnnnnnnnnnnnnnnnnnnnnnnnnnnnnnnnnnnnnnnnnnnnnnnnnnnnnnnnnnnnnnnnnnnnnnnnnnnnnnnnnnnnnnnnnnnnnnnnnnnnnnnnnnnnnnnnnnnnnnnnnnnnnnnnnnnnnnnnnnnnnnnnnnnnnnnnnnnnnnnnnnnnnnnnnnnnnnnnnnnnnnnnnnnnnnnnnnnnnnnnnnnnnnnnnnnnnnnnnnnnnnnnnnnnnnnnnnnnnnnnnnnnnnnnnnnnnnnnnnnnnnnnnnnnnnnnnnnnnnnnnnnnnnnnnnnnnnnnnnnnnnnnnnnnnnnnnnnnnnnnnnnnnnnnnnnnnnnnnnnnnnnnnnnnnnnnnnnnnnnnnnnnnnnnnnnnnnnnnnnnnnnnnnnnnnnnnnnnnnnnnnnnnnnnnnnnnnnnnnnnnnnnnnnnnnnnnnnnnnnnnnnnnnnnnnnnnnnnnnnnnnnnnnnnnnnnnnnnnnnnnnnnnnnnnnnnnnnnnnnnnnnnnnnnnnnnnnnnnnnnnnnnnnnnnnnnnnnnnnnnnnnnnnnnnnnnnnnnnnnnnnnnnnnnnnnnnnnnnnnnnnnnnnnnnnnnnnnnnnnnnnnnnnnnnnnnnnnnnnnnnnnnnnnnnnnnnnnnnnnnnnnnnnnnnnnnnnnnnnnnnnnnnnnnnnnnnnnnnnnnnnnnnnnnnnnnnnnnnnnnnnnnnnnnnnnnnnnnnnnnnnnnnnnnnnnnnnnnnnnnnnnnnnnnnnnnnnnnnnnnnnnnnnnnnnnnnnnnnnnnnnnnnnnnnnnnnnnnnnnnnnnnnnnnnnnnnnnnnnnnnnnnnnnnnnnnnnnnnnnnnnnnnnnnnnnnnnnnnnnnnnnnnnnnnnnnnnnnnnnnnnnnnnnnnnnnnnnnnnnnnnnnnnnnnnnnnnnnnnnnnnnnnnnnnnnnnnnnnnnnnnnnnnnnnnnnnnnnnnnnnnnnnnnnnnnnnnnnnnnnnnnnnnnnnnnnnnnnnnnnnnnnnnnnnnnnnnnnnnnnnnnnnnnnnnnnnnnnnnnnnnnnnnnnnnnnnnnnnnnnnnnnnnnnnnnnnnnnnnnnnnnnnnnnnnnnnnnnnnnnnnnnnnnnnnnnnnnnnnnnnnnnnnnnnnnnnnnnnnnnnnnnnnnnnnnnnnnnnnnnnnnnnnnnnnnnnnnnnnnnnnnnnnnnnnnnnnnnnnnnnnnnnnnnnnnnnnnnnnnnnnnnnnnnnnnnnnnnnnnnnnnnnnnnnnnnnnnnnnnnnnnnnnnnnnnnnnnnnnnnnnnnnnnnnnnnnnnnnnnnnnnnnnnnnnnnnnnnnnnnnnnnnnnnnnnnnnnnnnnnnnnnnnnnnnnnnnnnnnnnnnnnnnnnnnnnnnnnnnnnnnnnnnnnnnnnnnnnnnnnnnnnnnnnnnnnnnnnnnnnnnnnnnnnnnnnnnnnnnnnnnnnnnnnnnnnnnnnnnnnnnnnnnnnnnnnnnnnnnnnnnnnnnnnnnnnnnnnnnnnnnnnnnnnnnnnnnnnnnnnnnnnnnnnnnnnnnnnnnnnnnnnnnnnnnnnnnnnnnnnnnnnnnnnnnnnnnnnnnnnnnnnnnnnnnnnnnnnnnnnnnnnnnnnnnnnnnnnnnnnnnnnnnnnnnnnnnnnnnnnnnnnnnnnnnnnnnnnnnnnnnnnnnnnnnnnnnnnnnnnnnnnnnnnnnnnnnnnnnnnnnnnnnnnnnnnnnnnnnnnnnnnnnnnnnnnnnnnnnnnnnnnnnnnnnnnnnnnnnnnnnnnnnnnnnnnnnnnnnnnnnnnnnnnnnnnnnnnnnnnnnnnnnnnnnnnnnnnnnnnnnnnnnnnnnnnnnnnnnnnnnnnnnnnnnnnnnnnnnnnnnnnnnnnnnnnnnnnnnnnnnnnnnnnnnnnnnnnnnnnnnnnnnnnnnnnnnnnnnnnnnnnnnnnnnnnnnnnnnnnnnnnnnnnnnnnnnnnnnnnnnnnnnnnnnnnnnnnnnnnnnnnnnnnnnnnnnnnnnnnnnnnnnnnnnnnnnnnnnnnnnnnnnnnnnnnnnnnnnnnnnnnnnnnnnnnnnnnnnnnnnnnnnnnnnnnnnnnnnnnnnnnnnnnnnnnnnnnnnnnnnnnnnnnnnnnnnnnnnnnnnnnnnnnnnnnnnnnnnnnnnnnnnnnnnnnnnnnnnnnnnnnnnnnnnnnnnnnnnnnnnnnnnnnnnnnnnnnnnnnnnnnnnnnnnnnnnnnnnnnnnnnnnnnnnnnnnnnnnnnnnnnnnnnnnnnnnnnnnnnnnnnnnnnnnnnnnnnnnnnnnnnnnnnnnnnnnnnnnnnnnnnnnnnnnnnnnnnnnnnnnnnnnnnnnnnnnnnnnnnnnnnnnnnnnnnnnnnnnnnnnnnnnnnnnnnnnnnnnnnnnnnnnnnnnnnnnnnnnnnnnnnnnnnnnnnnnnnnnnnnnnnnnnnnnnnnnnnnnnnnnnnnnnnnnnnnnnnnnnnnnnnnnnnnnnnnnnnnnnnnnnnnnnnnnnnnnnnnnnnnnnnnnnnnnnnnnnnnnnnnnnnnnnnnnnnnnnnnnnnnnnnnnnnnnnnnnnnnnnnnnnnnnnnnnnnnnnnnnnnnnnnnnnnnnnnnnnnnnnnnnnnnnnnnnnnnnnnnnnnnnnnnnnnnnnnnnnnnnnnnnnnnnnnnnnnnnnnnnnnnnnnnnnnnnnnnnnnnnnnnnnnnnnnnnnnnnnnnnnnnnnnnnnnnnnnnnnnnnnnnnnnnnnnnnnnnnnnnnnnnnnnnnnnnnnnnnnnnnnnnnnnnnnnnnnnnnnnnnnnnnnnnnnnnnnnnnnnnnnnnnnnnnnnnnnnnnnnnnnnnnnnnnnnnnnnnnnnnnnnnnnnnnnnnnnnnnnnnnnnnnnnnnnnnnnnnnnnnnnnnnnnnnnnnnnnnnnnnnnnnnnnnnnnnnnnnnnnnnnnnnnnnnnnnnnnnnnnnnnnnnnnnnnnnnnnnnnnnnnnnnnnnnnnnnnnnnnnnnnnnnnnnnnnnnnnnnnnnnnnnnnnnnnnnnnnnnnnnnnnnnnnnnnnnnnnnnnnnnnnnnnnnnnnnnnnnnnnnnnnnnnnnnnnnnnnnnnnnnnnnnnnnnnnnnnnnnnnnnnnnnnnnnnnnnnnnnnnnnnnnnnnnnnnnnnnnnnnnnnnnnnnnnnnnnnnnnnnnnnnnnnnnnnnnnnnnnnnnnnnnnnnnnnnnnnnnnnnnnnnnnnnnnnnnnnnnnnnnnnnnnnnnnnnnnnnnnnnnnnnnnnnnnnnnnnnnnnnnnnnnnnnnnnnnnnnnnnnnnnnnnnnnnnnnnnnnnnnnnnnnnnnnnnnnnnnnnnnnnnnnnnnnnnnnnnnnnnnnnnnnnnnnnnnnnnnnnnnnnnnnnnnnnnnnnnnnnnnnnnnnnnnnnnnnnnnnnnnnnnnnnnnnnnnnnnnnnnnnnnnnnnnnnnnnnnnnnnnnnnnnnnnnnnnnnnnnnnnnnnnnnnnnnnnnnnnnnnnnnnnnnnnnnnnnnnnnnnnnnnnnnnnnnnnnnnnnnnnnnnnnnnnnnnnnnnnnnnnnnnnnnnnnnnnnnnnnnnnnnnnnnnnnnnnnnnnnnnnnnnnnnnnnnnnnnnnnnnnnnnnnnnnnnnnnnnnnnnnnnnnnnnnnnnnnnnnnnnnnnnnnnnnnnnnnnnnnnnnnnnnnnnnnnnnnnnnnnnnnnnnnnnnnnnnnnnnnnnnnnnnnnnnnnnnnnnnnnnnnnnnnnnnnnnnnnnnnnnnnnnnnnnnnnnnnnnnnnnnnnnnnnnnnnnnnnnnnnnnnnnnnnnnnnnnnnnnnnnnnnnnnnnnnnnnnnnnnnnnnnnnnnnnnnnnnnnnnnnnnnnnnnnnnnnnnnnnnnnnnnnnnnnnnnnnnnnnnnnnnnnnnnnnnnnnnnnnnnnnnnnnnnnnnnnnnnnnnnnnnnnnnnnnnnnnnnnnnnnnnnnnnnnnnnnnnnnnnnnnnnnnnnnnnnnnnnnnnnnnnnnnnnnnnnnnnnnnnnnnnnnnnnnnnnnnnnnnnnnnnnnnnnnnnnnnnnnnnnnnnnnnnnnnnnnnnnnnnnnnnnnnnnnnnnnnnnnnnnnnnnnnnnnnnnnnnnnnnnnnnnnnnnnnnnnnnnnnnnnnnnnnnnnnnnnnnnnnnnnnnnnnnnnnnnnnnnnnnnnnnnnnnnnnnnnnnnnnnnnnnnnnnnnnnnnnnnnnnnnnnnnnnnnnnnnnnnnnnnnnnnnnnnnnnnnnnnnnnnnnnnnnnnnnnnnnnnnnnnnnnnnnnnnnnnnnnnnnnnnnnnnnnnnnnnnnnnnnnnnnnnnnnnnnnnnnnnnnnnnnnnnnnnnnnnnnnnnnnnnnnnnnnnnnnnnnnnnnnnnnnnnnnnnnnnnnnnnnnnnnnnnnnnnnnnnnnnnnnnnnnnnnnnnnnnnnnnnnnnnnnnnnnnnnnnnnnnnnnnnnnnnnnnnnnnnnnnnnnnnnnnnnnnnnnnnnnnnnnnnnnnnnnnnnnnnnnnnnnnnnnnnnnnnnnnnnnnnnnnnnnnnnnnnnnnnnnnnnnnnnnnnnnnnnnnnnnnnnnnnnnnnnnnnnnnnnnnnnnnnnnnnnnnnnnnnnnnnnnnnnnnnnnnnnnnnnnnnnnnnnnnnnnnnnnnnnnnnnnnnnnnnnnnnnnnnnnnnnnnnnnnnnnnnnnnnnnnnnnnnnnnnnnnnnnnnnnnnnnnnnnnnnnnnnnnnnnnnnnnnnnnnnnnnnnnnnnnnnnnnnnnnnnnnnnnnnnnnnnnnnnnnnnnnnnnnnnnnnnnnnnnnnnnnnnnnnnnnnnnnnnnnnnnnnnnnnnnnnnnnnnnnnnnnnnnnnnnnnnnnnnnnnnnnnnnnnnnnnnnnnnnnnnnnnnnnnnnnnnnnnnnnnnnnnnnnnnnnnnnnnnnnnnnnnnnnnnnnnnnnnnnnnnnnnnnnnnnnnnnnnnnnnnnnnnnnnnnnnnnnnnnnnnnnnnnnnnnnnnnnnnnnnnnnnnnnnnnnnnnnnnnnnnnnnnnnnnnnnnnnnnnnnnnnnnnnnnnnnnnnnnnnnnnnnnnnnnnnnnnnnnnnnnnnnnnnnnnnnnnnnnnnnnnnnnnnnnnnnnnnnnnnnnnnnnnnnnnnnnnnnnnnnnnnnnnnnnnnnnnnnnnnnnnnnnnnnnnnnnnnnnnnnnnnnnnnnnnnnnnnnnnnnnnnnnnnnnnnnnnnnnnnnnnnnnnnnnnnnnnnnnnnnnnnnnnnnnnnnnnnnnnnnnnnnnnnnnnnnnnnnnnnnnnnnnnnnnnnnnnnnnnnnnnnnnnnnnnnnnnnnnnnnnnnnnnnnnnnnnnnnnnnnnnnnnnnnnnnnnnnnnnnnnnnnnnnnnnnnnnnnnnnnnnnnnnnnnnnnnnnnnnnnnnnnnnnnnnnnnnnnnnnnnnnnnnnnnnnnnnnnnnnnnnnnnnnnnnnnnnnnnnnnnnnnnnnnnnnnnnnnnnnnnnnnnnnnnnnnnnnnnnnnnnnnnnnnnnnnnnnnnnnnnnnnnnnnnnnnnnnnnnnnnnnnnnnnnnnnnnnnnnnnnnnnnnnnnnnnnnnnnnnnnnnnnnnnnnnnnnnnnnnnnnnnnnnnnnnnnnnnnnnnnnnnnnnnnnnnnnnnnnnnnnnnnnnnnnnnnnnnnnnnnnnnnnnnnnnnnnnnnnnnnnnnnnnnnnnnnnnnnnnnnnnnnnnnnnnnnnnnnnnnnnnnnnnnnnnnnnnnnnnnnnnnnnnnnnnnnnnnnnnnnnnnnnnnnnnnnnnnnnnnnnnnnnnnnnnnnnnnnnnnnnnnnnnnnnnnnnnnnnnnnnnnnnnnnnnnnnnnnnnnnnnnnnnnnnnnnnnnnnnnnnnnnnnnnnnnnnnnnnnnnnnnnnnnnnnnnnnnnnnnnnnnnnnnnnnnnnnnnnnnnnnnnnnnnnnnnnnnnnnnnnnnnnnnnnnnnnnnnnnnnnnnnnnnnnnnnnnnnnnnnnnnnnnnnnnnnnnnnnnnnnnnnnnnnnnnnnnnnnnnnnnnnnnnnnnnnnnnnnnnnnnnnnnnnnnnnnnnnnnnnnnnnnnnnnnnnnnnnnnnnnnnnnnnnnnnnnnnnnnnnnnnnnnnnnnnnnnnnnnnnnnnnnnnnnnnnnnnnnnnnnnnnnnnnnnnnnnnnnnnnnnnnnnnnnnnnnnnnnnnnnnnnnnnnnnnnnnnnnnnnnnnnnnnnnnnnnnnnnnnnnnnnnnnnnnnnnnnnnnnnnnnnnnnnnnnnnnnnnnnnnnnnnnnnnnnnnnnnnnnnnnnnnnnnnnnnnnnnnnnnnnnnnnnnnnnnnnnnnnnnnnnnnnnnnnnnnnnnnnnnnnnnnnnnnnnnnnnnnnnnnnnnnnnnnnnnnnnnnnnnnnnnnnnnnnnnnnnnnnnnnnnnnnnnnnnnnnnnnnnnnnnnnnnnnnnnnnnnnnnnnnnnnnnnnnnnnnnnnnnnnnnnnnnnnnnnnnnnnnnnnnnnnnnnnnnnnnnnnnnnnnnnnnnnnnnnnnnnnnnnnnnnnnnnnnnnnnnnnnnnnnnnnnnnnnnnnnnnnnnnnnnnnnnnnnnnnnnnnnnnnnnnnnnnnnnnnnnnnnnnnnnnnnnnnnnnnnnnnnnnnnnnnnnnnnnnnnnnnnnnnnnnnnnnnnnnnnnnnnnnnnnnnnnnnnnnnnnnnnnnnnnnnnnnnnnnnnnnnnnnnnnnnnnnnnnnnnnnnnnnnnnnnnnnnnnnnnnnnnnnnnnnnnnnnnnnnnnnnnnnnnnnnnnnnnnnnnnnnnnnnnnnnnnnnnnnnnnnnnnnnnnnnnnnnnnnnnnnnnnnnnnnnnnnnnnnnnnnnnnnnnnnnnnnnnnnnnnnnnnnnnnnnnnnnnnnnnnnnnnnnnnnnnnnnnnnnnnnnnnnnnnnnnnnnnnnnnnnnnnnnnnnnnnnnnnnnnnnnnnnnnnnnnnnnnnnnnnnnnnnnnnnnnnnnnnnnnnnnnnnnnnnnnnnnnnnnnnnnnnnnnnnnnnnnnnnnnnnnnnnnnnnnnnnnnnnnnnnnnnnnnnnnnnnnnnnnnnnnnnnnnnnnnnnnnnnnnnnnnnnnnnnnnnnnnnnnnnnnnnnnnnnnnnnnnnnnnnnnnnnnnnnnnnnnnnnnnnnnnnnnnnnnnnnnnnnnnnnnnnnnnnnnnnnnnnnnnnnnnnnnnnnnnnnnnnnnnnnnnnnnnnnnnnnnnnnnnnnnnnnnnnnnnnnnnnnnnnnnnnnnnnnnnnnnnnnnnnnnnnnnnnnnnnnnnnnnnnnnnnnnnnnnnnnnnnnnnnnnnnnnnnnnnnnnnnnnnnnnnnnnnnnnnnnnnnnnnnnnnnnnnnnnnnnnnnnnnnnnnnnnnnnnnnnnnnnnnnnnnnnnnnnnnnnnnnnnnnnnnnnnnnnnnnnnnnnnnnnnnnnnnnnnnnnnnnnnnnnnnnnnnnnnnnnnnnnnnnnnnnnnnnnnnnnnnnnnnnnnnnnnnnnnnnnnnnnnnnnnnnnnnnnnnnnnnnnnnnnnnnnnnnnnnnnnnnnnnnnnnnnnnnnnnnnnnnnnnnnnnnnnnnnnnnnnnnnnnnnnnnnnnnnnnnnnnnnnnnnnnnnnnnnnnnnnnnnnnnnnnnnnnnnnnnnnnnnnnnnnnnnnnnnnnnnnnnnnnnnnnnnnnnnnnnnnnnnnnnnnnnnnnnnnnnnnnnnnnnnnnnnnnnnnnnnnnnnnnnnnnnnnnnnnnnnnnnnnnnnnnnnnnnnnnnnnnnnnnnnnnnnnnnnnnnnnnnnnnnnnnnnnnnnnnnnnnnnnnnnnnnnnnnnnnnnnnnnnnnnnnnnnnnnnnnnnnnnnnnnnnnnnnnnnnnnnnnnnnnnnnnnnnnnnnnnnnnnnnnnnnnnnnnnnnnnnnnnnnnnnnnnnnnnnnnnnnnnnnnnnnnnnnnnnnnnnnnnnnnnnnnnnnnnnnnnnnnnnnnnnnnnnnnnnnnnnnnnnnnnnnnnnnnnnnnnnnnnnnnnnnnnnnnnnnnnnnnnnnnnnnnnnnnnnnnnnnnnnnnnnnnnnnnnnnnnnnnnnnnnnnnnnnnnnnnnnnnnnnnnnnnnnnnnnnnnnnnnnnnnnnnnnnnnnnnnnnnnnnnnnnnnnnnnnnnnnnnnnnnnnnnnnnnnnnnnnnnnnnnnnnnnnnnnnnnnnnnnnnnnnnnnnnnnnnnnnnnnnnnnnnnnnnnnnnnnnnnnnnnnnnnnnnnnnnnnnnnnnnnnnnnnnnnnnnnnnnnnnnnnnnnnnnnnnnnnnnnnnnnnnnnnnnnnnnnnnnnnnnnnnnnnnnnnnnnnnnnnnnnnnnnnnnnnnnnnnnnnnnnnnnnnnnnnnnnnnnnnnnnnnnnnnnnnnnnnnnnnnnnnnnnnnnnnnnnnnnnnnnnnnnnnnnnnnnnnnnnnnnnnnnnnnnnnnnnnnnnnnnnnnnnnnnnnnnnnnnnnnnnnnnnnnnnnnnnnnnnnnnnnnnnnnnnnnnnnnnnnnnnnnnnnnnnnnnnnnnnnnnnnnnnnnnnnnnnnnnnnnnnnnnnnnnnnnnnnnnnnnnnnnnnnnnnnnnnnnnnnnnnnnnnnnnnnnnnnnnnnnnnnnnnnnnnnnnnnnnnnnnnnnnnnnnnnnnnnnnnnnnnnnnnnnnnnnnnnnnnnnnnnnnnnnnnnnnnnnnnnnnnnnnnnnnnnnnnnnnnnnnnnnnnnnnnnnnnnnnnnnnnnnnnnnnnnnnnnnnnnnnnnnnnnnnnnnnnnnnnnnnnnnnnnnnnnnnnnnnnnnnnnnnnnnnnnnnnnnnnnnnnnnnnnnnnnnnnnnnnnnnnnnnnnnnnnnnnnnnnnnnnnnnnnnnnnnnnnnnnnnnnnnnnnnnnnnnnnnnnnnnnnnnnnnnnnnnnnnnnnnnnnnnnnnnnnnnnnnnnnnnnnnnnnnnnnnnnnnnnnnnnnnnnnnnnnnnnnnnnnnnnnnnnnnnnnnnnnnnnnnnnnnnncacttgggtcaagccaccccccaaacgggtggctactagaacccataaacacaggtcccaatgtgttcgttaggtcaagccaccccccaaacgggtggctactagaacagaaaaaagaggtggcggtttgcctcccccggtcaagccaccccccaaacgggtggctactagaacctagtcaattgcagggcgcagtggaattagggtcaagccaccccccaaacgggtggctactagaacccgtacgaacatgagtacagcttcattttaggtcaagccaccccccaaacgggtggctactagaacacagagcaggggcgcgtcactagagtagccggtcaagccaccccccaaacgggtggctactagaactattgggtgatagagaattgagcagcagagggtcaagccacccctaaaacgggtggctactagaacatgaacattgactatgatgtatctgaccctggtcaagccacccctcaaacgggtggctactagaacaagtcccaagcagtgtgtacaggtacgttgggtcaagccacccctcaaacgggtggctactagaaccacatcaggtgtatcaggtacgtcccaagcggtcaagccacccctcaaacgggtggctactagaacgtgttgaatgtaacaataacggactcgttagggtcaagccacccctcaaacgggcggctactagaaccggcagacttagcgactggtctgactacagggtcaagccacccctcaaacgggtggctactagaacacaactgataacacttcgagaatatataacggtcaagccaccccccaaacgggtggctactagaactagatttatattagtctttgtgccaaggtcatttatctttacagaaggtatttatgtttaggagcagtgagcaaaaacacttcagtgatattgtcgataagcatatgtcactcttggatgcacctctgttattggagggtgggactggtctgggaaagacccgtgcctacttggctgcgatcaaagataagcgggttgcgatagtactgcccacccatcaattaattgatcagatgctcacttcaagtgatctattggcagcaggacttaatgatattaaggcgtttagacctgcacggttttttgaaactagaacagaatatgaacatgcccgtgagctatctaaaactgcgcaggtgatgatatgcactgcagcctctgtaatcattgatcagcggctaaatggtgagtacaacggtgtcactagtgatcgagagtatttaatttttgacgaggcagatcagttgcctgacatggcagcattgcaatcggatttcatgatcacacctcagaacttgaacgatcttggaatcaagttggttacgactgagcaggcattaaaagagattgttgccaaaactccccgcacagttgaacctgaaattcgagcggcagcaaggttgatgcttgaggtattagaagaacctgcttggtatcacgactgcgggaaggatgatcagggtggcattgttttaacgcacaaaatgcccggaaggttactgaaaaaaatcagtaacagacctaactctgcctttatcagtgccacactttctgttgcaggaaaactttcaaacttcaagatgtcgatgggtattgataaagagtcaattctatctggcatcattgagcctattgatcatggcagacttacttttcacaccaccgatgcaacagttgatacgccagagtggatcgatgcggtattggatgcggtcaagagatcaccaaaaccggctttggtagcaacgacctcacacgatctaacacaagaacttgcaaggagattaccagagtcagtcgcgcgaacaattgaagagtcagcggcagaagcttcaaaacgaattgggaaagacggtgtattgatcgcagccggtgcttgggcaggacttgatacccccgttcgatggaggtctatcatagtgccgcgcgttccgtactcgaagccaattgtcatcgatggtgacgttacgacaagctatctggatgctcgtaacaccgctatccggcgtctacggcaggtgattggacgaggtttacgaactccagatgctgaatgtgacatttatattattgatggtcgatatactaaactcgaagcttttgtgcctgaaaggtttcgccctgattgggctgggcgtgagaaaaaaagttttatagagggtgctaggcaggagattgtatacagcagagcagagcgtgacccgctgttgcgccagtctgcactcagacgatatggattggtttgtatggcttgcggactcgttccaagagtgtcgattcaacttgatgtgcatcataaagatcctattgcagagggtgaacgcacaactacgttaaatgatgtattggtgttgtgtgctaactgccatcgtctcgcgcattcagagtcaccgccactcagtttggatgccttaagggtttagatggcagcaggaccctcaactaatgggtgatagtacgagggtaatagtcagctactagtttgacccatgtgtcatactggatacgttgctataggcattaaaaatgagaacctctccaaatagtatctttatcttgatacttgctatttcattcctcgtaatcatgggtcaggctcatgcggaagcagtgaatgccaaaggggagtacctctatggtcctgacacttccgaggcagatgcatgtcgccttgcaaaggaacgagccaaggcgaatgctctaagcaaagtattcggtgaaagtatctcgatggaagagcagatgtcctgccgtgaggtcaaaggtggcaagcctgattacgggtgcgagttgaaccgcgtatcgtggtcttcaatagagggagacatcaggtcagttacagattatcgcaaggtgatcgagtcaagagtaggagagagagcttgtatcgtaacgctcaccgccgatgtcgttataccaaaccgaaagccagactcaagtttcgatctcaaggcaaccctcaatgagaaaatgtatcgtgcaggcgaggtactaaccattgcacttgagccgacggctcccatgcatatcgccatctttaactgggttccatatcaggatagggacgcagttattcagatgtttccaaatccgatggacccccagagccacatcactaaaaaaacaagcatccctacagagagcaagctttctgcttataacttcacgatgacttggctggagacactgccaaagaacaaaaccttcgtagatgagtatctgattgtgattggaacaaagaagccaatcaaatggctatcaagctatgaattctctgactttaagttaaagctatctgagattcctctcgatgagatgcgtgtcgttaaacgcggttaccaactcatacggggttctagtaaagtggggtcgattcaatgagggtagcattactcataatcgtttgtatcttcagtacaggttgtgtgacaactcggtatgtcgaacgtagctctgaccatacgaaacagaagccagattctgttgcaacaaatgattcaattgggaatgtctatcatggtgttgttatctttgagtcctcagaggaattaaaagctaatcctctatcctgtcttgcagtattcccaattacagcaaaaggtggtgacaccgacagtgctgtatctattagaaatgcattacacgcaaacctagctccctccggtattcgtctattaccgctacagaagatcgatgctgcaatcaaagcaactaatagctcagatggagatctgaattcagctgtagccaagataattggttgtgacaccatcatgactggtgaagtgattgatgacccatcttctttctatggcatgtactccgtggttcgtgcgggtgccaatatcaggatagtaaaagtt

SEQ ID NO: 169 - DNA, 12965 bp, Artificial Sequence
  Synthetic Oligonucleotide
  misc_feature (1)..(7631): n is a, c, g, or t
nnnnnnnnnnnnnnnnnnnnnnnnnnnnnnnnnnnnnnnnnnnnnnnnnnnnnnnnnnnnnnnnnnnnnnnnnnnnnnnnnnnnnnnnnnnnnnnnnnnnnnnnnnnnnnnnnnnnnnnnnnnnnnnnnnnnnnnnnnnnnnnnnnnnnnnnnnnnnnnnnnnnnnnnnnnnnnnnnnnnnnnnnnnnnnnnnnnnnnnnnnnnnnnnnnnnnnnnnnnnnnnnnnnnnnnnnnnnnnnnnnnnnnnnnnnnnnnnnnnnnnnnnnnnnnnnnnnnnnnnnnnnnnnnnnnnnnnnnnnnnnnnnnnnnnnnnnnnnnnnnnnnnnnnnnnnnnnnnnnnnnnnnnnnnnnnnnnnnnnnnnnnnnnnnnnnnnnnnnnnnnnnnnnnnnnnnnnnnnnnnnnnnnnnnnnnnnnnnnnnnnnnnnnnnnnnnnnnnnnnnnnnnnnnnnnnnnnnnnnnnnnnnnnnnnnnnnnnnnnnnnnnnnnnnnnnnnnnnnnnnnnnnnnnnnnnnnnnnnnnnnnnnnnnnnnnnnnnnnnnnnnnnnnnnnnnnnnnnnnnnnnnnnnnnnnnnnnnnnnnnnnnnnnnnnnnnnnnnnnnnnnnnnnnnnnnnnnnnnnnnnnnnnnnnnnnnnnnnnnnnnnnnnnnnnnnnnnnnnnnnnnnnnnnnnnnnnnnnnnnnnnnnnnnnnnnnnnnnnnnnnnnnnnnnnnnnnnnnnnnnnnnnnnnnnnnnnnnnnnnnnnnnnnnnnnnnnnnnnnnnnnnnnnnnnnnnnnnnnnnnnnnnnnnnnnnnnnnnnnnnnnnnnnnnnnnnnnnnnnnnnnnnnnnnnnnnnnnnnnnnnnnnnnnnnnnnnnnnnnnnnnnnnnnnnnnnnnnnnnnnnnnnnnnnnnnnnnnnnnnnnnnnnnnnnnnnnnnnnnnnnnnnnnnnnnnnnnnnnnnnnnnnnnnnnnnnnnnnnnnnnnnnnnnnnnnnnnnnnnnnnnnnnnnnnnnnnnnnnnnnnnnnnnnnnnnnnnnnnnnnnnnnnnnnnnnnnnnnnnnnnnnnnnnnnnnnnnnnnnnnnnnnnnnnnnnnnnnnnnnnnnnnnnnnnnnnnnnnnnnnnnnnnnnnnnnnnnnnnnnnnnnnnnnnnnnnnnnnnnnnnnnnnnnnnnnnnnnnnnnnnnnnnnnnnnnnnnnnnnnnnnnnnnnnnnnnnnnnnnnnnnnnnnnnnnnnnnnnnnnnnnnnnnnnnnnnnnnnnnnnnnnnnnnnnnnnnnnnnnnnnnnnnnnnnnnnnnnnnnnnnnnnnnnnnnnnnnnnnnnnnnnnnnnnnnnnnnnnnnnnnnnnnnnnnnnnnnnnnnnnnnnnnnnnnnnnnnnnnnnnnnnnnnnnnnnnnnnnnnnnnnnnnnnnnnnnnnnnnnnnnnnnnnnnnnnnnnnnnnnnnnnnnnnnnnnnnnnnnnnnnnnnnnnnnnnnnnnnnnnnnnnnnnnnnnnnnnnnnnnnnnnnnnnnnnnnnnnnnnnnnnnnnnnnnnnnnnnnnnnnnnnnnnnnnnnnnnnnnnnnnnnnnnnnnnnnnnnnnnnnnnnnnnnnnnnnnnnnnnnnnnnnnnnnnnnnnnnnnnnnnnnnnnnnnnnnnnnnnnnnnnnnnnnnnnnnnnnnnnnnnnnnnnnnnnnnnnnnnnnnnnnnnnnnnnnnnnnnnnnnnnnnnnnnnnnnnnnnnnnnnnnnnnnnnnnnnnnnnnnnnnnnnnnnnnnnnnnnnnnnnnnnnnnnnnnnnnnnnnnnnnnnnnnnnnnnnnnnnnnnnnnnnnnnnnnnnnnnnnnnnnnnnnnnnnnnnnnnnnnnnnnnnnnnnnnnnnnnnnnnnnnnnnnnnnnnnnnnnnnnnnnnnnnnnnnnnnnnnnnnnnnnnnnnnnnnnnnnnnnnnnnnnnnnnnnnnnnnnnnnnnnnnnnnnnnnnnnnnnnnnnnnnnnnnnnnnnnnnnnnnnnnnnnnnnnnnnnnnnnnnnnnnnnnnnnnnnnnnnnnnnnnnnnnnnnnnnnnnnnnnnnnnnnnnnnnnnnnnnnnnnnnnnnnnnnnnnnnnnnnnnnnnnnnnnnnnnnnnnnnnnnnnnnnnnnnnnnnnnnnnnnnnnnnnnnnnnnnnnnnnnnnnnnnnnnnnnnnnnnnnnnnnnnnnnnnnnnnnnnnnnnnnnnnnnnnnnnnnnnnnnnnnnnnnnnnnnnnnnnnnnnnnnnnnnnnnnnnnnnnnnnnnnnnnnnnnnnnnnnnnnnnnnnnnnnnnnnnnnnnnnnnnnnnnnnnnnnnnnnnnnnnnnnnnnnnnnnnnnnnnnnnnnnnnnnnnnnnnnnnnnnnnnnnnnnnnnnnnnnnnnnnnnnnnnnnnnnnnnnnnnnnnnnnnnnnnnnnnnnnnnnnnnnnnnnnnnnnnnnnnnnnnnnnnnnnnnnnnnnnnnnnnnnnnnnnnnnnnnnnnnnnnnnnnnnnnnnnnnnnnnnnnnnnnnnnnnnnnnnnnnnnnnnnnnnnnnnnnnnnnnnnnnnnnnnnnnnnnnnnnnnnnnnnnnnnnnnnnnnnnnnnnnnnnnnnnnnnnnnnnnnnnnnnnnnnnnnnnnnnnnnnnnnnnnnnnnnnnnnnnnnnnnnnnnnnnnnnnnnnnnnnnnnnnnnnnnnnnnnnnnnnnnnnnnnnnnnnnnnnnnnnnnnnnnnnnnnnnnnnnnnnnnnnnnnnnnnnnnnnnnnnnnnnnnnnnnnnnnnnnnnnnnnnnnnnnnnnnnnnnnnnnnnnnnnnnnnnnnnnnnnnnnnnnnnnnnnnnnnnnnnnnnnnnnnnnnnnnnnnnnnnnnnnnnnnnnnnnnnnnnnnnnnnnnnnnnnnnnnnnnnnnnnnnnnnnnnnnnnnnnnnnnnnnnnnnnnnnnnnnnnnnnnnnnnnnnnnnnnnnnnnnnnnnnnnnnnnnnnnnnnnnnnnnnnnnnnnnnnnnnnnnnnnnnnnnnnnnnnnnnnnnnnnnnnnnnnnnnnnnnnnnnnnnnnnnnnnnnnnnnnnnnnnnnnnnnnnnnnnnnnnnnnnnnnnnnnnnnnnnnnnnnnnnnnnnnnnnnnnnnnnnnnnnnnnnnnnnnnnnnnnnnnnnnnnnnnnnnnnnnnnnnnnnnnnnnnnnnnnnnnnnnnnnnnnnnnnnnnnnnnnnnnnnnnnnnnnnnnnnnnnnnnnnnnnnnnnnnnnnnnnnnnnnnnnnnnnnnnnnnnnnnnnnnnnnnnnnnnnnnnnnnnnnnnnnnnnnnnnnnnnnnnnnnnnnnnnnnnnnnnnnnnnnnnnnnnnnnnnnnnnnnnnnnnnnnnnnnnnnnnnnnnnnnnnnnnnnnnnnnnnnnnnnnnnnnnnnnnnnnnnnnnnnnnnnnnnnnnnnnnnnnnnnnnnnnnnnnnnnnnnnnnnnnnnnnnnnnnnnnnnnnnnnnnnnnnnnnnnnnnnnnnnnnnnnnnnnnnnnnnnnnnnnnnnnnnnnnnnnnnnnnnnnnnnnnnnnnnnnnnnnnnnnnnnnnnnnnnnnnnnnnnnnnnnnnnnnnnnnnnnnnnnnnnnnnnnnnnnnnnnnnnnnnnnnnnnnnnnnnnnnnnnnnnnnnnnnnnnnnnnnnnnnnnnnnnnnnnnnnnnnnnnnnnnnnnnnnnnnnnnnnnnnnnnnnnnnnnnnnnnnnnnnnnnnnnnnnnnnnnnnnnnnnnnnnnnnnnnnnnnnnnnnnnnnnnnnnnnnnnnnnnnnnnnnnnnnnnnnnnnnnnnnnnnnnnnnnnnnnnnnnnnnnnnnnnnnnnnnnnnnnnnnnnnnnnnnnnnnnnnnnnnnnnnnnnnnnnnnnnnnnnnnnnnnnnnnnnnnnnnnnnnnnnnnnnnnnnnnnnnnnnnnnnnnnnnnnnnnnnnnnnnnnnnnnnnnnnnnnnnnnnnnnnnnnnnnnnnnnnnnnnnnnnnnnnnnnnnnnnnnnnnnnnnnnnnnnnnnnnnnnnnnnnnnnnnnnnnnnnnnnnnnnnnnnnnnnnnnnnnnnnnnnnnnnnnnnnnnnnnnnnnnnnnnnnnnnnnnnnnnnnnnnnnnnnnnnnnnnnnnnnnnnnnnnnnnnnnnnnnnnnnnnnnnnnnnnnnnnnnnnnnnnnnnnnnnnnnnnnnnnnnnnnnnnnnnnnnnnnnnnnnnnnnnnnnnnnnnnnnnnnnnnnnnnnnnnnnnnnnnnnnnnnnnnnnnnnnnnnnnnnnnnnnnnnnnnnnnnnnnnnnnnnnnnnnnnnnnnnnnnnnnnnnnnnnnnnnnnnnnnnnnnnnnnnnnnnnnnnnnnnnnnnnnnnnnnnnnnnnnnnnnnnnnnnnnnnnnnnnnnnnnnnnnnnnnnnnnnnnnnnnnnnnnnnnnnnnnnnnnnnnnnnnnnnnnnnnnnnnnnnnnnnnnnnnnnnnnnnnnnnnnnnnnnnnnnnnnnnnnnnnnnnnnnnnnnnnnnnnnnnnnnnnnnnnnnnnnnnnnnnnnnnnnnnnnnnnnnnnnnnnnnnnnnnnnnnnnnnnnnnnnnnnnnnnnnnnnnnnnnnnnnnnnnnnnnnnnnnnnnnnnnnnnnnnnnnnnnnnnnnnnnnnnnnnnnnnnnnnnnnnnnnnnnnnnnnnnnnnnnnnnnnnnnnnnnnnnnnnnnnnnnnnnnnnnnnnnnnnnnnnnnnnnnnnnnnnnnnnnnnnnnnnnnnnnnnnnnnnnnnnnnnnnnnnnnnnnnnnnnnnnnnnnnnnnnnnnnnnnnnnnnnnnnnnnnnnnnnnnnnnnnnnnnnnnnnnnnnnnnnnnnnnnnnnnnnnnnnnnnnnnnnnnnnnnnnnnnnnnnnnnnnnnnnnnnnnnnnnnnnnnnnnnnnnnnnnnnnnnnnnnnnnnnnnnnnnnnnnnnnnnnnnnnnnnnnnnnnnnnnnnnnnnnnnnnnnnnnnnnnnnnnnnnnnnnnnnnnnnnnnnnnnnnnnnnnnnnnnnnnnnnnnnnnnnnnnnnnnnnnnnnnnnnnnnnnnnnnnnnnnnnnnnnnnnnnnnnnnnnnnnnnnnnnnnnnnnnnnnnnnnnnnnnnnnnnnnnnnnnnnnnnnnnnnnnnnnnnnnnnnnnnnnnnnnnnnnnnnnnnnnnnnnnnnnnnnnnnnnnnnnnnnnnnnnnnnnnnnnnnnnnnnnnnnnnnnnnnnnnnnnnnnnnnnnnnnnnnnnnnnnnnnnnnnnnnnnnnnnnnnnnnnnnnnnnnnnnnnnnnnnnnnnnnnnnnnnnnnnnnnnnnnnnnnnnnnnnnnnnnnnnnnnnnnnnnnnnnnnnnnnnnnnnnnnnnnnnnnnnnnnnnnnnnnnnnnnnnnnnnnnnnnnnnnnnnnnnnnnnnnnnnnnnnnnnnnnnnnnnnnnnnnnnnnnnnnnnnnnnnnnnnnnnnnnnnnnnnnnnnnnnnnnnnnnnnnnnnnnnnnnnnnnnnnnnnnnnnnnnnnnnnnnnnnnnnnnnnnnnnnnnnnnnnnnnnnnnnnnnnnnnnnnnnnnnnnnnnnnnnnnnnnnnnnnnnnnnnnnnnnnnnnnnnnnnnnnnnnnnnnnnnnnnnnnnnnnnnnnnnnnnnnnnnnnnnnnnnnnnnnnnnnnnnnnnnnnnnnnnnnnnnnnnnnnnnnnnnnnnnnnnnnnnnnnnnnnnnnnnnnnnnnnnnnnnnnnnnnnnnnnnnnnnnnnnnnnnnnnnnnnnnnnnnnnnnnnnnnnnnnnnnnnnnnnnnnnnnnnnnnnnnnnnnnnnnnnnnnnnnnnnnnnnnnnnnnnnnnnnnnnnnnnnnnnnnnnnnnnnnnnnnnnnnnnnnnnnnnnnnnnnnnnnnnnnnnnnnnnnnnnnnnnnnnnnnnnnnnnnnnnnnnnnnnnnnnnnnnnnnnnnnnnnnnnnnnnnnnnnnnnnnnnnnnnnnnnnnnnnnnnnnnnnnnnnnnnnnnnnnnnnnnnnnnnnnnnnnnnnnnnnnnnnnnnnnnnnnnnnnnnnnnnnnnnnnnnnnnnnnnnnnnnnnnnnnnnnnnnnnnnnnnnnnnnnnnnnnnnnnnnnnnnnnnnnnnnnnnnnnnnnnnnnnnnnnnnnnnnnnnnnnnnnnnnnnnnnnnnnnnnnnnnnnnnnnnnnnnnnnnnnnnnnnnnnnnnnnnnnnnnnnnnnnnnnnnnnnnnnnnnnnnnnnnnnnnnnnnnnnnnnnnnnnnnnnnnnnnnnnnnnnnnnnnnnnnnnnnnnnnnnnnnnnnnnnnnnnnnnnnnnnnnnnnnnnnnnnnnnnnnnnnnnnnnnnnnnnnnnnnnnnnnnnnnnnnnnnnnnnnnnnnnnnnnnnnnnnnnnnnnnnnnnnnnnnnnnnnnnnnnnnnnnnnnnnnnnnnnnnnnnnnnnnnnnnnnnnnnnnnnnnnnnnnnnnnnnnnnnnnnnnnnnnnnnnnnnnnnnnnnnnnnnnnnnnnnnnnnnnnnnnnnnnnnnnnnnnnnnnnnnnnnnnnnnnnnnnnnnnnnnnnnnnnnnnnnnnnnnnnnnnnnnnnnnnnnnnnnnnnnnnnnnnnnnnnnnnnnnnnnnnnnnnnnnnnnnnnnnnnnnnnnnnnnnnnnnnnnnnnnnnnnnnnnnnnnnnnnnnnnnnnnnnnnnnnnnnnnnnnnnnnnnnnnnnnnnnnnnnnnnnnnnnnnnnnnnnnnnnnnnnnnnnnnnnnnnnnnnnnnnnnnnnnnnnnnnnnnnnnnnnnnnnnnnnnnnnnnnnnnnnnnnnnnnnnnnnnnnnnnnnnnnnnnnnnnnnnnnnnnnnnnnnnnnnnnnnnnnnnnnnnnnnnnnnnnnnnnnnnnnnnnnnnnnnnnnnnnnnnnnnnnnnnnnnnnnnnnnnnnnnnnnnnnnnnnnnnnnnnnnnnnnnnnnnnnnnnnnnnnnnnnnnnnnnnnnnnnnnnnnnnnnnnnnnnnnnnnnnnnnnnnnnnnnnnnnnnnnnnnnnnnnnnnnnnnnnnnnnnnnnnnnnnnnnnnnnnnnnnnnnnnnnnnnnnnnnnnnnnnnnnnnnnnnnnnnnnnnnnnnnnnnnnnnnnnnnnnnnnnnnnnnnnnnnnnnnnnnnnnnnnnnnnnnnnnnnnnnnnnnnnnnnnnnnnnnnnnnnnnnnnnnnnnnnnnnnnnnnnnnnnnnnnnnnnnnnnnnnnnnnnnnnnnnnnnnnnnnnnnnnnnnnnnnnnnnnnnnnnnnnnnnnnnnnnnnnnnnnnnnnnnnnnnnnnnnnnnnnnnnnnnnnnnnnnnnnnnnnnnnnnnnnnnnnnnnnnnnnnnnnnnnnnnnnnnnnnnnnnnnnnnnnnnnnnnnnnnnnnnnnnnnnnnnnnnnnnnnnnnnnnnnnnnnnnnnnnnnnnnnnnnnnnnnnnnnnnnnnnnnnnnnnnnnnnnnnnnnnnnnnnnnnnnnnnnnnnnnnnnnnnnnnnnnnnnnnnnnnnnnnnnnnnnnnnnnnnnnnnnnnnnnnnnnnnnnnnnnnnnnnnnnnnnnnnnnnnnnnnnnnnnnnnnnnnnnnnnnnnnnnnnnnnnnnnnnnnnnnnnnnnnnnnnnnnnnnnnnnnnnnnnnnnnnnnnnnnnnnnnnnnnnnnnnnnnnnnnnnnnnnnnnnnnnnnnnnnnnnnnnnnnnnnnnnnnnnnnnnnnnnnnnnnnnnnnnnnnnnnnnnnnnnnnnnnnnnnnnnnnnnnnnnnnnnnnnnnnnnnnngaactggaggccgcgctggccgaggccaaagccctgtccagcaagtacgaggcggaaatgggggacatgaccaacagcagccgcaccttgaccacctactgggcacttcccgctggcatggaactcaagggccgcctgattgtgcagaaggccagggcacgggatttggacatgatcgaacaggcgctgggcgctttatcgttgcgtccgatcttgggtgcgcaatctgctcggggctgtggggaagtgtccggcgtattcgatgtactccaaggcactcgtctcctgaagaaaatatcaattggtgcttggagcgctgcggtggtgagtgaattttctcgcgccgaagagcaacaaatctcagcctaaacaacaagttagagctgctcagttcaaaccaccctgtgttggggtggttgctagaaccactgccgcacgcgcgccagctccaggcccgttcaaaccaccctgtgttggggtggttgctagaacctggctggagttcggccgcactggccgcaggttcaagccaccctgtgttggggtggttgctagaacagcgtcacccgcagcgcttgggctttggcggttcaagccaccctgtgttggggtggttgctagaacacccggctggacctgacgcgcagccagaaggttcaagccaccctgtgttggggtggttgctagaacagctcttccgtccaggtgctgccagcctccgttcaagccaccctgtgttggggtggttgctagaacctgcagaccgccatcgtcaacagcatgatcgttcaagccaccctgtgttggggtggttgctagaacgaatagcgcctctaacacctctggcgtcgggttcaagccaccctgtgttggggcggttgctagaactattgcgacacggtgggtatctcgcgggaggttcaagccaccctgtgttggggtggttgctagaacgtaggtggccacggcctgctcggcggtcaggttcaagccacactgtgttggggtggttgctagaactacgccagcagcatggaccccgagcgcacggttcaagccaccctgcgttggggtggttgctagaaccatcggcggcgcacctcgcagcagtggcggcgttcaagccaccctgtgttggggtggttgctagaacgccgagcgggcacggatggcagcggcgcaagttcaagccaccctgtgttggggtggttgctagaacccggcgcagctgctaccaggcggtgtgcatgttcaagccaccctgtgttggggtggttgctagaaccagaacggcatcaccatcaccgatgatcgcgttcaagccaccctgagttggggtggttgctagaacgtgcaggcgttcatcttggccttgcaagccgttcaagccaccctgtgttagggtggttgctagaacgcgctcatgcatgacccagccaagcccgaggttcaagccaccctgtgttggggtggttgctagaaccgccaggttccctacgtgcaagacgccatcgttcaagccaccctgtgttggggtggttgctagaacgccggtgacgatgcgctcgcggtcagccaggttcaagccaccctgtgttggggtggttgctagaacagcgggatcaggatcggcatggccagcagcgttcaagccaccctgtgttggagtggttgctagaacgccagcagcatcaccacgcccgtcgtccaggttcaagccaccctgtgttggggtggttgctagaaccgggtgatgccgtactgaatcgttcgctccgctcaagccaccctgtgttggggtggttgctagaacgtgtagccgatggccatgcagatgggttcggttcaagccaccctgtgttggggtggttgctagaacggcactttcgtgttcgatgtgcgcgacctcgttcaagccaccccttattggggtggttgctagacctggcggcttttttaggtgctcatgtcctgggctcaagccacacagtattggggtggttgctagaaacacctgcagaagctgggcgacggcaccatcgttcaagccaccctgacttggggtggttgctaaaacccgtctgtatagtgactcggtgttactgaggttcaagccaccctgtattgaggtggttgctggaacacctgcatggcgggcagccgcgcggtggcttttcaagccaccctgtgttgggggtggttactagcgtgcgcaaggtacgcccgggttcggccatagcgagctactagcgggcatcgcagcgctctgcaagcaaccggcacagactggcctcgccaaaaccagtctttccgaacgggagcaattcttgctccatgtccaacaaattgtcgccagcactttcatcgaatgaacgcctcgccaatcggctttttcaggacggccgaacaacacaatctctacagcctgattcaagcgcaccagcgcaagttggacggcccactgctgcttgaaggcgggacgggcctgggcaaaactcgggcgtatttggcagccatcttcggggcggccagggctggatttggcgtagcagtggtgctgcctacacatcaattgattgatcaactcctcgcgtcttcagacctggcagcaacccggggggaagtgaccactgccgcattcagacccgagcgattctttgagggcagccgcaaggactatgtgtctcaaaagcgagcggcaattaacgcacaggtcatggtttgcacttctgcaagcgtgatcatcgatcagaggttgggtggtgaatacaacggtgtcaccctgcgcgactacatcgtgtttgacgaggctgaccaactgccagacatggccgccttgcagtcggacttttcagttggtgccgaggaccttgcaaacctcggcatttctttgaccactgcccctgaagccttgaccgccatcctcgccaagccatcgagggccgtcgaacctgaagtgagggctgctgcacgcatcatcttggacgcgatcaatgagcccgcctggtttcagaaggctggcattgacgatgagcaaaacattgtcctgacccacaagctgcccggccgactgctcaagaacatcagcaacaaggcaaacgttgcgtttgtgtccgcaactctcaccgttgcgggcaagttcactgatttttgcagtgccatgggcattgagcaggtcagcagcttgtcatccatcattgagccacgagttcatggcaccttggactttcgagtccgcgcactggaggtggatacgccggaatgggtggagggcgttgtttcggcaatagccggcgccgaaaagccggtgcttgtggcgaccacatcgcatgagttgtctgagatgctgggtgaacgactcaaggcagcagtggttcgcagcgccgaagagacggcggcgcaagccagccaacggtgtgcgggcgggatcttgattgcggcgggggcgtgggcaggcctggatactcccttgcgctggcgatctattgttgtgcctcgggtgccttttggtcagcctacggtggtcgatggcgcaatagtcacgagctacatcgacgccagaaacacggccatccgacgactcaggcaggtgatcggccgagggctacgcagccccgacgcagtttgtacgatttaccttatggacggtcgtgcagagagcctggctgggtttgttcctgaacgcttcacccaggcctggacgcagcgggatttcctggagggctcacgacaaacagtctccttgtccaaggcggagcgcgacccatcagtgcgccgacacgccttgcagcactatggatgcatatgcatggcatgcggattcaaacccaaggtgttggaacaactgcaggtgcaccaccttgagcctatcagcgagggcctacgcaggacgcgactcgaagacgtagcggtcttgtgcgcgctctgccacatcttggcccatacgaagtcgccgcccattgagttagaacggcttcgcaaaatggcagatccagggctaacctgaacgacatttgagccgcatcgcgccagcacaaaggctcgggagccactgtgccggggtactggctcagccccaggcacagggaacagccgtgttcacgggcattgcaggtcgctgagccactgtgcctctactatttcttagaaagataactaagagaatagacgcatcaacacaagaaacagccagcaggaagaagtgcaatacctgctggctcagcggctcagcggctcagcagacggctaagcaaatggggccgagtcgatttgctgctgatagtgctccaggccagcctgggccagggactcgtgatcatgcttttgacgctcatagccgcgtttctggtgcccgccgacacgccttcgcgccgcaacccagcccaggcgttcgatgatttcagcgacccgacgactcacctgaggcgtgcggcgggacatatcaatgccattgacacgaccgaacggcccgtcatcgcggatgctcaaacatccaatcaactcgtccgtggtgacaaagtcgcgcttgtaagttgccggcttcggaccaccatactcattcgaagggccggcaggctcagcaaacagcagctcgtccacatacgcttgaatcggcgcggcccatgggtcgtcaatgctgtagtcctcatgatgctcgcgggccaaacgctctgcatcccgaaactccacgccatgcgccaaaaagtagaccctcgcctcggcccacaactgcgcacagtcccgtcgggttgccgctggatcgcattggccaactttcaccggcagccatcttcgattgccagtggagtcacgcaagaaatctgcttgattggttgatgcaatgaaaatgccccggcgcgggttggtcttgggtctctctttgtacttctccacccagcagtcggacgtggcgctgagaaatgccttcaaggactctgaatccctggcacccaaaccgcgaagctcgggcaactccagcacgagtttgccgcgcatcttgcgggctgtgtcgtcatcgcgagtgctcaggtcaatggtgccaaagaagcgagcttcaaaggcaattgcctcgatggttgaagtcttgccgcaaccttgtccaccggcaaacaccgcaagcatgtcggccttgcaaccaggcgacaggacacgccccgccagtgctgaccagaggtacttactcacggctcggtggtactcggtgtcggcggcaccgcaataggcagaaagaaagttctccatgcgaggcaccccatcccaactcaggccattcagccactgctgcgcactgtcaaaggagttctcttcagcgacgagttatacggtgtctcgcat

SEQ ID NO: 170 - DNA, 12901 bp, Artificial Sequence
  Synthetic Oligonucleotide
  misc_feature (1)..(7163): n is a, c, g, or t
nnnnnnnnnnnnnnnnnnnnnnnnnnnnnnnnnnnnnnnnnnnnnnnnnnnnnnnnnnnnnnnnnnnnnnnnnnnnnnnnnnnnnnnnnnnnnnnnnnnnnnnnnnnnnnnnnnnnnnnnnnnnnnnnnnnnnnnnnnnnnnnnnnnnnnnnnnnnnnnnnnnnnnnnnnnnnnnnnnnnnnnnnnnnnnnnnnnnnnnnnnnnnnnnnnnnnnnnnnnnnnnnnnnnnnnnnnnnnnnnnnnnnnnnnnnnnnnnnnnnnnnnnnnnnnnnnnnnnnnnnnnnnnnnnnnnnnnnnnnnnnnnnnnnnnnnnnnnnnnnnnnnnnnnnnnnnnnnnnnnnnnnnnnnnnnnnnnnnnnnnnnnnnnnnnnnnnnnnnnnnnnnnnnnnnnnnnnnnnnnnnnnnnnnnnnnnnnnnnnnnnnnnnnnnnnnnnnnnnnnnnnnnnnnnnnnnnnnnnnnnnnnnnnnnnnnnnnnnnnnnnnnnnnnnnnnnnnnnnnnnnnnnnnnnnnnnnnnnnnnnnnnnnnnnnnnnnnnnnnnnnnnnnnnnnnnnnnnnnnnnnnnnnnnnnnnnnnnnnnnnnnnnnnnnnnnnnnnnnnnnnnnnnnnnnnnnnnnnnnnnnnnnnnnnnnnnnnnnnnnnnnnnnnnnnnnnnnnnnnnnnnnnnnnnnnnnnnnnnnnnnnnnnnnnnnnnnnnnnnnnnnnnnnnnnnnnnnnnnnnnnnnnnnnnnnnnnnnnnnnnnnnnnnnnnnnnnnnnnnnnnnnnnnnnnnnnnnnnnnnnnnnnnnnnnnnnnnnnnnnnnnnnnnnnnnnnnnnnnnnnnnnnnnnnnnnnnnnnnnnnnnnnnnnnnnnnnnnnnnnnnnnnnnnnnnnnnnnnnnnnnnnnnnnnnnnnnnnnnnnnnnnnnnnnnnnnnnnnnnnnnnnnnnnnnnnnnnnnnnnnnnnnnnnnnnnnnnnnnnnnnnnnnnnnnnnnnnnnnnnnnnnnnnnnnnnnnnnnnnnnnnnnnnnnnnnnnnnnnnnnnnnnnnnnnnnnnnnnnnnnnnnnnnnnnnnnnnnnnnnnnnnnnnnnnnnnnnnnnnnnnnnnnnnnnnnnnnnnnnnnnnnnnnnnnnnnnnnnnnnnnnnnnnnnnnnnnnnnnnnnnnnnnnnnnnnnnnnnnnnnnnnnnnnnnnnnnnnnnnnnnnnnnnnnnnnnnnnnnnnnnnnnnnnnnnnnnnnnnnnnnnnnnnnnnnnnnnnnnnnnnnnnnnnnnnnnnnnnnnnnnnnnnnnnnnnnnnnnnnnnnnnnnnnnnnnnnnnnnnnnnnnnnnnnnnnnnnnnnnnnnnnnnnnnnnnnnnnnnnnnnnnnnnnnnnnnnnnnnnnnnnnnnnnnnnnnnnnnnnnnnnnnnnnnnnnnnnnnnnnnnnnnnnnnnnnnnnnnnnnnnnnnnnnnnnnnnnnnnnnnnnnnnnnnnnnnnnnnnnnnnnnnnnnnnnnnnnnnnnnnnnnnnnnnnnnnnnnnnnnnnnnnnnnnnnnnnnnnnnnnnnnnnnnnnnnnnnnnnnnnnnnnnnnnnnnnnnnnnnnnnnnnnnnnnnnnnnnnnnnnnnnnnnnnnnnnnnnnnnnnnnnnnnnnnnnnnnnnnnnnnnnnnnnnnnnnnnnnnnnnnnnnnnnnnnnnnnnnnnnnnnnnnnnnnnnnnnnnnnnnnnnnnnnnnnnnnnnnnnnnnnnnnnnnnnnnnnnnnnnnnnnnnnnnnnnnnnnnnnnnnnnnnnnnnnnnnnnnnnnnnnnnnnnnnnnnnnnnnnnnnnnnnnnnnnnnnnnnnnnnnnnnnnnnnnnnnnnnnnnnnnnnnnnnnnnnnnnnnnnnnnnnnnnnnnnnnnnnnnnnnnnnnnnnnnnnnnnnnnnnnnnnnnnnnnnnnnnnnnnnnnnnnnnnnnnnnnnnnnnnnnnnnnnnnnnnnnnnnnnnnnnnnnnnnnnnnnnnnnnnnnnnnnnnnnnnnnnnnnnnnnnnnnnnnnnnnnnnnnnnnnnnnnnnnnnnnnnnnnnnnnnnnnnnnnnnnnnnnnnnnnnnnnnnnnnnnnnnnnnnnnnnnnnnnnnnnnnnnnnnnnnnnnnnnnnnnnnnnnnnnnnnnnnnnnnnnnnnnnnnnnnnnnnnnnnnnnnnnnnnnnnnnnnnnnnnnnnnnnnnnnnnnnnnnnnnnnnnnnnnnnnnnnnnnnnnnnnnnnnnnnnnnnnnnnnnnnnnnnnnnnnnnnnnnnnnnnnnnnnnnnnnnnnnnnnnnnnnnnnnnnnnnnnnnnnnnnnnnnnnnnnnnnnnnnnnnnnnnnnnnnnnnnnnnnnnnnnnnnnnnnnnnnnnnnnnnnnnnnnnnnnnnnnnnnnnnnnnnnnnnnnnnnnnnnnnnnnnnnnnnnnnnnnnnnnnnnnnnnnnnnnnnnnnnnnnnnnnnnnnnnnnnnnnnnnnnnnnnnnnnnnnnnnnnnnnnnnnnnnnnnnnnnnnnnnnnnnnnnnnnnnnnnnnnnnnnnnnnnnnnnnnnnnnnnnnnnnnnnnnnnnnnnnnnnnnnnnnnnnnnnnnnnnnnnnnnnnnnnnnnnnnnnnnnnnnnnnnnnnnnnnnnnnnnnnnnnnnnnnnnnnnnnnnnnnnnnnnnnnnnnnnnnnnnnnnnnnnnnnnnnnnnnnnnnnnnnnnnnnnnnnnnnnnnnnnnnnnnnnnnnnnnnnnnnnnnnnnnnnnnnnnnnnnnnnnnnnnnnnnnnnnnnnnnnnnnnnnnnnnnnnnnnnnnnnnnnnnnnnnnnnnnnnnnnnnnnnnnnnnnnnnnnnnnnnnnnnnnnnnnnnnnnnnnnnnnnnnnnnnnnnnnnnnnnnnnnnnnnnnnnnnnnnnnnnnnnnnnnnnnnnnnnnnnnnnnnnnnnnnnnnnnnnnnnnnnnnnnnnnnnnnnnnnnnnnnnnnnnnnnnnnnnnnnnnnnnnnnnnnnnnnnnnnnnnnnnnnnnnnnnnnnnnnnnnnnnnnnnnnnnnnnnnnnnnnnnnnnnnnnnnnnnnnnnnnnnnnnnnnnnnnnnnnnnnnnnnnnnnnnnnnnnnnnnnnnnnnnnnnnnnnnnnnnnnnnnnnnnnnnnnnnnnnnnnnnnnnnnnnnnnnnnnnnnnnnnnnnnnnnnnnnnnnnnnnnnnnnnnnnnnnnnnnnnnnnnnnnnnnnnnnnnnnnnnnnnnnnnnnnnnnnnnnnnnnnnnnnnnnnnnnnnnnnnnnnnnnnnnnnnnnnnnnnnnnnnnnnnnnnnnnnnnnnnnnnnnnnnnnnnnnnnnnnnnnnnnnnnnnnnnnnnnnnnnnnnnnnnnnnnnnnnnnnnnnnnnnnnnnnnnnnnnnnnnnnnnnnnnnnnnnnnnnnnnnnnnnnnnnnnnnnnnnnnnnnnnnnnnnnnnnnnnnnnnnnnnnnnnnnnnnnnnnnnnnnnnnnnnnnnnnnnnnnnnnnnnnnnnnnnnnnnnnnnnnnnnnnnnnnnnnnnnnnnnnnnnnnnnnnnnnnnnnnnnnnnnnnnnnnnnnnnnnnnnnnnnnnnnnnnnnnnnnnnnnnnnnnnnnnnnnnnnnnnnnnnnnnnnnnnnnnnnnnnnnnnnnnnnnnnnnnnnnnnnnnnnnnnnnnnnnnnnnnnnnnnnnnnnnnnnnnnnnnnnnnnnnnnnnnnnnnnnnnnnnnnnnnnnnnnnnnnnnnnnnnnnnnnnnnnnnnnnnnnnnnnnnnnnnnnnnnnnnnnnnnnnnnnnnnnnnnnnnnnnnnnnnnnnnnnnnnnnnnnnnnnnnnnnnnnnnnnnnnnnnnnnnnnnnnnnnnnnnnnnnnnnnnnnnnnnnnnnnnnnnnnnnnnnnnnnnnnnnnnnnnnnnnnnnnnnnnnnnnnnnnnnnnnnnnnnnnnnnnnnnnnnnnnnnnnnnnnnnnnnnnnnnnnnnnnnnnnnnnnnnnnnnnnnnnnnnnnnnnnnnnnnnnnnnnnnnnnnnnnnnnnnnnnnnnnnnnnnnnnnnnnnnnnnnnnnnnnnnnnnnnnnnnnnnnnnnnnnnnnnnnnnnnnnnnnnnnnnnnnnnnnnnnnnnnnnnnnnnnnnnnnnnnnnnnnnnnnnnnnnnnnnnnnnnnnnnnnnnnnnnnnnnnnnnnnnnnnnnnnnnnnnnnnnnnnnnnnnnnnnnnnnnnnnnnnnnnnnnnnnnnnnnnnnnnnnnnnnnnnnnnnnnnnnnnnnnnnnnnnnnnnnnnnnnnnnnnnnnnnnnnnnnnnnnnnnnnnnnnnnnnnnnnnnnnnnnnnnnnnnnnnnnnnnnnnnnnnnnnnnnnnnnnnnnnnnnnnnnnnnnnnnnnnnnnnnnnnnnnnnnnnnnnnnnnnnnnnnnnnnnnnnnnnnnnnnnnnnnnnnnnnnnnnnnnnnnnnnnnnnnnnnnnnnnnnnnnnnnnnnnnnnnnnnnnnnnnnnnnnnnnnnnnnnnnnnnnnnnnnnnnnnnnnnnnnnnnnnnnnnnnnnnnnnnnnnnnnnnnnnnnnnnnnnnnnnnnnnnnnnnnnnnnnnnnnnnnnnnnnnnnnnnnnnnnnnnnnnnnnnnnnnnnnnnnnnnnnnnnnnnnnnnnnnnnnnnnnnnnnnnnnnnnnnnnnnnnnnnnnnnnnnnnnnnnnnnnnnnnnnnnnnnnnnnnnnnnnnnnnnnnnnnnnnnnnnnnnnnnnnnnnnnnnnnnnnnnnnnnnnnnnnnnnnnnnnnnnnnnnnnnnnnnnnnnnnnnnnnnnnnnnnnnnnnnnnnnnnnnnnnnnnnnnnnnnnnnnnnnnnnnnnnnnnnnnnnnnnnnnnnnnnnnnnnnnnnnnnnnnnnnnnnnnnnnnnnnnnnnnnnnnnnnnnnnnnnnnnnnnnnnnnnnnnnnnnnnnnnnnnnnnnnnnnnnnnnnnnnnnnnnnnnnnnnnnnnnnnnnnnnnnnnnnnnnnnnnnnnnnnnnnnnnnnnnnnnnnnnnnnnnnnnnnnnnnnnnnnnnnnnnnnnnnnnnnnnnnnnnnnnnnnnnnnnnnnnnnnnnnnnnnnnnnnnnnnnnnnnnnnnnnnnnnnnnnnnnnnnnnnnnnnnnnnnnnnnnnnnnnnnnnnnnnnnnnnnnnnnnnnnnnnnnnnnnnnnnnnnnnnnnnnnnnnnnnnnnnnnnnnnnnnnnnnnnnnnnnnnnnnnnnnnnnnnnnnnnnnnnnnnnnnnnnnnnnnnnnnnnnnnnnnnnnnnnnnnnnnnnnnnnnnnnnnnnnnnnnnnnnnnnnnnnnnnnnnnnnnnnnnnnnnnnnnnnnnnnnnnnnnnnnnnnnnnnnnnnnnnnnnnnnnnnnnnnnnnnnnnnnnnnnnnnnnnnnnnnnnnnnnnnnnnnnnnnnnnnnnnnnnnnnnnnnnnnnnnnnnnnnnnnnnnnnnnnnnnnnnnnnnnnnnnnnnnnnnnnnnnnnnnnnnnnnnnnnnnnnnnnnnnnnnnnnnnnnnnnnnnnnnnnnnnnnnnnnnnnnnnnnnnnnnnnnnnnnnnnnnnnnnnnnnnnnnnnnnnnnnnnnnnnnnnnnnnnnnnnnnnnnnnnnnnnnnnnnnnnnnnnnnnnnnnnnnnnnnnnnnnnnnnnnnnnnnnnnnnnnnnnnnnnnnnnnnnnnnnnnnnnnnnnnnnnnnnnnnnnnnnnnnnnnnnnnnnnnnnnnnnnnnnnnnnnnnnnnnnnnnnnnnnnnnnnnnnnnnnnnnnnnnnnnnnnnnnnnnnnnnnnnnnnnnnnnnnnnnnnnnnnnnnnnnnnnnnnnnnnnnnnnnnnnnnnnnnnnnnnnnnnnnnnnnnnnnnnnnnnnnnnnnnnnnnnnnnnnnnnnnnnnnnnnnnnnnnnnnnnnnnnnnnnnnnnnnnnnnnnnnnnnnnnnnnnnnnnnnnnnnnnnnnnnnnnnnnnnnnnnnnnnnnnnnnnnnnnnnnnnnnnnnnnnnnnnnnnnnnnnnnnnnnnnnnnnnnnnnnnnnnnnnnnnnnnnnnnnnnnnnnnnnnnnnnnnnnnnnnnnnnnnnnnnnnnnnnnnnnnnnnnnnnnnnnnnnnnnnnnnnnnnnnnnnnnnnnnnnnnnnnnnnnnnnnnnnnnnnnnnnnnnnnnnnnnnnnnnnnnnnnnnnnnnnnnnnnnnnnnnnnnnnnnnnnnnnnnnnnnnnnnnnnnnnnnnnnnnnnnnnnnnnnnnnnnnnnnnnnnnnnnnnnnnnnnnnnnnnnnnnnnnnnnnnnnnnnnnnnnnnnnnnnnnnnnnnnnnnnnnnnnnnnnnnnnnnnnnnnnnnnnnnnnnnnnnnnnnnnnnnnnnnnnnnnnnnnnnnnnnnnnnnnnnnnnnnnnnnnnnnnnnnnnnnnnnnnnnnnnnnnnnnnnnnnnnnnnnnnnnnnnnnnnnnnnnnnnnnnnnnnnnnnnnnnnnnnnnnnnnnnnnnnnnnnnnnnnnnnnnnnnnnnnnnnnnnnnnnnnnnnnnnnnnnnnnnnnnnnnnnnnnnnnnnnnnnnnnnnnnnnnnnnnnnnnnnnnnnnnnnnnnnnnnnnnnnnnnnnnnnnnnnnnnnnnnnnnnnnnnnnnnnnnnnnnnnnnnnnnnnnnnnnnnnnnnnnnnnnnnnnnnnnnnnnnnnnnnnnnnnnnnnnnnnnnnnnnnnnnnnnnnnnnnnnnnnnnnnnnnnnnnnnnnnnnnnnnnnnnnnnnnnnnnnnnnnnnnnnnnnnnnnnnnnnnnnnnnnnnnnnnnnnnnnnnnnnnnnnnnnnnnnnnnnnnnnnnnnnnnnnnnnnnnnnnnnnnnnnnnnnnnnnnnnnnnnnnnnnnnnnnnnnnnnnnnnnnnnnnnnnnnnnnnnnnnnnnnnnnnnnnnnnnnnnnnnnnnnnnnnnnnnnnnnnnnnnnnnnnnnnnnnnnnnnnnnnnnnnnnnnnnnnnnnnnnnnnnnnnnnnnnnnnnnnnnnnnnnnnnnnnnnnnnnnnnnnnnnnnnnnnnnnnnnnnnnnnnnnnnnnnnnnnnnnnnnnnnnnnnnnnnnnnnnnnnnnnnnnnnnnnnnnnnnnnnnnnnnnnnnnnnnnnnnnnnnnnnnnnnnnnnnnnnnnnnnnnnnnnnnnnnnnnnnnnnnnnnnnnnnnnnnnnnnnnnnnnnnnnnnnnnnnnnnnnnnnnnnnnnnnnnnnnnnnnnnnnnnnnnnnnnnnnnnnnnnnnnnnnnnnnnnnnnnnnnnnnnnnnnnnnnnnnnnnnnnnnncactgttggccaacgtgtcggtggtggtgatgctctacgcgtttcgcgagggcgacgccaacatgcgcagcgtctggctgtgctcacgcaacgacgccatcggccatatcgctgtgatggtcgccgccctcggcgtcttcggcacccgcagcgcctggcccgacctgatcgtcgccagcctgatggccagcctggccttgcaagggggctggcaggtgctgcggcaagcgcgcgctgaactcaaaggtgagacgctaaggcgcgatggtcacggccacgatcatgcccatgaccacgggcattgaggtgaacaggtagccggggacgggcgcctcgccacgcgcccgatcgacttgtgcgcccaatcccaaaggtagaaaaaacggctttgccgtcgactaagattcaacgcgtcaagcgcggcaatgtcgccaatggcgcaagcatccacgagcgatgcggaagggagaaaacttggaaacgtttgtcttgcgggcgctcttgcgcacgcccatcatccgacgaggctttgtcaccctcgacgccttgctgatggccacactcggaaccggcgatgtctcccatttggttcgctgcgaagaagggctctacttcgccagtgctggttttgcggtcgacgccaccgcgactcaacgggcttcgtttgtggccagcatgcgccccgagcactcgcctcagtggttggaagtcgtgcgctcaaacaccttggacggcgatctcaagatcggcctttctcgacaacgcgaaggcggcaacatcatcagcgcctacaccgccaccgtggcaaaagcgattgagtggtacgccaccggtgaaccgcaatccgtgttggacgtgatgcacacggttggcttcattggcaaacggcgcacagcgggttttggtgaggtcactcactgggaaaccgagccaggcgatcttgacgggttggtgggttatggcaatgagccgttgcgccccatccccactgagcgctggacatcagggggtgactgggtcccggtggaagcggcttggaaagcgccctactgggacgttcgcagccggacccgctgctttgtgccagaggcgttttgacatgaacggcccagcatttttcatgcgccatgcgggttaccggctgctgccagctggccgcaaaaccggcgatgctgtcgccgatgccgacaccctgtttggcgtctccttgcctctgaacacaggcaaaacgctgcgcctgtcctcatgctggatggtggtcacaccgcaatgggcggccaccagtttcaaggctgtggcggaagcgggtttccggcatgacatcgagcgcaaggtggccatcgaggcagcgctcaaatccggcgagccgtgtgtcttgctggcgctgggcaagcgaaccatgaccgcacgcgacatttttgtcacccacgacccgcgtgctgcgcgcctgtgcagcgagggcgaggtcaaaaccttcaacgccaccctggagaaaacatggacatcgtgatcgacaagccagcgcgggtgcaagggtatgccttgcaccgcatcgtcgcgcagtactgccaaggcaaatcggccctttgggcggacgaaggcgcccaggttcggattcggaccgaagaggccattccatcgcagtacgaggtgggcaaattgctggcgttcaccaccaccgcgtgcgtctcctttgccagcgggcacaaaaacaaatacttgcccgtggacgattggcgcgggcgcagggtgtggctggaaaaacaggcccaaaaacacggctttgagatcgttggtgttcatgtctcaggcggtatgcaacgcgtcgaaacccatgatgggcgccgtttctcaatcgacgccaccgagttcaccggcctgcttcgggtgaccgatccgctgaagttcagcaactgcctcatcaaaggtatcggccgcatcggtaaggccttcgggctcaatctgctgatcgttcagtaaaccagggaaaaaacgccatgacccaacgctctctcatcgttgccgacgttcagctgcacaccgcgcaacctttgaccttcacgcaccacggcacagatggcttgccgctgttgacacgcggagtagatgccgaggggcgccaccagcgcaccgtctacattcccgccgctcaattccggggccgtattcgccacgaagccgccatggcagaactgcgcagccggccagagaaggccaagctggaagacgcgtatttgctggcgctgggtcaggatcttcggcctgatgaagacgaggagccggaggcgattcgcctcaaggagcaattgacgttccgcgcggcaaaccccttgctcgacctgttcggcacctggaaggtcgccagccgcttgtttgtgtctcacctgctgccgcaggtcaacgtgatgcccgacaccgtgagccacattcggcgcgatctcgacagcaacgacgacatgatggctttgcttgacgatcaggagcaagaccgcttttatgagcgccaggaaaagcaaggtctggcctccaaagccgaggccctcatcaagatcgccatccgcgagctggctggcgcccgcaaagccaaagaccaggtcaaagtcgatgaaatgacggtcaagctcgaagaactcaaggaactgaagaaatcccgcaaaggtgatgaccagtcggacaacagcaagcacctgctggaactgcaagtgattcctgcgggcatcaacctgagtggatcgctcaccgtgcacgacgcaaaagcctgcgatctgcaaacgctggtgcaagccctgcgcgggttcagccagaaaccctatctgggtgcccagcgtgcaaggggatgcggcgagatcagcgcccgcgtcacgttcaagaacggcgaaggcgatgtgctcgcggtggtggcgtttgccgccatggcgcccgccactgtggaatggaccgaagccggccggacattcgcgcaatccagcgtcaccgctcttgcggcatgagctatcgcagccccgaacagctgcgctacgcccgtttgatcgagggcgcgctcaagccaggccccccgctgctcgctggcgctgcggctggcctgggcaagacgcacggctacagcgttccgctcattcgatcgggcctgcgtgtcgccatcgcgatgagcacgcgccagctgatcgaccagtacctcgccagcgacgcgctccaagtcgcccaagaagggcaggcggtgaccgttgttgcgctgcaaacccggcgccacttcgagaacgacaagacctactcggctcaccgggaacaggcgctggctgctcaggtgttggtggtgacccacgccgccgcgctgatcgacagcttccgccccgactacgctgggctgcggcagcgcgacgtggtgctgttcgacgaagccgatctgctggccgatgccgctgacctgcgcagcacgtttcgccttgaggccgacaccttgtccgcttgtggcgcgaagaacctgagccccaccgaagcagccgagcgggttcagcgcgaggtcagcgcgccggaggaccgtgcagcagccaaggccatcctgtatgcgctggcccatcctgctgcctacaaggtggtgggtttcgaggaagacggcgcgctggtccttcggcatcgcatgcctgggcgcatgctcaagcccttggtgcgagacgcaccccgcaccatcttcaccagcggcaccttgcaagtgcgcgggcggtttgaccatttcgtgcgagccctggggcttgaagtcatcgcgccagaaagccgccacatcgaccccgcgcgccacggccaactgacggtggtggtggcagtcgacgaactcgacttgagcgccatggcgcagcgcattgcggcggccgcccggcccacgctggtgctcaccaccagccacgcgatgacacaggcactgggccattgcttgccaggcgctgtggtgcggggagccgatgagacgctggctgacgcggtgcagcgctgcccggacgacggcattttggtggcagcgggcgcctggacggggctggatgcgccccggctgcgctggaaaacggtagcgattcccaaagcaccttacggaccaccggtgacgattgatggggaacagatcacccactacatcgacagccaagtggtggcggtgcgccggagcaaccaaggcctccaccgcggactcagaacccccgacgccacctgcacgctgctgctgctcgaccctcgcagcagccgcgacgccctgcgcgaggccattccgcagcgttttcaggtggattggcaaggcttcgaggaaggctcgcaggccatgcaatcgcatctcaagcgcgagcgaaacgccagcctgcgggcagctgcccttaaacaccacggcgcgaagtgcatggctgaaagatgtgccgtgtcttcaccgcacctgctggatgttcaccacacccggcccatcgcagaaggcgagcggcgcaccacgctcgacgaggtggtggtgctttgcaaaaaccaccatgctgacgctcaccaccggatgcggatggcggctttggcgaatgccggggaggagaaaatgattgcctgacaggggtttgggtgttgttagatcgagctgccatgcgaatgtgcagctactggaacgggcaacaacacaacggtgtggcttccgcagatcgagctgccatgcgaatgtgcagctactggaacttcgctggcgctgcgtccatgccgatgcttgatcgagctgccatgcgaatgtgcagctactggaacatcattgggaagcacgcatgggtggcaaagatcgagctgccatgcgaatgtgcagctactggaacatgacgctctacaccgacacgcttcacatggaacgagctgccatgtgaatgtgcagctactggaaccggtgccgccgggtcggtgaacttgctgttgaacgagctgccatgtgaatgtgcagctactggaacacggcccacccaatcgagcggtgcgtcaacgaacgagctgccatgtgaatgtgcagctactggaactatttcaccggccccaacaaaaccggctacgaacgagctgccatgtgaatgtgcagctactggaacacaatctcgcctcccagacagcacgtccacgaacgagctgccacgcaaatgtgcagctacttgaacaggttgccggtaatagtgagtgagttcatggaaagagctgccatgcaagtgtgcagctactggaaccaaatttggcaagcagtccaaggccagcaagaacgagctgccattcaaatgtgcagctactggaacatgcttgagtacgtgcaagggatgcgtgaggaacgagctgccatgcaaatgtgcagctactggaacatgcactgcccgacatgcatatggtgcggggaacgagctgccatgcaaatgtgcagcttctggaacacgattgcggtggctacagctggcgggattaaattagctgccacgaaagtgtgcagctactagaacaggtagcaggcggcggtgtaggcgtaaaccagaacgagctgccgtgcaaatgtgcagctactggatatgcgtttcgccaaccccgtcagattgcaggctgcgccagcggcaccgcaacccgccgctcacgcgagagcagcgtgtaaaccgtgggcacgacaaacacggtgagcagcgtgcccaggctcatgccgcccacgatcacccacccgatctgctgccggctctcggcgcctgcaccgctggcca

SEQ ID NO: 171 - DNA, 12759 bp, Artificial Sequence
  Synthetic Oligonucleotide
  misc_feature (1)..(199): n is a, c, g, or t
nnnnnnnnnnnnnnnnnnnnnnnnnnnnnnnnnnnnnnnnnnnnnnnnnnnnnnnnnnnnnnnnnnnnnnnnnnnnnnnnnnnnnnnnnnnnnnnnnnnnnnnnnnnnnnnnnnnnnnnnnnnnnnnnnnnnnnnnnnnnnnnnnnnnnnnnnnnnnnnnnnnnnnnnnnnnnnnnnnnnnnnnnnnnnnnnnnnnnnngccgaggagattgggcagcattttcaccggccgccccttgtgcagtacgacgcgctcgcggatgcgcacgccgagcttggcgcagaggtcctcgaaatccttggtcgtgcacaggtgcacgttcggcgtgtcgtaccactggtagggcaagttgtccgagacgggcatgcgcccggcgagcacctgcagtcgcccaatccagtggccgaaattcgggaagctcacgatcgcctcgcggcccacgcgcaggatctcgcgcatgatgtcctcggtatgccgcacggcctgcagcgtctgcgacaggatcacgcagtcgaacgagccgtcctggaagctttccagcccgctctcgaggttcatctgcagcacgttgacgtcgttcctcacgcaggcgccgactttggtgtcgtcgatctcgatgccgtagccgtaggcgcgccgctgctcccacaggtagcgcagcagcatgccgtcgccgcagcccagatcgaggatgcgcgagtccggcgcgacccagccggcgatggcggcgaggtcggggcggcgggcgagcagagcgcggtctgcgtcagtcatgaatgcgcctggtcgatagttcgcgcgcggcgctcacagctcgatgttcccgtagtaagcgcgcaccgcgttcatgtagcgctcgtcgtccatgagaaaggcgtcgtggccgtgcggcgcgtcgatctcgaggtaggacaccacgcgccggttgtcgagcagcgcgcgcacgatctcgcgcgagcgcgcaggcgcgaatcgccagtcggaggtgaatgagacgacgaggaaagccgccttggcgcgcgccatggccgccgacaggtcgccgttgaactccgccgccgggtcgaagtaatcgagcgccttggtgatccgcaggtacgtgttcgcgtcgaagtaggtcgagaacttgtcgccctggtagcgcaggtaggactcgatctcgaaatcgatgtcgaagttgaagccgagcacgccgcttcgcaacgtgcggccgaacttctccatcatcgcgtcatccgacaggtacgtgatgtggccgagcatgcgcgcgaggcgcagccccgtgcgcggcaccacaccgtgctcgtagaaatgcccgccgtggaaatccgggtcggtggtgatcgcctggcgcgccacttcgttgaaggcgatgttctgcgccgaaagcttcggcgccgccgcgatcacgatcgaatgccggatgcgcccggggaaagacagcgtccactgcagcgcctgcatcgcgccgaggctgccgcccatgaccgcggcgaacgtctcgatgccaaggtgatcggcgaggcgggcctgcgcctcgacccagtcctccaccgtcactacaggaaaatcgccgccccattgcttgccggtcgccgggttgaggctcatcgggccggtcgagccatggcagccgccgaggttgttcacgccgaccacgaagaagcggttggtgtcgagcggcttgcccgggccgaccatgttgtcccaccagccgacgttctccgggtcgtccgagtagatgccggccacgtgatgcgcggcattcagcgcgtggcagacgagcacggcgttcgtgcgcgccgcgttcagcgtcccgtacgtttcgtaggtcagctcgaacgcgggcagcgtcgcgcctcccttgaggaggagcggttcggtgaagcgcgccttctgcggcacgacgacgccgacggaggcgggggcgaactgcggtgcgttcatttgaggatcagggattcaatggcccggaaaacaaaaaatccgttcagccttgcgcggaaacgggttttgcggacctgtctctttagcggtatttgttgcgcgcccgcaagctgaacttcaaatcggcgcgtctggcagggggcaaagttacccggccccccgctccctgtcaacctgcgggtattttttgtgtcaggagcaaatgagttgtccggatcagtagcacgtaatgtgtccggtttagaggtggggtatgcaaacctccttgagccggacgcgcttgctacgggaggtccggaagatgagcctcgacctgacgctggtgacgggcaacgtgcgcgaattttccagggttcgccgcctgcgcgtggaaaactgggcggcagggtagcggcgtcattcgatcactttcgttgcctgcagcaggaccgattgggaaatctccagcccgatgcacatcatcgcgctgatcaacgattcaccaatgacgtaccaccccgtacccgacatcgcgtaacgaaggcgcgaggcccgcggaattaggggcaaactacccccggactcgttgcagcaagctcaacgttcggctcgggtgttcggggaaaggagcgggattgatttggctatctgtccccgtgggcggcgagcacgtgcacgtgcgggttgaagttggccaggtccccgaaggtctgcacgaacaggatcagccccgggcgcgcaccagtgagcgcttgggtgtacgcctcgaccagcagtcgcgcagcaatgcggcaaagctcccccagccacgcccgctgctgcccgaaggcggggcgcagaagcttcgggacggtgaacagaagtcgtcccgtgccgtcccggattactattcgtctgccccatcaaggctcaaaaggagtgaaaagatgaccctggccgaaaccatctatcaacgcagcctgaaactgcccgacgcggccgcgcaggaggcactggatttcattgaattcctcaaccaacgctatggcatcgccgagacagcgaacgtctctgccgatggcgacgcggcggcctacgatgcctggttcaaggcgcaggtgaataaggcgattctcgacccgcgccccggaattcccgccgcgatcgctcgtgagcactttgccgcccgccgcgacgcgctgcgccgccagtcccgcacgggggaatgaaacttatctggcatccgctggcgatgtcggatcgcgagcgcatcttggacttcatcgcccgcggccttcgccgctatccggcaagaccgccgaactcacgctcttgattcgcgactggcgcgacccgttgcctgcgctattggcctgaatggcttctagcgcatgggttgcctgaaaaaatgacttgggttattggagcttgcgcaccgttcggtggctacgctgctgcgcttgccgatgtccaggtgagtctaccgaaaggcggccctaagttcgatgcgctgttgaaggtgcaccatgtcggcccatttctcgccttggggttcgccggatctgtgaaaatcgggtttgaaatggttgacagccttcgcgagttcctcgccccatcgccagaggacgagccgaactccgcatggattccgagttgggtggcggaaaattggtgcccgatggccgtccagattttcgctcgcgccagcgcggtcgaacaagaaaacgagtgccacctgctattgatcggggttcatcctgtggaggacgttcttccaggtctggcgagagcgtttgtgatcaggatgtccttacccaattttcggccgtggtacagccgcaagaaaatgttctccgtcttgagtattggcaaaaaagcgccgaagtaccgtcgcatcgtgcgcgatttgttcagaccaacctctggaatcatcaaagctgaaatcggttccaccggcggttgggggcgcgctttgagtttcgccatcggaggggcaattgaacgcgacccggtgtctggcattagcccccatttgacatacgttcaggtgagccgaaggggcactgaatttttgaccaacgatcgaatagcctacccgcgtgcaggcgaatcaggtagcccgactgagtttcgcatgccggcgctggcgacaaactatccagacctagttcaattgctcgctctcaaaggtgtaaagggaatcggcgctacttgttaaacgtgatacaccagttctgaaccagcagttcggctcgtttctccagaccgtccttcgtcgcgtttcgggaccggccggttcccacgtcaacaacccgcgatcaggctgcagccacccggcgatgtcgtcaaagacgatcattggtgcgcgtcgcgtgtttccgggtgggaaaggaggcggtcaaagaagccttggtatgtgccacatcgttggctaccgaaaagacgtaatcgactgatccgcccaaccggagatcgcccgaaatttggcattgcaatagtcacgtcccgctacttatactttcacggcgaaacttttacggaagtccggcaagaattgctgcgatctctgtgggaacgccacccttcagaaattgtacggcacgtctgcgcgaggctcataggatctaaatgggaatgcgaactccagatgagacatggccaagactgtggacaagatcaaggtaacgatgtcgcttggcagtccgatagtaatcaacggcggctacatgacgttggatgcgctgcttgctggaattatcttcgaccagactggtgacatagagaaagcgcatagccagatcccactggcgaactcccacggcctctggcacggcagtgccgccatcgtagagaagacagatatggggcggactgcgttcgtcgctaatctgagggcgatgcatgaccttgaccatgagcttattgccaagaacaagtacggcaaggttcaccgcgccatcgggcttacccgccgaagcgatttcggcgctgtgatgaatagctacaagtcattctcggcacctgagatcacttggtatgccactggtgacgcagccaaggtcgaagctcttctcagcgcggtggagttcatcgggaagcgccgcgcaagcggttacggccaagttgtgggccttcggatcgaggatggcgacctggacggcataaccggtcatttcggcgaaccgctacgccctgtcccggtagaactgttcagtggcgataagactgcattgaaagcggataccgcgtggaggccggcctattggcatcctacgaaccgtgccatctgctttgccccagaggtggtttgatgaacacctttgagttcttcaacgaacacttcggacggcatttggttccgatagaaggtgagccgcatgaagcgacccaccacgcgctgtccaccagtcacaaactgctgaagggaaccgtcagtcgcctgtcttccggatgggcaatcgttcgtcccggcttgtccagcgttcagctaaaacttgccgcaactgggctgaaatacgacaccagaacccggatcgaatctttcatggaggaactggacacatggaacgggaaggagccgcgcatcttcctgatgttcgacaaagcacctgtccctatctccaacgtcttcctaacggttgatcgacggctggtccgtatatgttcccctgctggcgtggaaaccttcaatgcggatgttccgccacccgaagatgcgggcggcatccagaaggccatctggaagaggaagtctttttcatgatggatcacgtcatccccaagccggaactgatcaacggctactcattgcaccgaatggttgccggacttgctgccggttcacctgcgctgttttgcgacaacggcgaccacatactgatccgcaccgacaagccgatcacgaagttcccccgcagcgtcaacattccctcagacggcgatgtgattgccttccgattgaaggcgtgtgttgctgatcgtaaaggtgggcgaaacatctatccggcaattggtgactggcggacacgccgcgcatggctggacgcgcaaggcagcaaggaagggttcgatgtacttgccgtccacgttgatggtaatcgggaacacgtcacggcaagcagcggaaggaaattctggatcgattcgaccagtttcacgggtgttctcaaggtcactgacccggtcaagttctcatcggcactggttcgcggcgtcggccgcgtaggcaaggctttcggcaacggcatgttggtcatctaaaaatgcggaggttcacatgaaccagacaatcataatcaacggcaccatcaaaacgatggctcccctgtcgatcaagatgcctcaagccgaaggtactcgggaaggagacttcgacaacttcccggtaatgacccgtggggtagatgaggctggcaacaagcagaagaccgcctttctcccggcaacgactcttagaggtttcttacgccgagccgtaacactgcggaacatgcgtaaagctgccgaaaacaagaagccctaccgtctgccgcagatctacagcgaaatgatcggacaggatcctgagagcgagaagcaggcgggtgacattgacctcctggcgttgagaaaggtacgggaagacagtccagtgcttgacctcttcgggagcggcctcggcatcaagtcgcggctgaaagtcagccatttcgtgccgcatacgaacatcctccctgatgtgtttacgggagttcgcaaggatcttgatgacaccgaggaagccctcgaactgatggacaagtcagacatgaaggcattccttgcgcgtagcgggagcaacaacaaacgcgcggcgtcagcagccttggttaagcagcttgaaggtcaggtcagacggacggaaaagaaaggggacaaagtacctgaagacatatcaaaagccctaacgatagcgaaggcagagatggacaaattcaagggagagatgggcgacatgcaaaacagcacccgaaccatcgtccagcactacgcactgccttcgggaatcgaattggctgggagaatcgtcatcgaaaactcccaggatcgggatgtggaattgatcgaacacgcgcttgaccaactcagccgcaggccaattctgggcgctcacagttcacgcggatgcggggaaattgcgggtacgtttcagttccatgattccgacgggaagctgctaaaaaccatcgccatcggcgactacaaaccctcaagagtcacgaatttctgaacccaacatgcaagaacgaagcacacgatcaaggagttactgaagagcggatacagccacctcgaatttgggtggctactagaagccgatactcgcgttcctaacgtggttctccgatacagccacctcgaatttgggtggctactagaagtggctgcggttggggtgcgcggtcattagggatacagccacctcgaatttgggtggctactagaagggtggcggccagcacctcctttcggatcttgatacagccacctcgaatttgggtggctactagaaggggtccggggaacactgccgcagcgcgcgggatacagccacctcgaatttgggtggctactagaagaaaggctttgccgggcatgttcgagcacttgatacagccacctcgaatttgggtggctactagaaggcaggcacacgtgcacaattcaagaagcaagatacagccacctcgaatttgggtggctactagaagagacggttgccgatctacaagacgcgctgagatacagccacctcgaatttgggtggctactagaagtgaactggcaaccgattgaaactgcgccgagatacagccacctcgaatttgggtggctactagaagacgcccgaaaccgcgccgccgcccgaatcggatacagccacctcgaatttgggtggctactagaagtcgatcatcagcatcgcccgcttgaagatcgatacagccacctcgaatttgggtggctactagaagcgcgccctgccggtcttgagcgcctcggacgatacagccacctcgaatttgggtggctactagaaggcgcttgcgccgcgcaaattcacggatgcggatacagccacctcgaatttgggtggctactagaagtacaaattcggtgtcacgcaggagaaagccgatacagccacctcgaatttgggtggctactagaagcaacgagaaagcgcggcgaggagtcatgcggatacagccacctcgaatttgggtggctactagaagagaatcccgcgcatttccgctacgctcggcgatacagccacctcgaatttgggtggctactagaagccatcagaaacgcggccttgcggaagcacgatacagccacctcgaatttgggtggctactagaagacctcgaaccggcgatctgggtatgtctcagatacagccacctcgaatttgggtggctactagaagacagcggtgcagactgcgcgggcgaggtcagatacagccacctgaaattggggtggctactagaagacgctcaggaaggccgagacagctatctacgatatagccacctggaattagggtggctactagaaggaaataggctattcacccacgcgcccgcccagatacagccaccccgcattggggtggctactattgatctttcctaaatacatgacaaccgttaatcatctcaagcgttgtatctccaggatcaatcttggagaatatgaagatggcgcaaaagcgattgagcgaagcagcgaagaagcgcttgcgggcaggccgaatgctgcttgcgggcaggggttgtgcagaagcggcagcagcggtcggggtggcgcggcaaaccgtgtacacgtggaaggcactacttgatgagggcggcatcgatgcactccgggccgtgccagagccaggccggcctgcccagcttgatgcggcgcaactggcatcggtgcgaggggccatcctgcaaaagcccaccgaacatggctttggcaccgagctgtggacgctcaagcgcgtgggcgctgtcatcgagcggctgcatggcgtgcgctttagccagacccaggtgtggcggatactgggtagtctgggtttcagcccacaaaagcccgagaagcgcgccatcgagcgaaatgaagaggcggtgcggcaatggaagcgccgcacgtggcctgcgcttaaaaaaaagcccggcgcgagggccgtctgatcgtcttcatcgacgaatcgggcatcagcgagcgccccactcgggtgcgcacctggggcctgaagggtcaaacccccatcatccagtttcacttcaactggaaccacgtctcggtcattgcgggattgactcgcaccaactgcctgtttcggctgcacgagggcagtatcaagaaagaggagattgtcgaattcctcaaagccctcaaggcgcatttgaagcagccactgctgatcatctgggatggcttgagggcacaccgcagtcgtctggtgcgcgagtacctggacagcttggcgggccatatccaaatttctttcctgccgccgtactcgcccgatctgaatccagtggagtacctgtgggcttggctcaaacgtcacgccctggccaactactgccccaacaacctggccgaactgcacaccactgcgcgcaacaagctcaagagtgcccagaagcgcccctcgatcattgcggcttgctggatgcaggctacgctttggtaatgtcattagttatggaaaggtcaatagaagcgaaacgacccgctcccctcccgcaacggcgatacagccaccccgaattagggtggctactagaagttgtagtgctcacggtgccagtccggcgcggatacagccacctgaaattaaggcggctactagaagtacagccggatcaccagcgccagagcgggcgatacagccaccccgcatttgggtggctactggaagtagtaacttagggagcagtcttctgctcacctgcaattgcgttggcgcgatgcattttggtgaggtaatttgttcaatcgcccttgcggtaacctttcgtcgttgaactatttgtcaatgactgtaagctccaacggaacgcgtgtttcgctcacctgaacaggctaacttccacaagattcttgcttcgcacatcgcaaagcatgatgcccccttgctgcttgagggaacgactggaatcgggaagacaagggcatacctgtcagcagtaatgggggcggcttccggcaagaagatcgccatagccctgcctagccatcaactgatcgatcagctattggcctctaccgatcttgcagccacaaagcgggacggtatccgcattgccgccttcaggccgaggcgttggtttgatagcgcacctgagtatcagacccagaaggcactggccttggacgcggaagtgatggtttgcaccagcgcgtccgtcatcatcgatcaacggctacggggcgaatacaacggcgtgacgctgcgcgactacatcctgtttgatgaagcggatcagctacccgaatcagcagcactgcaaagcgactgcgaaattacaggtaagcaattgaagggcttggggatcgtggcggagaatgctcggcaagccgccgattcagttcttaagaagaaaggtattgaaccagaagtcaaagctgccgccctgatgatattggaggccatcgatgagcctgcgtggttccatcaggcaggggttactgacgatggcgggatcatgctgttccacaagatgccgggacgattgctgaagcggatcgccaaccgcagcgaagtagcttttgtcagcgcaaccctatccatcaatgaccgtttcgatgactttagacgcgcactgggcattcagaaacaaagcgacctctcttcaatagttgaacccagcgtgcatggggcggttcagtttgaggtggcggacgttgaggtcaacacgccggagtggctggatctaaacaagaggactattgaaaaagcggcgttgtcagggagggtgttggtggccacgccaagtaatgaattggctattacgttgggctcactgatccccagcgcaacgatcaggtcggcggaaacgactgctcaggcggcggcacggatgggtgacagcactgttctgatcgcagcgggcgcgtgggctggcctggacaccccgaaccaatgggacaccatcgtgatcccccgcatcccctacgaacgaccaatcgttcttgacggtcacatagagagcagtttccttgacacgcagaacacagcggtcaggagattgcgtcaggttatcggacgaggcttgaggagcaaacaggccgtctgcaaggttcacatccttgattcacgttacaagaacgtggagtcgttcgtccccaaacgtttccggactgcgtggcaggacaagggattccttgaggggaagcggcaggagatcaccctatcggatcttgaacgccacccagccgtcaggaagaaagcactccggcattacggcatgaagtgcatggcctgcgacttcgtgccacagcactccagacagttggatgtccaccacctaaacccgctggcggagggaggagagcggctgacctcaatggctgacgttgcagtcctgtgcgcgaactgccaccgactcgcacattccactgcccagccaataccagtagcaactttgcgtagcatgcatggcaaatgacgtgcgcggtagcgaaaccacttccttcaatgtccggcatgactagacccgatgcggcaatgccagacttgcacacattccatcggtcatggcgccggacattttcggtgccaacgatccaaggtcactgtactcccctgcggccattgggagggcggtgcggggtgcgatccgagggaagcggtttgatttgaggcacactggtggcacactacaccgagaaaccggaaaaaggcaggcgcaaactgcgataggtaaccggttgatacgattgttcttgaatgctttgccgtatcgcagtttcctcgattccctcgactgttaatccgcaggtccctggttcgatctcaggtcgaggagccacagcatcatcgcgctgatcaacgacccgcctgtggtgcggcgcatcctggaacgcctggggctctggcagccgcaggcgacagagcgctcgccacccgtggcctctgaagcatggccggtgaacagcgacctgccaatgacgcatcaccccgatccgcatgccctacgcgcgcagcaggcgaaccttcacgccgaagcgcgccgcggcccgggcaagttgcttgtccgcggcgcacaggagttcgcggttcgatgccgcgatggcaaggtggagggcatcgagcgtggagagcggcgcctcgcgcgagcgcagcagcctggccgcttcgacgaatgtttccgcgacgacgggcagccgcctgtagccgcgttcggcaacgtgggcatcgaaggcccgcagcactatcgcgccgtatgctgcggatagcgtcctttcgcgcaagcggcgggcgacgacggaagcgaactcaacctcggtcagatccgtgatcgcgggcgcagcggtgccaactgccgcggccgctgcggcggagagcgcctctggaatgtacagcgcccccagcacggaagtgtccaggtacaaattcagtaccgggacttgcggcgttcctcgatgacgagctggctggtgggcttgcccctgaccttgatacccgccctgaaagcggccaggtcgggcagtccgcgtgtcgcggtaccgaccggcctgagttccgcggcggcatgtaacaataacagccaccggaatttttcctgccgccccctccagcatggctgcccagtccgact

SEQ ID NO: 172 - DNA, 12730 bp, Artificial Sequence
  Synthetic Oligonucleotide
  misc_feature (1)..(6427): n is a, c, g, or t
nnnnnnnnnnnnnnnnnnnnnnnnnnnnnnnnnnnnnnnnnnnnnnnnnnnnnnnnnnnnnnnnnnnnnnnnnnnnnnnnnnnnnnnnnnnnnnnnnnnnnnnnnnnnnnnnnnnnnnnnnnnnnnnnnnnnnnnnnnnnnnnnnnnnnnnnnnnnnnnnnnnnnnnnnnnnnnnnnnnnnnnnnnnnnnnnnnnnnnnnnnnnnnnnnnnnnnnnnnnnnnnnnnnnnnnnnnnnnnnnnnnnnnnnnnnnnnnnnnnnnnnnnnnnnnnnnnnnnnnnnnnnnnnnnnnnnnnnnnnnnnnnnnnnnnnnnnnnnnnnnnnnnnnnnnnnnnnnnnnnnnnnnnnnnnnnnnnnnnnnnnnnnnnnnnnnnnnnnnnnnnnnnnnnnnnnnnnnnnnnnnnnnnnnnnnnnnnnnnnnnnnnnnnnnnnnnnnnnnnnnnnnnnnnnnnnnnnnnnnnnnnnnnnnnnnnnnnnnnnnnnnnnnnnnnnnnnnnnnnnnnnnnnnnnnnnnnnnnnnnnnnnnnnnnnnnnnnnnnnnnnnnnnnnnnnnnnnnnnnnnnnnnnnnnnnnnnnnnnnnnnnnnnnnnnnnnnnnnnnnnnnnnnnnnnnnnnnnnnnnnnnnnnnnnnnnnnnnnnnnnnnnnnnnnnnnnnnnnnnnnnnnnnnnnnnnnnnnnnnnnnnnnnnnnnnnnnnnnnnnnnnnnnnnnnnnnnnnnnnnnnnnnnnnnnnnnnnnnnnnnnnnnnnnnnnnnnnnnnnnnnnnnnnnnnnnnnnnnnnnnnnnnnnnnnnnnnnnnnnnnnnnnnnnnnnnnnnnnnnnnnnnnnnnnnnnnnnnnnnnnnnnnnnnnnnnnnnnnnnnnnnnnnnnnnnnnnnnnnnnnnnnnnnnnnnnnnnnnnnnnnnnnnnnnnnnnnnnnnnnnnnnnnnnnnnnnnnnnnnnnnnnnnnnnnnnnnnnnnnnnnnnnnnnnnnnnnnnnnnnnnnnnnnnnnnnnnnnnnnnnnnnnnnnnnnnnnnnnnnnnnnnnnnnnnnnnnnnnnnnnnnnnnnnnnnnnnnnnnnnnnnnnnnnnnnnnnnnnnnnnnnnnnnnnnnnnnnnnnnnnnnnnnnnnnnnnnnnnnnnnnnnnnnnnnnnnnnnnnnnnnnnnnnnnnnnnnnnnnnnnnnnnnnnnnnnnnnnnnnnnnnnnnnnnnnnnnnnnnnnnnnnnnnnnnnnnnnnnnnnnnnnnnnnnnnnnnnnnnnnnnnnnnnnnnnnnnnnnnnnnnnnnnnnnnnnnnnnnnnnnnnnnnnnnnnnnnnnnnnnnnnnnnnnnnnnnnnnnnnnnnnnnnnnnnnnnnnnnnnnnnnnnnnnnnnnnnnnnnnnnnnnnnnnnnnnnnnnnnnnnnnnnnnnnnnnnnnnnnnnnnnnnnnnnnnnnnnnnnnnnnnnnnnnnnnnnnnnnnnnnnnnnnnnnnnnnnnnnnnnnnnnnnnnnnnnnnnnnnnnnnnnnnnnnnnnnnnnnnnnnnnnnnnnnnnnnnnnnnnnnnnnnnnnnnnnnnnnnnnnnnnnnnnnnnnnnnnnnnnnnnnnnnnnnnnnnnnnnnnnnnnnnnnnnnnnnnnnnnnnnnnnnnnnnnnnnnnnnnnnnnnnnnnnnnnnnnnnnnnnnnnnnnnnnnnnnnnnnnnnnnnnnnnnnnnnnnnnnnnnnnnnnnnnnnnnnnnnnnnnnnnnnnnnnnnnnnnnnnnnnnnnnnnnnnnnnnnnnnnnnnnnnnnnnnnnnnnnnnnnnnnnnnnnnnnnnnnnnnnnnnnnnnnnnnnnnnnnnnnnnnnnnnnnnnnnnnnnnnnnnnnnnnnnnnnnnnnnnnnnnnnnnnnnnnnnnnnnnnnnnnnnnnnnnnnnnnnnnnnnnnnnnnnnnnnnnnnnnnnnnnnnnnnnnnnnnnnnnnnnnnnnnnnnnnnnnnnnnnnnnnnnnnnnnnnnnnnnnnnnnnnnnnnnnnnnnnnnnnnnnnnnnnnnnnnnnnnnnnnnnnnnnnnnnnnnnnnnnnnnnnnnnnnnnnnnnnnnnnnnnnnnnnnnnnnnnnnnnnnnnnnnnnnnnnnnnnnnnnnnnnnnnnnnnnnnnnnnnnnnnnnnnnnnnnnnnnnnnnnnnnnnnnnnnnnnnnnnnnnnnnnnnnnnnnnnnnnnnnnnnnnnnnnnnnnnnnnnnnnnnnnnnnnnnnnnnnnnnnnnnnnnnnnnnnnnnnnnnnnnnnnnnnnnnnnnnnnnnnnnnnnnnnnnnnnnnnnnnnnnnnnnnnnnnnnnnnnnnnnnnnnnnnnnnnnnnnnnnnnnnnnnnnnnnnnnnnnnnnnnnnnnnnnnnnnnnnnnnnnnnnnnnnnnnnnnnnnnnnnnnnnnnnnnnnnnnnnnnnnnnnnnnnnnnnnnnnnnnnnnnnnnnnnnnnnnnnnnnnnnnnnnnnnnnnnnnnnnnnnnnnnnnnnnnnnnnnnnnnnnnnnnnnnnnnnnnnnnnnnnnnnnnnnnnnnnnnnnnnnnnnnnnnnnnnnnnnnnnnnnnnnnnnnnnnnnnnnnnnnnnnnnnnnnnnnnnnnnnnnnnnnnnnnnnnnnnnnnnnnnnnnnnnnnnnnnnnnnnnnnnnnnnnnnnnnnnnnnnnnnnnnnnnnnnnnnnnnnnnnnnnnnnnnnnnnnnnnnnnnnnnnnnnnnnnnnnnnnnnnnnnnnnnnnnnnnnnnnnnnnnnnnnnnnnnnnnnnnnnnnnnnnnnnnnnnnnnnnnnnnnnnnnnnnnnnnnnnnnnnnnnnnnnnnnnnnnnnnnnnnnnnnnnnnnnnnnnnnnnnnnnnnnnnnnnnnnnnnnnnnnnnnnnnnnnnnnnnnnnnnnnnnnnnnnnnnnnnnnnnnnnnnnnnnnnnnnnnnnnnnnnnnnnnnnnnnnnnnnnnnnnnnnnnnnnnnnnnnnnnnnnnnnnnnnnnnnnnnnnnnnnnnnnnnnnnnnnnnnnnnnnnnnnnnnnnnnnnnnnnnnnnnnnnnnnnnnnnnnnnnnnnnnnnnnnnnnnnnnnnnnnnnnnnnnnnnnnnnnnnnnnnnnnnnnnnnnnnnnnnnnnnnnnnnnnnnnnnnnnnnnnnnnnnnnnnnnnnnnnnnnnnnnnnnnnnnnnnnnnnnnnnnnnnnnnnnnnnnnnnnnnnnnnnnnnnnnnnnnnnnnnnnnnnnnnnnnnnnnnnnnnnnnnnnnnnnnnnnnnnnnnnnnnnnnnnnnnnnnnnnnnnnnnnnnnnnnnnnnnnnnnnnnnnnnnnnnnnnnnnnnnnnnnnnnnnnnnnnnnnnnnnnnnnnnnnnnnnnnnnnnnnnnnnnnnnnnnnnnnnnnnnnnnnnnnnnnnnnnnnnnnnnnnnnnnnnnnnnnnnnnnnnnnnnnnnnnnnnnnnnnnnnnnnnnnnnnnnnnnnnnnnnnnnnnnnnnnnnnnnnnnnnnnnnnnnnnnnnnnnnnnnnnnnnnnnnnnnnnnnnnnnnnnnnnnnnnnnnnnnnnnnnnnnnnnnnnnnnnnnnnnnnnnnnnnnnnnnnnnnnnnnnnnnnnnnnnnnnnnnnnnnnnnnnnnnnnnnnnnnnnnnnnnnnnnnnnnnnnnnnnnnnnnnnnnnnnnnnnnnnnnnnnnnnnnnnnnnnnnnnnnnnnnnnnnnnnnnnnnnnnnnnnnnnnnnnnnnnnnnnnnnnnnnnnnnnnnnnnnnnnnnnnnnnnnnnnnnnnnnnnnnnnnnnnnnnnnnnnnnnnnnnnnnnnnnnnnnnnnnnnnnnnnnnnnnnnnnnnnnnnnnnnnnnnnnnnnnnnnnnnnnnnnnnnnnnnnnnnnnnnnnnnnnnnnnnnnnnnnnnnnnnnnnnnnnnnnnnnnnnnnnnnnnnnnnnnnnnnnnnnnnnnnnnnnnnnnnnnnnnnnnnnnnnnnnnnnnnnnnnnnnnnnnnnnnnnnnnnnnnnnnnnnnnnnnnnnnnnnnnnnnnnnnnnnnnnnnnnnnnnnnnnnnnnnnnnnnnnnnnnnnnnnnnnnnnnnnnnnnnnnnnnnnnnnnnnnnnnnnnnnnnnnnnnnnnnnnnnnnnnnnnnnnnnnnnnnnnnnnnnnnnnnnnnnnnnnnnnnnnnnnnnnnnnnnnnnnnnnnnnnnnnnnnnnnnnnnnnnnnnnnnnnnnnnnnnnnnnnnnnnnnnnnnnnnnnnnnnnnnnnnnnnnnnnnnnnnnnnnnnnnnnnnnnnnnnnnnnnnnnnnnnnnnnnnnnnnnnnnnnnnnnnnnnnnnnnnnnnnnnnnnnnnnnnnnnnnnnnnnnnnnnnnnnnnnnnnnnnnnnnnnnnnnnnnnnnnnnnnnnnnnnnnnnnnnnnnnnnnnnnnnnnnnnnnnnnnnnnnnnnnnnnnnnnnnnnnnnnnnnnnnnnnnnnnnnnnnnnnnnnnnnnnnnnnnnnnnnnnnnnnnnnnnnnnnnnnnnnnnnnnnnnnnnnnnnnnnnnnnnnnnnnnnnnnnnnnnnnnnnnnnnnnnnnnnnnnnnnnnnnnnnnnnnnnnnnnnnnnnnnnnnnnnnnnnnnnnnnnnnnnnnnnnnnnnnnnnnnnnnnnnnnnnnnnnnnnnnnnnnnnnnnnnnnnnnnnnnnnnnnnnnnnnnnnnnnnnnnnnnnnnnnnnnnnnnnnnnnnnnnnnnnnnnnnnnnnnnnnnnnnnnnnnnnnnnnnnnnnnnnnnnnnnnnnnnnnnnnnnnnnnnnnnnnnnnnnnnnnnnnnnnnnnnnnnnnnnnnnnnnnnnnnnnnnnnnnnnnnnnnnnnnnnnnnnnnnnnnnnnnnnnnnnnnnnnnnnnnnnnnnnnnnnnnnnnnnnnnnnnnnnnnnnnnnnnnnnnnnnnnnnnnnnnnnnnnnnnnnnnnnnnnnnnnnnnnnnnnnnnnnnnnnnnnnnnnnnnnnnnnnnnnnnnnnnnnnnnnnnnnnnnnnnnnnnnnnnnnnnnnnnnnnnnnnnnnnnnnnnnnnnnnnnnnnnnnnnnnnnnnnnnnnnnnnnnnnnnnnnnnnnnnnnnnnnnnnnnnnnnnnnnnnnnnnnnnnnnnnnnnnnnnnnnnnnnnnnnnnnnnnnnnnnnnnnnnnnnnnnnnnnnnnnnnnnnnnnnnnnnnnnnnnnnnnnnnnnnnnnnnnnnnnnnnnnnnnnnnnnnnnnnnnnnnnnnnnnnnnnnnnnnnnnnnnnnnnnnnnnnnnnnnnnnnnnnnnnnnnnnnnnnnnnnnnnnnnnnnnnnnnnnnnnnnnnnnnnnnnnnnnnnnnnnnnnnnnnnnnnnnnnnnnnnnnnnnnnnnnnnnnnnnnnnnnnnnnnnnnnnnnnnnnnnnnnnnnnnnnnnnnnnnnnnnnnnnnnnnnnnnnnnnnnnnnnnnnnnnnnnnnnnnnnnnnnnnnnnnnnnnnnnnnnnnnnnnnnnnnnnnnnnnnnnnnnnnnnnnnnnnnnnnnnnnnnnnnnnnnnnnnnnnnnnnnnnnnnnnnnnnnnnnnnnnnnnnnnnnnnnnnnnnnnnnnnnnnnnnnnnnnnnnnnnnnnnnnnnnnnnnnnnnnnnnnnnnnnnnnnnnnnnnnnnnnnnnnnnnnnnnnnnnnnnnnnnnnnnnnnnnnnnnnnnnnnnnnnnnnnnnnnnnnnnnnnnnnnnnnnnnnnnnnnnnnnnnnnnnnnnnnnnnnnnnnnnnnnnnnnnnnnnnnnnnnnnnnnnnnnnnnnnnnnnnnnnnnnnnnnnnnnnnnnnnnnnnnnnnnnnnnnnnnnnnnnnnnnnnnnnnnnnnnnnnnnnnnnnnnnnnnnnnnnnnnnnnnnnnnnnnnnnnnnnnnnnnnnnnnnnnnnnnnnnnnnnnnnnnnnnnnnnnnnnnnnnnnnnnnnnnnnnnnnnnnnnnnnnnnnnnnnnnnnnnnnnnnnnnnnnnnnnnnnnnnnnnnnnnnnnnnnnnnnnnnnnnnnnnnnnnnnnnnnnnnnnnnnnnnnnnnnnnnnnnnnnnnnnnnnnnnnnnnnnnnnnnnnnnnnnnnnnnnnnnnnnnnnnnnnnnnnnnnnnnnnnnnnnnnnnnnnnnnnnnnnnnnnnnnnnnnnnnnnnnnnnnnnnnnnnnnnnnnnnnnnnnnnnnnnnnnnnnnnnnnnnnnnnnnnnnnnnnnnnnnnnnnnnnnnnnnnnnnnnnnnnnnnnnnnnnnnnnnnnnnnnnnnnnnnnnnnnnnnnnnnnnnnnnnnnnnnnnnnnnnnnnnnnnnnnnnnnnnnnnnnnnnnnnnnnnnnnnnnnnnnnnnnnnnnnnnnnnnnnnnnnnnnnnnnnnnnnnnnnnnnnnnnnnnnnnnnnnnnnnnnnnnnnnnnnnnnnnnnnnnnnnnnnnnnnnnnnnnnnnnnnnnnnnnnnnnnnnnnnnnnnnnnnnnnnnnnnnnnnnnnnnnnnnnnnnnnnnnnnnnnnnnnnnnnnnnnnnnnnnnnnnnnnnnnnnnnnnnnnnnnnnnnnnnnnnnnnnntcccggagtacttcgccttccagttgtagaacgtcgcctcggagatcccgtgccgccggcacagctccttggtcttcgctccggcctccgcctccctcaacaccccgatgatcttctcttccgtatatctcgtcgccttcatcgcctgctcctggtgaagcagactctgctcccgtccgggactaaactcgggtgtcaggtcggtggcgcaccaaaatcttggaaattgagtagaggacgagtaccttcaggtctatggatcgctttgctgtcacgttgcgtcttggttcccccttggttacaggtgggggatatatgaccctagacgcgcttttggctgcgattctgtttgattcgggggagagcatcgaagccgctcacactcacattcccctacaaaatactcaaggggtatggcacggaagtgctgcgatctacgaaaccttggaagtgggtcgccaagcctttgtagctaatctccgcgccaatcacgatctagacccaagtcttgtcaccaagaacaagcaagggcaaattcacaccaagctgagtttgcgtcggcgacaggaattcggcgcggtgatgaatgggtatcaatactttgtaacggaggctgtcacttggtatggagaaggcgatgcggtccaagtggaaagattgctccgctcggtgcggttcattggaaaacgcagagcgagtgggttcggcgaagtcaaagcgattgaaatatccgagtctgaaagcgatggggtggtgagccccttcggtgaacccttgcgccccgttccacttgagttgtttacgggtgacaagggttccattcgtggtgatgcggcgtggaagcctgcgtattggcgacctgagaaccgcgccatttgttacctacccgcgccaaactaatgaacacctacgaattctttatggagaactttggtcggcatttgatcaatgccgacggacttaccgccgcgcagggtgcggaaaaaaccttgagtaccaatcacacgaccatcaaaggaacaacaagccgactttgttcagggtgggcaattgttcgtcctggcacttcgtcgcttcaactcaagctgcgtgcgcaaggtatcgcttacgatgatcggactcgcgtggaagcctttatggacgagcttgaaacttgggatggcgagtcaccaagaatctttcttgagtttgacaagcttcctgtgtccatcgccaacctattcataacggttgatcgtcggttagtgcgcatttgttcacccaagggagtggcgtcgtttgatttgagtgtggagcctgatgcctcagcgagtgtgattcaacgcgccatttggaagcgacgaaagcaatgatccgcgactatcgcatctcaaagccaccaagccttggactctatgcggtccatcggtttgtcgctgagttgtgtggtgaggacccgtatctgttcgtagaccgtggggactatgtagaaattcgcattcggcgggaactgagtccacagttccgtgaaattgtgattccgacaaatggcgatgtgatcgcgttctctctacggtctgcggtgtcaaaacgacacaagggcaagaacacctacgcaagacttggcgattggcgagcgcgacacgagtggctttacaagcgcagtgagaaaaacggcttcacgattcttgcgcttcacgccactgacggaagcgtgaaggtggaaggacaaggtgcgaaaattttttcaatggatcggactgactttacaggggttctaaaggtttgtgaccaagcgctttttgcgcattgtctgactcacggaattggacgagtcggcaaaccttacggaatgggaatgctcgtgatctgaacgaacaaaggttggaggctctatgtcaaagcgagtgattgtcaaagtgacgctgcggaccaagggtccactgtcgctcaaaatgcctgtggttgaaggtgcgcggggaaacgagtttgacaactttcctgtgatgacaaagggagtggatgcggagggaaacaaactccgcacgggttatctccccgcaaccacagtgcgtggattcttgcgccgagcagtgacgctacaacgaatgcgcaaagccgccgaagcaggaaagccgtacaagctgcctcaaatctataacgagatgattggacagaacgccgacagcgaaaagaaagctgaagaaatagatctgctcgcgatcaagaaagcacgcgaaagcagccctgtagttgatctcttcggatcagggttgaatgtgaaatcgcgactcttggtcagccacttttatcctgcgaccaatgtgctgcctgaagctttcacaggagtgcgcaaagacattgatgacacggaagacgcactggaactgctggattcgcaggatataatagaattccagagacgcaccgagcgcaatcgtgagcgagcggctgctgctgcgagggtcaagcagatggaaagcaagattcggcgtgatgaacgcaaggacggtgcgtcggaagacgacaaaaaagccctagagatcgccaagaaacaagaggaagctgctgaacgtgagatgggtgagatgaaagtgagcactcgccaaatcactactcactttgcgctccctgcggagattgaacttcacggaaggctagtgattgagcgtgcgaaagaccaagaccttgaaatgcttgaggacggattgcgtgagttgagtcgttcgcctgtactcggagcgcaatccgcaagaggatgtggagagattgaaggcacctttgaattcaccgatgaggagggaaaattgatcaaaaatgtggtggtgggtggctacagcgacgcaaaagtgacgaatttttgagcggcgaaaggagtaggacatgtctccgaatcagcgacttacacggtctctgtcgcagctccactgaatttgtggagctactgaaacctggtcggtcgagtgatgccggcgcagttggtcgcagctccactgaatttgtggagctactgaaactgtgggttccccatcggctatcgcggttccgtcgcagctccactgaatttgtggagctactgaaacaaagagcagatcatgcgctggacgcggggtgtcgcagctccactgaatttgtggagctactgaaacttcacactggtggcgggttgatcgttttgagtcgcagctccactgaatttgtggagctactgaaactccacaccggagcagcggtcaaggtgctggtcgcagctccactgaatttgtggagctactgaaacttaaccattgatgcacaaacgctggtgctcggtcgcagctccactgaatttgtggagctactgaaaccagaacatctcgcaggcgatccggtctgggggtcgcagctccactgaatttgtggagctactgaaaccacgtacctcaaacggtttcgcccgccgtcgtcgcagctccactgaatttgtggagctactgaaacgaatcgcttgcggtcgggttgtcagaacggtcgcagctccactgaatttgtggagctatttcttcagcgccactctccgtggcgcttttcttttttttcgctagaatcggggtgtgtttcgctccgttgaacaagccaactttcattctcgacttgctgctcacattcagcgagcggacgcgccgttgttgcttgagggagcgacagggcttggaaagactcgtgcttatctagccgcactcaagggcgcagtggaacaaggcaagtctgtcgcgattgtcgttcccacacacgacctgatctcgcagctgcttgcttcctcagatctgacagcggtgattcctgcgaccatcactcgcgcagcctttcgcccacggtcaatgtacgactccaagcgcgagtacgaagaagcgaaagcaagcgcgatagacgcgcaaatactgatctgtacaagttcatcgatgatcattgattcacgaacgaagggcaagtatcacggcgctacactgcgcgactacattctgtttgacgaagcggatcagcttcctcagtacgcagcactctcacgtgaccaagagatccgtggaggcgaactgaagcacctcggtatccgtggttctaatgcgaggacaattgcgcaagcggtgattgatcacaagagtgcggaatttgaaactcgcgcagcagcagaactgattcttgacgcactagaggaacccgcttggtatcacagcgcagggatgacagacgatggtggcattgcgctttatcacaaaatgccaggacgattgctcaagcgagtttccaattcacccaatgtcgcttttgtgagcgcgactctttcaattggtggaaagtttgatgactttcggcgagcgatgggaatcaccacacaaagcgcattgtccgcgatcattgagccaagcgatcacggaacactgaagtttttttacgccgctcatgaggtttcttctgaggaatggctacccgccacacaggaagcgattagtaaggcgcggaagccttgtttggtagtcactccaagcaacgagttgtctcagatgttgggtgggttgtttcctcaagccattgttcgaacggctaaggagaagaccactgatgcgattctgcggctgacagatgaaagcaatattctcatcgcctcagcagcttgggcgggattagacacacccattgagtggaagagcattgtgatcccgcgtatccctttttcgcgcccacaagtgatcgacggaaatgtggagagcagcttctttgattcacgcaacagtgccattcgccgaatgcgacaggtgatcggtcgtgggctacgcaagcctgatgcggagtgtgaggtctacattcttgacgagcgattggcgatgatcgagtcgttcatcccgtctaggtttcagcaggcgtgggtggcgcgtaaaatagtggaaggcgcaagagttgaaaatacgctatcaaaggctgaacgggatccgctgacacgcaagtcagcactgcgacactttggtcggaaatgcatgtcctgtgagttcgtcccgcgagtagacagtcagctggaggtccatcatctttatccactcgctgatggcggtgagcgagtcacacggatcgaaacggatgtggcggtgctttgcgccaattgtcaccgtttggctcattcggcgaaccctccactcaccgtggagattctcaggggacttcaccaatcagtggggtcagagcagtaagacgaatccgtgtggactaagggatccccggtaacccaccccctccccctgccgattgaagggggatggggggtctgtaatctaagaatttgctctggcctgcgccagcccgcgagacgcttataagtttcgccccggtttcgcattccttgcgtagctgccacccaagaatccacttccggggggcttgatgcggtactccagttcgcattgagccgcggctcctctctcaattgaactagggtctagcgtcgttccgtcgttcgccttggcaaaagccgcaacgccaaccttgccgcatagccttcggatttcgtttatatccatttccaaccttccataggcagactgcgaatcgcaccccgccagcgccatcagcaagagtgcggtagcaagtcttctatttattttgtttgccagcagcctgcatacagaccagacgcttgtttgaaggaaccgccaactctccctcgtaaaatccgacccttttttgatcatcatccggaatatcttttacggtcgcttcccacgtctccacgcacttgtctacgtcgctcttttgcgagcaacccgccaagggaattagtagggcgagtgcgacaagcagtttcatggattcaccctcccgccgggactatagcgccagaaacaacagttctattgggcagccatacggatgtaccgacgactgttccgggcatgaggctgggtttgagtgggctaaagcgaatggcgtaactgatgactcctgttatggggacagcacctcatttaccgagggctgtcaggcgtatttagaattactagaaagattttctgacccgaatttatctaacttgggaaacatgcaggagttacgcggcgctctggcgccgagcggcaactcgggctggtagggatccggcgccgtgcgctccaggtgcgccaggatcttcgcaatgaccgccggctcctcgatgctggcaacgactttgagcttcccgccgcaggcttttcgcgatcaccgcgcaagatcgccgaggccgtcaccatctcggtgtaaatcagtaaatctttgtgaaagccgcgaaggaagtaccgacaatgccgatccgtccagtcc

SEQ ID NO: 173 - DNA, 12700 bp, Artificial Sequence
  Synthetic Oligonucleotide
  misc_feature (1)..(9236): n is a, c, g, or t
nnnnnnnnnnnnnnnnnnnnnnnnnnnnnnnnnnnnnnnnnnnnnnnnnnnnnnnnnnnnnnnnnnnnnnnnnnnnnnnnnnnnnnnnnnnnnnnnnnnnnnnnnnnnnnnnnnnnnnnnnnnnnnnnnnnnnnnnnnnnnnnnnnnnnnnnnnnnnnnnnnnnnnnnnnnnnnnnnnnnnnnnnnnnnnnnnnnnnnnnnnnnnnnnnnnnnnnnnnnnnnnnnnnnnnnnnnnnnnnnnnnnnnnnnnnnnnnnnnnnnnnnnnnnnnnnnnnnnnnnnnnnnnnnnnnnnnnnnnnnnnnnnnnnnnnnnnnnnnnnnnnnnnnnnnnnnnnnnnnnnnnnnnnnnnnnnnnnnnnnnnnnnnnnnnnnnnnnnnnnnnnnnnnnnnnnnnnnnnnnnnnnnnnnnnnnnnnnnnnnnnnnnnnnnnnnnnnnnnnnnnnnnnnnnnnnnnnnnnnnnnnnnnnnnnnnnnnnnnnnnnnnnnnnnnnnnnnnnnnnnnnnnnnnnnnnnnnnnnnnnnnnnnnnnnnnnnnnnnnnnnnnnnnnnnnnnnnnnnnnnnnnnnnnnnnnnnnnnnnnnnnnnnnnnnnnnnnnnnnnnnnnnnnnnnnnnnnnnnnnnnnnnnnnnnnnnnnnnnnnnnnnnnnnnnnnnnnnnnnnnnnnnnnnnnnnnnnnnnnnnnnnnnnnnnnnnnnnnnnnnnnnnnnnnnnnnnnnnnnnnnnnnnnnnnnnnnnnnnnnnnnnnnnnnnnnnnnnnnnnnnnnnnnnnnnnnnnnnnnnnnnnnnnnnnnnnnnnnnnnnnnnnnnnnnnnnnnnnnnnnnnnnnnnnnnnnnnnnnnnnnnnnnnnnnnnnnnnnnnnnnnnnnnnnnnnnnnnnnnnnnnnnnnnnnnnnnnnnnnnnnnnnnnnnnnnnnnnnnnnnnnnnnnnnnnnnnnnnnnnnnnnnnnnnnnnnnnnnnnnnnnnnnnnnnnnnnnnnnnnnnnnnnnnnnnnnnnnnnnnnnnnnnnnnnnnnnnnnnnnnnnnnnnnnnnnnnnnnnnnnnnnnnnnnnnnnnnnnnnnnnnnnnnnnnnnnnnnnnnnnnnnnnnnnnnnnnnnnnnnnnnnnnnnnnnnnnnnnnnnnnnnnnnnnnnnnnnnnnnnnnnnnnnnnnnnnnnnnnnnnnnnnnnnnnnnnnnnnnnnnnnnnnnnnnnnnnnnnnnnnnnnnnnnnnnnnnnnnnnnnnnnnnnnnnnnnnnnnnnnnnnnnnnnnnnnnnnnnnnnnnnnnnnnnnnnnnnnnnnnnnnnnnnnnnnnnnnnnnnnnnnnnnnnnnnnnnnnnnnnnnnnnnnnnnnnnnnnnnnnnnnnnnnnnnnnnnnnnnnnnnnnnnnnnnnnnnnnnnnnnnnnnnnnnnnnnnnnnnnnnnnnnnnnnnnnnnnnnnnnnnnnnnnnnnnnnnnnnnnnnnnnnnnnnnnnnnnnnnnnnnnnnnnnnnnnnnnnnnnnnnnnnnnnnnnnnnnnnnnnnnnnnnnnnnnnnnnnnnnnnnnnnnnnnnnnnnnnnnnnnnnnnnnnnnnnnnnnnnnnnnnnnnnnnnnnnnnnnnnnnnnnnnnnnnnnnnnnnnnnnnnnnnnnnnnnnnnnnnnnnnnnnnnnnnnnnnnnnnnnnnnnnnnnnnnnnnnnnnnnnnnnnnnnnnnnnnnnnnnnnnnnnnnnnnnnnnnnnnnnnnnnnnnnnnnnnnnnnnnnnnnnnnnnnnnnnnnnnnnnnnnnnnnnnnnnnnnnnnnnnnnnnnnnnnnnnnnnnnnnnnnnnnnnnnnnnnnnnnnnnnnnnnnnnnnnnnnnnnnnnnnnnnnnnnnnnnnnnnnnnnnnnnnnnnnnnnnnnnnnnnnnnnnnnnnnnnnnnnnnnnnnnnnnnnnnnnnnnnnnnnnnnnnnnnnnnnnnnnnnnnnnnnnnnnnnnnnnnnnnnnnnnnnnnnnnnnnnnnnnnnnnnnnnnnnnnnnnnnnnnnnnnnnnnnnnnnnnnnnnnnnnnnnnnnnnnnnnnnnnnnnnnnnnnnnnnnnnnnnnnnnnnnnnnnnnnnnnnnnnnnnnnnnnnnnnnnnnnnnnnnnnnnnnnnnnnnnnnnnnnnnnnnnnnnnnnnnnnnnnnnnnnnnnnnnnnnnnnnnnnnnnnnnnnnnnnnnnnnnnnnnnnnnnnnnnnnnnnnnnnnnnnnnnnnnnnnnnnnnnnnnnnnnnnnnnnnnnnnnnnnnnnnnnnnnnnnnnnnnnnnnnnnnnnnnnnnnnnnnnnnnnnnnnnnnnnnnnnnnnnnnnnnnnnnnnnnnnnnnnnnnnnnnnnnnnnnnnnnnnnnnnnnnnnnnnnnnnnnnnnnnnnnnnnnnnnnnnnnnnnnnnnnnnnnnnnnnnnnnnnnnnnnnnnnnnnnnnnnnnnnnnnnnnnnnnnnnnnnnnnnnnnnnnnnnnnnnnnnnnnnnnnnnnnnnnnnnnnnnnnnnnnnnnnnnnnnnnnnnnnnnnnnnnnnnnnnnnnnnnnnnnnnnnnnnnnnnnnnnnnnnnnnnnnnnnnnnnnnnnnnnnnnnnnnnnnnnnnnnnnnnnnnnnnnnnnnnnnnnnnnnnnnnnnnnnnnnnnnnnnnnnnnnnnnnnnnnnnnnnnnnnnnnnnnnnnnnnnnnnnnnnnnnnnnnnnnnnnnnnnnnnnnnnnnnnnnnnnnnnnnnnnnnnnnnnnnnnnnnnnnnnnnnnnnnnnnnnnnnnnnnnnnnnnnnnnnnnnnnnnnnnnnnnnnnnnnnnnnnnnnnnnnnnnnnnnnnnnnnnnnnnnnnnnnnnnnnnnnnnnnnnnnnnnnnnnnnnnnnnnnnnnnnnnnnnnnnnnnnnnnnnnnnnnnnnnnnnnnnnnnnnnnnnnnnnnnnnnnnnnnnnnnnnnnnnnnnnnnnnnnnnnnnnnnnnnnnnnnnnnnnnnnnnnnnnnnnnnnnnnnnnnnnnnnnnnnnnnnnnnnnnnnnnnnnnnnnnnnnnnnnnnnnnnnnnnnnnnnnnnnnnnnnnnnnnnnnnnnnnnnnnnnnnnnnnnnnnnnnnnnnnnnnnnnnnnnnnnnnnnnnnnnnnnnnnnnnnnnnnnnnnnnnnnnnnnnnnnnnnnnnnnnnnnnnnnnnnnnnnnnnnnnnnnnnnnnnnnnnnnnnnnnnnnnnnnnnnnnnnnnnnnnnnnnnnnnnnnnnnnnnnnnnnnnnnnnnnnnnnnnnnnnnnnnnnnnnnnnnnnnnnnnnnnnnnnnnnnnnnnnnnnnnnnnnnnnnnnnnnnnnnnnnnnnnnnnnnnnnnnnnnnnnnnnnnnnnnnnnnnnnnnnnnnnnnnnnnnnnnnnnnnnnnnnnnnnnnnnnnnnnnnnnnnnnnnnnnnnnnnnnnnnnnnnnnnnnnnnnnnnnnnnnnnnnnnnnnnnnnnnnnnnnnnnnnnnnnnnnnnnnnnnnnnnnnnnnnnnnnnnnnnnnnnnnnnnnnnnnnnnnnnnnnnnnnnnnnnnnnnnnnnnnnnnnnnnnnnnnnnnnnnnnnnnnnnnnnnnnnnnnnnnnnnnnnnnnnnnnnnnnnnnnnnnnnnnnnnnnnnnnnnnnnnnnnnnnnnnnnnnnnnnnnnnnnnnnnnnnnnnnnnnnnnnnnnnnnnnnnnnnnnnnnnnnnnnnnnnnnnnnnnnnnnnnnnnnnnnnnnnnnnnnnnnnnnnnnnnnnnnnnnnnnnnnnnnnnnnnnnnnnnnnnnnnnnnnnnnnnnnnnnnnnnnnnnnnnnnnnnnnnnnnnnnnnnnnnnnnnnnnnnnnnnnnnnnnnnnnnnnnnnnnnnnnnnnnnnnnnnnnnnnnnnnnnnnnnnnnnnnnnnnnnnnnnnnnnnnnnnnnnnnnnnnnnnnnnnnnnnnnnnnnnnnnnnnnnnnnnnnnnnnnnnnnnnnnnnnnnnnnnnnnnnnnnnnnnnnnnnnnnnnnnnnnnnnnnnnnnnnnnnnnnnnnnnnnnnnnnnnnnnnnnnnnnnnnnnnnnnnnnnnnnnnnnnnnnnnnnnnnnnnnnnnnnnnnnnnnnnnnnnnnnnnnnnnnnnnnnnnnnnnnnnnnnnnnnnnnnnnnnnnnnnnnnnnnnnnnnnnnnnnnnnnnnnnnnnnnnnnnnnnnnnnnnnnnnnnnnnnnnnnnnnnnnnnnnnnnnnnnnnnnnnnnnnnnnnnnnnnnnnnnnnnnnnnnnnnnnnnnnnnnnnnnnnnnnnnnnnnnnnnnnnnnnnnnnnnnnnnnnnnnnnnnnnnnnnnnnnnnnnnnnnnnnnnnnnnnnnnnnnnnnnnnnnnnnnnnnnnnnnnnnnnnnnnnnnnnnnnnnnnnnnnnnnnnnnnnnnnnnnnnnnnnnnnnnnnnnnnnnnnnnnnnnnnnnnnnnnnnnnnnnnnnnnnnnnnnnnnnnnnnnnnnnnnnnnnnnnnnnnnnnnnnnnnnnnnnnnnnnnnnnnnnnnnnnnnnnnnnnnnnnnnnnnnnnnnnnnnnnnnnnnnnnnnnnnnnnnnnnnnnnnnnnnnnnnnnnnnnnnnnnnnnnnnnnnnnnnnnnnnnnnnnnnnnnnnnnnnnnnnnnnnnnnnnnnnnnnnnnnnnnnnnnnnnnnnnnnnnnnnnnnnnnnnnnnnnnnnnnnnnnnnnnnnnnnnnnnnnnnnnnnnnnnnnnnnnnnnnnnnnnnnnnnnnnnnnnnnnnnnnnnnnnnnnnnnnnnnnnnnnnnnnnnnnnnnnnnnnnnnnnnnnnnnnnnnnnnnnnnnnnnnnnnnnnnnnnnnnnnnnnnnnnnnnnnnnnnnnnnnnnnnnnnnnnnnnnnnnnnnnnnnnnnnnnnnnnnnnnnnnnnnnnnnnnnnnnnnnnnnnnnnnnnnnnnnnnnnnnnnnnnnnnnnnnnnnnnnnnnnnnnnnnnnnnnnnnnnnnnnnnnnnnnnnnnnnnnnnnnnnnnnnnnnnnnnnnnnnnnnnnnnnnnnnnnnnnnnnnnnnnnnnnnnnnnnnnnnnnnnnnnnnnnnnnnnnnnnnnnnnnnnnnnnnnnnnnnnnnnnnnnnnnnnnnnnnnnnnnnnnnnnnnnnnnnnnnnnnnnnnnnnnnnnnnnnnnnnnnnnnnnnnnnnnnnnnnnnnnnnnnnnnnnnnnnnnnnnnnnnnnnnnnnnnnnnnnnnnnnnnnnnnnnnnnnnnnnnnnnnnnnnnnnnnnnnnnnnnnnnnnnnnnnnnnnnnnnnnnnnnnnnnnnnnnnnnnnnnnnnnnnnnnnnnnnnnnnnnnnnnnnnnnnnnnnnnnnnnnnnnnnnnnnnnnnnnnnnnnnnnnnnnnnnnnnnnnnnnnnnnnnnnnnnnnnnnnnnnnnnnnnnnnnnnnnnnnnnnnnnnnnnnnnnnnnnnnnnnnnnnnnnnnnnnnnnnnnnnnnnnnnnnnnnnnnnnnnnnnnnnnnnnnnnnnnnnnnnnnnnnnnnnnnnnnnnnnnnnnnnnnnnnnnnnnnnnnnnnnnnnnnnnnnnnnnnnnnnnnnnnnnnnnnnnnnnnnnnnnnnnnnnnnnnnnnnnnnnnnnnnnnnnnnnnnnnnnnnnnnnnnnnnnnnnnnnnnnnnnnnnnnnnnnnnnnnnnnnnnnnnnnnnnnnnnnnnnnnnnnnnnnnnnnnnnnnnnnnnnnnnnnnnnnnnnnnnnnnnnnnnnnnnnnnnnnnnnnnnnnnnnnnnnnnnnnnnnnnnnnnnnnnnnnnnnnnnnnnnnnnnnnnnnnnnnnnnnnnnnnnnnnnnnnnnnnnnnnnnnnnnnnnnnnnnnnnnnnnnnnnnnnnnnnnnnnnnnnnnnnnnnnnnnnnnnnnnnnnnnnnnnnnnnnnnnnnnnnnnnnnnnnnnnnnnnnnnnnnnnnnnnnnnnnnnnnnnnnnnnnnnnnnnnnnnnnnnnnnnnnnnnnnnnnnnnnnnnnnnnnnnnnnnnnnnnnnnnnnnnnnnnnnnnnnnnnnnnnnnnnnnnnnnnnnnnnnnnnnnnnnnnnnnnnnnnnnnnnnnnnnnnnnnnnnnnnnnnnnnnnnnnnnnnnnnnnnnnnnnnnnnnnnnnnnnnnnnnnnnnnnnnnnnnnnnnnnnnnnnnnnnnnnnnnnnnnnnnnnnnnnnnnnnnnnnnnnnnnnnnnnnnnnnnnnnnnnnnnnnnnnnnnnnnnnnnnnnnnnnnnnnnnnnnnnnnnnnnnnnnnnnnnnnnnnnnnnnnnnnnnnnnnnnnnnnnnnnnnnnnnnnnnnnnnnnnnnnnnnnnnnnnnnnnnnnnnnnnnnnnnnnnnnnnnnnnnnnnnnnnnnnnnnnnnnnnnnnnnnnnnnnnnnnnnnnnnnnnnnnnnnnnnnnnnnnnnnnnnnnnnnnnnnnnnnnnnnnnnnnnnnnnnnnnnnnnnnnnnnnnnnnnnnnnnnnnnnnnnnnnnnnnnnnnnnnnnnnnnnnnnnnnnnnnnnnnnnnnnnnnnnnnnnnnnnnnnnnnnnnnnnnnnnnnnnnnnnnnnnnnnnnnnnnnnnnnnnnnnnnnnnnnnnnnnnnnnnnnnnnnnnnnnnnnnnnnnnnnnnnnnnnnnnnnnnnnnnnnnnnnnnnnnnnnnnnnnnnnnnnnnnnnnnnnnnnnnnnnnnnnnnnnnnnnnnnnnnnnnnnnnnnnnnnnnnnnnnnnnnnnnnnnnnnnnnnnnnnnnnnnnnnnnnnnnnnnnnnnnnnnnnnnnnnnnnnnnnnnnnnnnnnnnnnnnnnnnnnnnnnnnnnnnnnnnnnnnnnnnnnnnnnnnnnnnnnnnnnnnnnnnnnnnnnnnnnnnnnnnnnnnnnnnnnnnnnnnnnnnnnnnnnnnnnnnnnnnnnnnnnnnnnnnnnnnnnnnnnnnnnnnnnnnnnnnnnnnnnnnnnnnnnnnnnnnnnnnnnnnnnnnnnnnnnnnnnnnnnnnnnnnnnnnnnnnnnnnnnnnnnnnnnnnnnnnnnnnnnnnnnnnnnnnnnnnnnnnnnnnnnnnnnnnnnnnnnnnnnnnnnnnnnnnnnnnnnnnnnnnnnnnnnnnnnnnnnnnnnnnnnnnnnnnnnnnnnnnnnnnnnnnnnnnnnnnnnnnnnnnnnnnnnnnnnnnnnnnnnnnnnnnnnnnnnnnnnnnnnnnnnnnnnnnnnnnnnnnnnnnnnnnnnnnnnnnnnnnnnnnnnnnnnnnnnnnnnnnnnnnnnnnnnnnnnnnnnnnnnnnnnnnnnnnnnnnnnnnnnnnnnnnnnnnnnnnnnnnnnnnnnnnnnnnnnnnnnnnnnnnnnnnnnnnnnnnnnnnnnnnnnnnnnnnnnnnnnnnnnnnnnnnnnnnnnnnnnnnnnnnnnnnnnnnnnnnnnnnnnnnnnnnnnnnnnnnnnnnnnnnnnnnnnnnnnnnnnnnnnnnnnnnnnnnnnnnnnnnnnnnnnnnnnnnnnnnnnnnnnnnnnnnnnnnnnnnnnnnnnnnnnnnnnnnnnnnnnnnnnnnnnnnnnnnnnnnnnnnnnnnnnnnnnnnnnnnnnnnnnnnnnnnnnnnnnnnnnnnnnnnnnnnnnnnnnnnnnnnnnnnnnnnnnnnnnnnnnnnnnnnnnnnnnnnnnnnnnnnnnnnnnnnnnnnnnnnnnnnnnnnnnnnnnnnnnnnnnnnnnnnnnnnnnnnnnnnnnnnnnnnnnnnnnnnnnnnnnnnnnnnnnnnnnnnnnnnnnnnnnnnnnnnnnnnnnnnnnnnnnnnnnnnnnnnnnnnnnnnnnnnnnnnnnnnnnnnnnnnnnnnnnnnnnnnnnnnnnnnnnnnnnnnnnnnnnnnnnnnnnnnnnnnnnnnnnnnnnnnnnnnnnnnnnnnnnnnnnnnnnnnnnnnnnnnnnnnnnnnnnnnnnnnnnnnnnnnnnnnnnnnnnnnnnnnnnnnnnnnnnnnnnnnnnnnnnnnnnnnnnnnnnnnnnnnnnnnnnnnnnnnnnnnnnnnnnnnnnnnnnnnnnnnnnnnnnnnnnnnnnnnnnnnnnnnnnnnnnnnnnnnnnnnnnnnnnnnnnnnnnnnnnnnnnnnnnnnnnnnnnnnnnnnnnnnnnnnnnnnnnnnnnnnnnnnnnnnnnnnnnnnnnnnnnnnnnnnnnnnnnnnnnnnnnnnnnnnnnnnnnnnnnnnnnnnnnnnnnnnnnnnnnnnnnnnnnnnnnnnnnnnnnnnnnnnnnnnnnnnnnnnnnnnnnnnnnnnnnnnnnnnnnnnnnnnnnnnnnnnnnnnnnnnnnnnnnnnnnnnnnnnnnnnnnnnnnnnnnnnnnnnnnnnnnnnnnnnnnnnnnnnnnnnnnnnnnnnnnnnnnnnnnnnnnnnnnnnnnnnnnnnnnnnnnnnnnnnnnnnnnnnnnnnnnnnnnnnnnnnnnnnnnnnnnnnnnnnnnnnnnnnnnnnnnnnnnnnnnnnnnnnnnnnnnnnnnnnnnnnnnnnnnnnnnnnnnnnnnnnnnnnnnnnnnnnnnnnnnnnnnnnnnnnnnnnnnnnnnnnnnnnnnnnnnnnnnnnnnnnnnnnnnnnnnnnnnnnnnnnnnnnnnnnnnnnnnnnnnnnnnnnnnnnnnnnnnnnnnnnnnnnnnnnnnnnnnnnnnnnnnnnnnnnnnnnnnnnnnnnnnnnnnnnnnnnnnnnnnnnnnnnnnnnnnnnnnnnnnnnnnnnnnnnnnnnnnnnnnnnnnnnnnnnnnnnnnnnnnnnnnnnnnnnnnnnnnnnnnnnnnnnnnnnnnnnnnnnnnnnnnnnnnnnnnnnnnnnnnnnnnnnnnnnnnnnnnnnnnnnnnnnnnnnnnnnnnnnnnnnnnnnnnnnnnnnnnnnnnnnnnnnnnnnnnnnnnnnnnnnnnnnnnnnnnnnnnnnnnnnnnnnnnnnnnnnnnnnnnnnnnnnnnnnnnnnnnnnnnnnnnnnnnnnnnnnnnnnnnnnnnnnnnnnnnnnnnnnnnnnnnnnnnnnnnnnnnnnnnnnnnnnnnnnnnnnnnnnnnnnnnnnnnnnnnnnnnnnnnnnnnnnnnnnnnnnnnnnnnnnnnnnnnnnnnnnnnnnnnnnnnnnnnnnnnnnnnnnnnnnnnnnnnnnnnnnnnnnnnnnnnnnnnnnnnnnnnnnnnnnnnnnnnnnnnnnnnnnnnnnnnnnnnnnnnnnnnnnnnnnnnnnnnnnnnnnnnnnnnnnnnnnnnnnnnnnnnnnnnnnnnnnnnnnnnnnnnnnnnnnnnnnnnnnnnnnnnnnnnnnnnnnnnnnnnnnnnnnnnnnnnnnnnnnnnnnnnnnnnnnnnnnnnnnnnnnnnnnnnnnnnnnnnnnnnnnnnnnnnnnnnnnnnnnnnnnnnnnnnnnnnnnnnnnnnnnnnnnnnnaagacgcctacctgttggcattgggccaagacctgagacctcatgaagatgatgaacccgaggccatcaagctgaaagagcaaatggtgtttcgccaacaaaaccctttgctcgacatctctggcacatggaaagtagccagccgtttgtttgtctcgcacctcgtgcccagtgtcaatgtgcaacccgacaaagtcagccacatacgccgcgacctcgacaccaaccccgacatgatgaccttgttggacgatgaagagcaagaccgcttgtacgaacgccaaggtaagcagggcttggcctccaaagtagaaagtttgatcaaactcgccaaccgcgagttggctgcggcacgcaaagccaaagatgccaccaaattggaggaactcaccaccaaactggaagaactcaaagcgctgaagcaaacccaaaaaggcgacgacaactccgacaacaccaaacatttgcttgaactgcaaaccatcccttcaggcatcaccctgagcggcaaactcaccgtgcaacacgcctcagcgtatgacctgcaaaccttggtcaaggcctttcatggtttcagccgacaaccctatttgggcgcacaacgcgcccgtggttgtggcgaggtggcgggtcaagtccgcttcaaaaccaccgaggggcttgtgctgggcgtgctgaattttggccatcaccaagacgccacggtgcaatggaccgaagccggccatgccttcacgcaagctgcccccacagcacatgccgcatgagctttcgaagccccgagcagcagcactatgccgatctgatcaatgccgttttacagcccggtccgccgctgctggcaggtgccgcgccaggcttgggcaaaacccatggctacagcatccccttggtgagttcgggattgcgggttgccattgccatgagcacccgccagctgatcgaccaataccttggcagcgctgcactgcaagccgccgtgcaaggcaaacccatcagcgtggtggctttgcaaacccgccacagttttgacaacccccaggcctaccaagcccaccgcgaacaagccttggcagcgcaggtgctggtgctcacccatgccgccgcgctcgtcgacagcttgcaacccggctatgcgcaactccgtgagcgcgatgtggtgttgtttgacgaggccgacttgctggctgacgcagcagaattgcgcagcacgtttcgtttagggtcaggcattctgcaaggctgcggcgctgcgggcttgtcgccccaagcggcggctaccctagcgctgcaggctccaaacttggaagaccgctgtgcagcccgtgccatcttgtcggccttggagcgaccggctttttacaaggtggtgggctttgaagacgatggcgctttggtgctcaagcaccgcatgcctgggcgcatgctcaagcccttggtgcacgcggccaagcgttgcatcttcaccagcggtaccttgcaagtgcagggccgttttgatcatttcacccgcgccttgggtttgacgcacatagcccccgaaagccgccacatcgacccatcacaccacggcaaactgaaaatacatctggcacccgacaccttggacactgcggccatggcccaatccatcgccaaggctttgcgccccgccctggtgttgaccaacagccacgacatgagccaacaactggcgcaacacctccccgaagcggttgtgcgcggcccccaagaacctttggcagatgcggtgcaacgctgccccgacgatggactgctgatcgctgcgggcgcttggtcgggcttggacgcaccacgcctgctttggcaaactgtggtcatcccgcaaaccccctatggcccaccggtgcaagtggatggtcaacagctcaccagttacttggacagtaccgtggtggcattgcgacgcacccaccaaggtttgcaccgaggtttgcgcacccccgacgccgtttgcaccttgctgctgctggacccgcgcagtgcccgccccgctttgcgcgaggccatcccccagcgttttcagcccgactgggccatgtttgaagaagggggcgcggtgctgcaaatccatctcaagcgcgaacgccatgcgcaactgcgcaaagccgctttgaagcaccacggcatgcgctgcatgcaccccgcttgtgaggtcaacgccgaacatcaactggatgtacaccacacccgccccatcagccaaggcgagcgccgcaccaccttggacgaggtggtggtgctgtgcaaaaaccaccatgcccaggcccatttcgatctgaaaatggccgcatttttaaaggctgaaagtgcggaaaatcaaatcacagccatgctttagggcccgtcagctccagccgccttgtatttgtgcggttactagaaccctgtgatgttgctgaacggtgcggcgttggctccagccgccttgtatttgtgcggtttctagaacgtcgccgccgtggttgaccacgttccataggctccagccgccttgtatttgtgcggttactagaactaaaaatttcaacaaaaaatggcagcgcaagctccagccgccttgtatttgtgcggttactagaactgattggcagtgtcttccattacgaaacctgctccagccgccttgtatttgtgcggttgctttgatgaggattgccaagctttagcttgcaaagacatccaatgcaaattgattcatattatttgttaataaaaattatttagattctttctatgtatgctttgtagctgcttgatcaaccgcttgtgaaagcctgggcagtggtctcttgccaaaaagaaacgcctccacaagggaggcgtcggtccggagatgcgatctccgggggggttaacaggtcaaattttataaggaaaacctaacaaatggtcaacgtcaacatccgaattaacccgtaaatcaaagcaattgttaaccctatgcaacgagttgtggtctatgtagacggctttaacctttactttggcatgaaaagtaaaggctggcgaaaactgtattggctcaatttggttaccttggcgaatgccttgctcaagccagatcaacttttggaaaaggttcactacttcacgtcccgcatccgcaacacgagcagcaacaaagccgatacgcaacgacaaaaaacctaccttgaaggattgggactcctcccagaactggatatccattttggacattttttggaaaagcctcggcaatgccaaacctgtggtgcccaatggctgagttatgaagaaaaaatgaccgatgtcaacattgcggttcaaatgctgacagatgcctatgaagaccttttcgataccgccatcttgatctcaggtgacagcgacctcaccacacctgtcaccatgctgcgacagcaatttccttcaaagcgcttgatcgttgcttttccacctgggcgcaaatccaacgagtt

SEQ ID NO: 174 - DNA, 12638 bp, Artificial Sequence
  Synthetic Oligonucleotide
  misc_feature (1)..(5011): n is a, c, g, or t
nnnnnnnnnnnnnnnnnnnnnnnnnnnnnnnnnnnnnnnnnnnnnnnnnnnnnnnnnnnnnnnnnnnnnnnnnnnnnnnnnnnnnnnnnnnnnnnnnnnnnnnnnnnnnnnnnnnnnnnnnnnnnnnnnnnnnnnnnnnnnnnnnnnnnnnnnnnnnnnnnnnnnnnnnnnnnnnnnnnnnnnnnnnnnnnnnnnnnnnnnnnnnnnnnnnnnnnnnnnnnnnnnnnnnnnnnnnnnnnnnnnnnnnnnnnnnnnnnnnnnnnnnnnnnnnnnnnnnnnnnnnnnnnnnnnnnnnnnnnnnnnnnnnnnnnnnnnnnnnnnnnnnnnnnnnnnnnnnnnnnnnnnnnnnnnnnnnnnnnnnnnnnnnnnnnnnnnnnnnnnnnnnnnnnnnnnnnnnnnnnnnnnnnnnnnnnnnnnnnnnnnnnnnnnnnnnnnnnnnnnnnnnnnnnnnnnnnnnnnnnnnnnnnnnnnnnnnnnnnnnnnnnnnnnnnnnnnnnnnnnnnnnnnnnnnnnnnnnnnnnnnnnnnnnnnnnnnnnnnnnnnnnnnnnnnnnnnnnnnnnnnnnnnnnnnnnnnnnnnnnnnnnnnnnnnnnnnnnnnnnnnnnnnnnnnnnnnnnnnnnnnnnnnnnnnnnnnnnnnnnnnnnnnnnnnnnnnnnnnnnnnnnnnnnnnnnnnnnnnnnnnnnnnnnnnnnnnnnnnnnnnnnnnnnnnnnnnnnnnnnnnnnnnnnnnnnnnnnnnnnnnnnnnnnnnnnnnnnnnnnnnnnnnnnnnnnnnnnnnnnnnnnnnnnnnnnnnnnnnnnnnnnnnnnnnnnnnnnnnnnnnnnnnnnnnnnnnnnnnnnnnnnnnnnnnnnnnnnnnnnnnnnnnnnnnnnnnnnnnnnnnnnnnnnnnnnnnnnnnnnnnnnnnnnnnnnnnnnnnnnnnnnnnnnnnnnnnnnnnnnnnnnnnnnnnnnnnnnnnnnnnnnnnnnnnnnnnnnnnnnnnnnnnnnnnnnnnnnnnnnnnnnnnnnnnnnnnnnnnnnnnnnnnnnnnnnnnnnnnnnnnnnnnnnnnnnnnnnnnnnnnnnnnnnnnnnnnnnnnnnnnnnnnnnnnnnnnnnnnnnnnnnnnnnnnnnnnnnnnnnnnnnnnnnnnnnnnnnnnnnnnnnnnnnnnnnnnnnnnnnnnnnnnnnnnnnnnnnnnnnnnnnnnnnnnnnnnnnnnnnnnnnnnnnnnnnnnnnnnnnnnnnnnnnnnnnnnnnnnnnnnnnnnnnnnnnnnnnnnnnnnnnnnnnnnnnnnnnnnnnnnnnnnnnnnnnnnnnnnnnnnnnnnnnnnnnnnnnnnnnnnnnnnnnnnnnnnnnnnnnnnnnnnnnnnnnnnnnnnnnnnnnnnnnnnnnnnnnnnnnnnnnnnnnnnnnnnnnnnnnnnnnnnnnnnnnnnnnnnnnnnnnnnnnnnnnnnnnnnnnnnnnnnnnnnnnnnnnnnnnnnnnnnnnnnnnnnnnnnnnnnnnnnnnnnnnnnnnnnnnnnnnnnnnnnnnnnnnnnnnnnnnnnnnnnnnnnnnnnnnnnnnnnnnnnnnnnnnnnnnnnnnnnnnnnnnnnnnnnnnnnnnnnnnnnnnnnnnnnnnnnnnnnnnnnnnnnnnnnnnnnnnnnnnnnnnnnnnnnnnnnnnnnnnnnnnnnnnnnnnnnnnnnnnnnnnnnnnnnnnnnnnnnnnnnnnnnnnnnnnnnnnnnnnnnnnnnnnnnnnnnnnnnnnnnnnnnnnnnnnnnnnnnnnnnnnnnnnnnnnnnnnnnnnnnnnnnnnnnnnnnnnnnnnnnnnnnnnnnnnnnnnnnnnnnnnnnnnnnnnnnnnnnnnnnnnnnnnnnnnnnnnnnnnnnnnnnnnnnnnnnnnnnnnnnnnnnnnnnnnnnnnnnnnnnnnnnnnnnnnnnnnnnnnnnnnnnnnnnnnnnnnnnnnnnnnnnnnnnnnnnnnnnnnnnnnnnnnnnnnnnnnnnnnnnnnnnnnnnnnnnnnnnnnnnnnnnnnnnnnnnnnnnnnnnnnnnnnnnnnnnnnnnnnnnnnnnnnnnnnnnnnnnnnnnnnnnnnnnnnnnnnnnnnnnnnnnnnnnnnnnnnnnnnnnnnnnnnnnnnnnnnnnnnnnnnnnnnnnnnnnnnnnnnnnnnnnnnnnnnnnnnnnnnnnnnnnnnnnnnnnnnnnnnnnnnnnnnnnnnnnnnnnnnnnnnnnnnnnnnnnnnnnnnnnnnnnnnnnnnnnnnnnnnnnnnnnnnnnnnnnnnnnnnnnnnnnnnnnnnnnnnnnnnnnnnnnnnnnnnnnnnnnnnnnnnnnnnnnnnnnnnnnnnnnnnnnnnnnnnnnnnnnnnnnnnnnnnnnnnnnnnnnnnnnnnnnnnnnnnnnnnnnnnnnnnnnnnnnnnnnnnnnnnnnnnnnnnnnnnnnnnnnnnnnnnnnnnnnnnnnnnnnnnnnnnnnnnnnnnnnnnnnnnnnnnnnnnnnnnnnnnnnnnnnnnnnnnnnnnnnnnnnnnnnnnnnnnnnnnnnnnnnnnnnnnnnnnnnnnnnnnnnnnnnnnnnnnnnnnnnnnnnnnnnnnnnnnnnnnnnnnnnnnnnnnnnnnnnnnnnnnnnnnnnnnnnnnnnnnnnnnnnnnnnnnnnnnnnnnnnnnnnnnnnnnnnnnnnnnnnnnnnnnnnnnnnnnnnnnnnnnnnnnnnnnnnnnnnnnnnnnnnnnnnnnnnnnnnnnnnnnnnnnnnnnnnnnnnnnnnnnnnnnnnnnnnnnnnnnnnnnnnnnnnnnnnnnnnnnnnnnnnnnnnnnnnnnnnnnnnnnnnnnnnnnnnnnnnnnnnnnnnnnnnnnnnnnnnnnnnnnnnnnnnnnnnnnnnnnnnnnnnnnnnnnnnnnnnnnnnnnnnnnnnnnnnnnnnnnnnnnnnnnnnnnnnnnnnnnnnnnnnnnnnnnnnnnnnnnnnnnnnnnnnnnnnnnnnnnnnnnnnnnnnnnnnnnnnnnnnnnnnnnnnnnnnnnnnnnnnnnnnnnnnnnnnnnnnnnnnnnnnnnnnnnnnnnnnnnnnnnnnnnnnnnnnnnnnnnnnnnnnnnnnnnnnnnnnnnnnnnnnnnnnnnnnnnnnnnnnnnnnnnnnnnnnnnnnnnnnnnnnnnnnnnnnnnnnnnnnnnnnnnnnnnnnnnnnnnnnnnnnnnnnnnnnnnnnnnnnnnnnnnnnnnnnnnnnnnnnnnnnnnnnnnnnnnnnnnnnnnnnnnnnnnnnnnnnnnnnnnnnnnnnnnnnnnnnnnnnnnnnnnnnnnnnnnnnnnnnnnnnnnnnnnnnnnnnnnnnnnnnnnnnnnnnnnnnnnnnnnnnnnnnnnnnnnnnnnnnnnnnnnnnnnnnnnnnnnnnnnnnnnnnnnnnnnnnnnnnnnnnnnnnnnnnnnnnnnnnnnnnnnnnnnnnnnnnnnnnnnnnnnnnnnnnnnnnnnnnnnnnnnnnnnnnnnnnnnnnnnnnnnnnnnnnnnnnnnnnnnnnnnnnnnnnnnnnnnnnnnnnnnnnnnnnnnnnnnnnnnnnnnnnnnnnnnnnnnnnnnnnnnnnnnnnnnnnnnnnnnnnnnnnnnnnnnnnnnnnnnnnnnnnnnnnnnnnnnnnnnnnnnnnnnnnnnnnnnnnnnnnnnnnnnnnnnnnnnnnnnnnnnnnnnnnnnnnnnnnnnnnnnnnnnnnnnnnnnnnnnnnnnnnnnnnnnnnnnnnnnnnnnnnnnnnnnnnnnnnnnnnnnnnnnnnnnnnnnnnnnnnnnnnnnnnnnnnnnnnnnnnnnnnnnnnnnnnnnnnnnnnnnnnnnnnnnnnnnnnnnnnnnnnnnnnnnnnnnnnnnnnnnnnnnnnnnnnnnnnnnnnnnnnnnnnnnnnnnnnnnnnnnnnnnnnnnnnnnnnnnnnnnnnnnnnnnnnnnnnnnnnnnnnnnnnnnnnnnnnnnnnnnnnnnnnnnnnnnnnnnnnnnnnnnnnnnnnnnnnnnnnnnnnnnnnnnnnnnnnnnnnnnnnnnnnnnnnnnnnnnnnnnnnnnnnnnnnnnnnnnnnnnnnnnnnnnnnnnnnnnnnnnnnnnnnnnnnnnnnnnnnnnnnnnnnnnnnnnnnnnnnnnnnnnnnnnnnnnnnnnnnnnnnnnnnnnnnnnnnnnnnnnnnnnnnnnnnnnnnnnnnnnnnnnnnnnnnnnnnnnnnnnnnnnnnnnnnnnnnnnnnnnnnnnnnnnnnnnnnnnnnnnnnnnnnnnnnnnnnnnnnnnnnnnnnnnnnnnnnnnnnnnnnnnnnnnnnnnnnnnnnnnnnnnnnnnnnnnnnnnnnnnnnnnnnnnnnnnnnnnnnnnnnnnnnnnnnnnnnnnnnnnnnnnnnnnnnnnnnnnnnnnnnnnnnnnnnnnnnnnnnnnnnnnnnnnnnnnnnnnnnnnnnnnnnnnnnnnnnnnnnnnnnnnnnnnnnnnnnnnnnnnnnnnnnnnnnnnnnnnnnnnnnnnnnnnnnnnnnnnnnnnnnnnnnnnnnnnnnnnnnnnnnnnnnnnnnnnnnnnnnnnnnnnnnnnnnnnnnnnnnnnnnnnnnnnnnnnnnnnnnnnnnnnnnnnnnnnnnnnnnnnnnnnnnnnnnnnnnnnnnnnnnnnnnnnnnnnnnnnnnnnnnnnnnnnnnnnnnnnnnnnnnnnnnnnnnnnnnnnnnnnnnnnnnnnnnnnnnnnnnnnnnnnnnnnnnnnnnnnnnnnnnnnnnnnnnnnnnnnnnnnnnnnnnnnnnnnnnnnnnnnnnnnnnnnnnnnnnnnnnnnnnnnnnnnnnnnnnnnnnnnnnnnnnnnnnnnnnnnnnnnnnnnnnnnnnnnnnnnnnnnnnnnnnnnnnnnnnnnnnnnnnnnnnnnnnnnnnnnnnnnnnnnnnnnnnnnnnnnnnnnnnnnnnnnnnnnnnnnnnnnnnnnnnnnnnnnnnnnnnnnnnnnnnnnnnnnnnnnnnnnnnnnnnnnnnnnnnnnnnnnnnnnnnnnnnnnnnnnnnnnnnnnnnnnnnnnnnnnnnnnnnnnnnnnnnnnnnnnnnnnnnnnnnnnnnnnnnnnnnnnnnccgtgcaacccgtggcgcgcaacaagcatttcatggtggtgaaggtgctggaacccgaacccccggccaccgccctggaatgggtggagctggaagcggtgtattcgggcacggtcacgcgcatcgcttggcgcgaactgcgcgacaccgggcgctggcggcagggctgggtgtagccaccccggagagcccccaaccgcatccgttacgatttccccagcgccacacggcgctacagggaggaaatcaaccgatggaccgattcaaagtcacggcgacgctgggcagccccctcgtcgtcaatgggggctacatgacccttgatgccctgctcgcggcgctcatctatgagcacacgggcgatctggagcgggctcatgccgacattccgctgcacaacaccgaaggcctctggcacggcagcgcggccatctatgaaaagtgggacgaacaacgggtgggtttcgtcgccaacttacaggcccgacacgatctggatctcgacctcattgcccagaacaagcagggcaagacccacaccatgatcggcatgacgcgccgccgcgagttcggcgcggtcatgaacagctaccggacggtcaccacccccaccgtcacctggtatgcccaaggcgatgccgacgccgtgcgccgcctgctcgccaatgtgtccttcatcggcaagcggcgcgccagcggctttggtcaggtctcgggtttcaccatcgaacccgacgaactcgacggggttaccggcttctttggtgaacccttgcgccccgtgcccatcgacctgttcaccggcaacggcagcaccgcgctgaaggccgacgcagcctggcgtcccgcctattggcaccccaccaaccgcgccatttgctgcgtacctgaggcgatggcatgaacaccttcgaattctttaacgaacacttcggtcgccacctcgtgcggcttgacggcgctccccacgaagccgcctaccgagccctcagcagcaaccaccggctctccaaaggcaccgaaagccgcctgtcttccggctgggccatcgtgcgccccggcacctccagcgtgcagctcaaactcgccgccgcccacctgcactttgacgagcgcacccgcatcgaagccttcatggacgagctggcgcactgggacgaaaaagagccgcgcatctttctcatgttcgacaaagcgcccgtgcccttggcccacctgttcctcacggtggacaagcgcgccgtgcgcatctgttcgcccgctggcgtcgaaacattcaactggcacttggcgcccgcgccagacgccggtggtatccagaaaaccctgtggaaaaggaggcaccccgcatgatggaccacaccatccccaagcccgcgcaaaccgcaggctacccgctgcaccggctggtggccgagctgctggacggcgcgcccgcgctctttgccgaccaaggcgaccgcctgatcgtgcgcaccgaaaagcacatcaccgcgcaggggcggcgcgtgcagccgcccgccctgggcgacgtgatcgccttcgagctcaaggcctgcgcggcccagcgccacggcgggcgcaacatctaccccgagcgcggcgactggcgcacccgccgcgcctggctcgaagccgaaggcgtcaaacatggctttgaggtcatggccgtccacatcaccggcgaccgcctgcaagtcagcgccagcggtggacgccgtttctggatcgacgccagccagttcaccggcgtgctcaaagtcaccgaagccacccgcttcgcccaggcactgtccaccggcattggccgcgtgggcaaagccttcggcatgggcctgctgatcatctgaaccgctgtcacacccgcaccaccccattcaaggagcccccatgaacaccccaaacacccgcatcgtcatcaacgccaccatcaccaccgttggcccgctctccatccgcatgcccaaacccgaaggcgggcgcgaaaacgaatgggacaacttccccgtcatgacccgtggggtggacgaggccggcaaccgccagcaaaccggctacctgcccgccaccaccgtgcgcggtttcttgcgccgtgccgtcaccctgcgcaacatgcgcagcgccgccgaagccggcaagccctacaagctgccgcagatttacagcgaaatgatcggccaggacgccgagagcgaaaaacaggccggtgatattgatctgctcgcgctgcgccaggcgcgcgaagccagccccgtgctcgacctgtttggcagtggcttgggcatcaaatcgcggctgaaggtgagccactttctgcccgctgtcaacgtcctgcccgaagccttcacgggtgtgcgcaaagacctggacgacaccgaagaagcgctggagctgatggaccccgccgacatggccgcctttttgggccgcagcgacagcaacaaccggcgcgccgcctccgccgccgtggtcaaacagttggaaagccaggtcaggaagctggagaaaaaaggcgagcccatccctgaagacgtggccaaggccctgctggctgcccgggccgagaccgaaaagttcaaagacgccatgggcgagatgcaaaacagcacgcgcaccatcgtgcaacaccacgcgctgcccgcaggcctgccgctgagcgggcgcctggtgatcgacaacgcccgcgaccgcgatgtggcgctgctggacgatgccctcaacgcgctcagcctgcgccccctgctcggcgcgcagagcgcgcgcggttgcggggaaattgcgggccagtttcagttctttgacggcgagggccagctgctgaaaaccgtcaccgtgggcgggttccaaccggccagaatggtgaaaatctgaacggtcgtgtctgggttttctgtgtggaatcaagcacttggaagattgcggtgcaagccatcccgaaatggggtggctactagaaccatccaggccgaggcagagcgcgatgaagcgtgcaagccatcccgaaatggggtggctactagaacagcgctggtcaatgggcgaagacacctggtgtgcaagccatcccgaaatggggtggctactagaaccaaaacgcatcatcattcagactacgccatgtgcaagccatcccgaaatggggtggctactagaacatgaggtgccgttatgcgcctgaacagccagtgcaagccatcccgaaatggggtggctactagaaccgtcaatctggctgatgccctccacatagggtgcaagccatcccgaaatggggtggctactagaacatggagggcttcatcaacgaaacgttggggtgcaagccatcccgaaatggggtggctactagaacacgacgacattgagcagcaaattcaagccagtgcaagccatcccgaaatggggtggctactagaactgagccaggcggccattgggcgtgcgcttgtgcaagccatcccgaaatggggtggctactagaactctcgctccgttacttctttgatcctcttggtgcaagccatcccgaaatggggtggctactagaaccatccgtcccggcaggctgcgaaaagtcctgtgcaagccatcccgaaatggggtggctactagaacacccggcccaagcggccactcaacaggacggtgcaagccatcccgaaatggggtggctactagaacaccaccccaccgaaaggaccgacccatgaggtgcaagccatcccgaaatggggtggctactagaacctgtccttcagtacagatcaagtttgtgcggtgcaagccatcccgaaatggggtggctactagaaccttgggcgtggaccagtccaccccgggctcggtgcaagccatcccgaaatggggtggctactagaacggttggtcagtgcgcctgtgcggtggtcttgtgcaagccatcccgaaatggggtggctactagaacagacgaatgccacttgccgcatggtgcgtggtgcaagccatcccgaaatggggtggctactagaaccgccctgataatccgacgcagaagccgccagtgcaagccatcccgaaatggggtggctactagaacacatgaacctggcgggcctgaagtcgagcggtgcaagccatcccgaaatggggtggctactagaacagcgagcgcgcggcatgcaaccggtttgcagtgcaagccatcccgaaatggggtggctactagaaccacccagcctgccaccccatgaaattcttggtgcaagccatcccgaaatggggtggctactagaactaccaacgcgtcaacacaccaaccgattacgtgcaagccatcccgaaatggggtggctactagaacaacgaatttgtgtgcagctcgatagccacagtgcaagccatcccgaaatggggtggctactagaacgcgtagccgtgcaggcgcttccatgctgccgtgcaagccatcccgaaatggggtggctactagaaggtcacgttgtcaatggcgaacgtgagcaccgtgcgagccatcctgaaatggggtggctactagaagacgcccgacttgatcgccatgaacaaggcggtgcaagccatcccgaaatggggtggctactagaagcaggccggtatcgtggtgctcgactggatcgtacaagccatcccgaaatggggtggctactagaagcatataggtatggtatcgctgggctgccccgtgcaagccatcccgaaatggggtggctactagaagtagatgaccttgccgccgcacatcatttctgtgcaagccatcctcaaatggggtggctactagaagaccatcacgtcgtcgtgcaacacgtcgttggtacaagccatccctacatggggtggctactaaaagttcatcgccaaaaagctgaacaccacgcaggtgcaagccatcccgaaacgggttggctactagaaaaaaagtggcgttaagggtaaatcgctgcgggtgcaagccatcctgaaatggaatggctactagaagatggcgccggtgccgtagtacacctggccggtgcaagccatcccgaaatgggatggctattaagcagccacgatctcgatccattggctgcgagccacccgccagcgggtggctgtttgctttcgcgatactcaacaccatgacctcccaagaagcgcccatgttccgctctgtcgcccagaccaacttccacgccctcgtggcgcgccacatggcgcaacccgatgcgcccctgttgctggagggcagcaccggcctgggcaagacgcgcgcgctgctggcggcggtgatgcaggctgcggcacatgggcagcgcatcaccgtggccctgcccagccaccagttgatcgaccaatggctcgcgtccagcgatctcgcggccacgcggcgaccgggtgtggccgtggtggcgtttcggcctgcgcggtggttcgcgcagcgggccgactacgccgcccagcgcggggcggcgatggcggcgccggtgctgctgtgtaccagcgcggcggtgatcatcgaccggcggctggacggcgcctacaacggcgccagcgaacgggactacctgctgtttgacgaggccgaccagttgcccgacgccgccgcgctgcaaagcgaccgcgagatttctgcggccaccctacaggggctgggcgtggcacgcccaaccagcaccccagacgccacacaggcgctggccaccgtgttgcaacacgcgggggccgagcccgaaacccgcgctgcggcgctgctgatgcaagacgccctgaacgaaccggcttggtaccaccgcgtgggctggacggacgagggcggcctgatgctgtaccaccagatgccggggcggctgctccagcgcatcgccaaccggccgggcgtggctttcgtcagcgccacgctcaccgtgggcgggcaaatggacgatttcaagcgggcgctgggcattgcgcagcagagcgcgctgtcgggcgtgatcgagcccgagcaccatggtgcgctggactttgtggtgaccgaggccgaggtggacacgcccgagtggctggcccgcaccgccgccaccattgaagccgcccagttgggcggcccggtgctggtggccacgccaagccacacgctggcgcagcaactgggcgggctgctgccgtgggctacggtgcgccgtgccgacgaaaccacgggcgaagcggcggcgcgcatgggcagcagccgggttctgatcgcggcgggcgcgtgggccggtctggacacccccgtggtgtggaagagcatcgtggtgccacgggtgccgttcgagcgcccggtggtgctggatgggcaggtggagagccggtatgtggacacccgcaacacggcggtgcgccgcatgcgccaggtgatcgggcgcggcctgcgctcgcccgacgcgagctgcaccgtgcacattctggacaaccgctacacgcggatcgaggcttttgtgcccccgcgctttcgcgcgcagtgggcgcagcggcaacgctttgccgaaggcgcacgggccgaagtcacgctgtcgagcattgagcgcgcccccgccgtgcgcaaggcggcgctggctcaccacggcaaacgctgcatgtgttgtggcttcgtgcccaaagtggacagccagctggatgtgcaccacctgaacccgctggggaccggcggcgaaaggctgaccggtctcgacgatgtggctgtgctctgcgccaactgccaccggttggcgcattccgaatcgccgccgctggcgctggccgcgctgcgcacactcgtgctggcttgaaaagcgccgccagcccgccctcaacgccccgccaacaccttcagtaaccagccgttcagatcagaaatttcctgtgggcacaccgagtgctccatcgggtaggtgaaccagtccacggagtagcccagcgcctgcaaggtgtcgcgggcggcttcgccgcgctctaaaaccaccaccgggtcgtgcaggccgtgggccataaaaatgggggtctgctgattggctgggctgcgctcggcggcggtttgctcggccagcggcaaatagcctgagagcgccaccaaacccgccagccgctgcggggcgcgcaaaccggccagcaaggtcatggcgcagccttgcgaaaaacccatgagcacggtgcgctcgggcggcacaccgcgcgccgcttcgcggttcagcaactgctgcacgatgctttgcgaagcccgcaggccggggccgtcttcgcgccgcatgccctgcgcatcgggcggggcaatgtcgtaccaggcgcgcatctcgtacccgccgttgatggtgaccgggcgcaccggggcgctgggaaagatgaagcgcaccgggccgatggcgctcaggtccagctcctgggcaatgggcacgaagtcgctgccatcggcccccaggccgtgcagcaccacgatgctggccacgggctgggccgcggtgtcgccaccggcgacgagttccatgatttcgatggtttgggtgttcatgggtggcagcatagcgggtgctggggtggactctctaacccacagcaggacaaaccctctgccaccgcggcacaggtcttggtagattgcccgcataccaccacccatcaagacacccgt

SEQ ID NO: 175 - DNA, 12590 bp, Artificial Sequence
  Synthetic Oligonucleotide
  misc_feature (1)..(7891): n is a, c, g, or t
nnnnnnnnnnnnnnnnnnnnnnnnnnnnnnnnnnnnnnnnnnnnnnnnnnnnnnnnnnnnnnnnnnnnnnnnnnnnnnnnnnnnnnnnnnnnnnnnnnnnnnnnnnnnnnnnnnnnnnnnnnnnnnnnnnnnnnnnnnnnnnnnnnnnnnnnnnnnnnnnnnnnnnnnnnnnnnnnnnnnnnnnnnnnnnnnnnnnnnnnnnnnnnnnnnnnnnnnnnnnnnnnnnnnnnnnnnnnnnnnnnnnnnnnnnnnnnnnnnnnnnnnnnnnnnnnnnnnnnnnnnnnnnnnnnnnnnnnnnnnnnnnnnnnnnnnnnnnnnnnnnnnnnnnnnnnnnnnnnnnnnnnnnnnnnnnnnnnnnnnnnnnnnnnnnnnnnnnnnnnnnnnnnnnnnnnnnnnnnnnnnnnnnnnnnnnnnnnnnnnnnnnnnnnnnnnnnnnnnnnnnnnnnnnnnnnnnnnnnnnnnnnnnnnnnnnnnnnnnnnnnnnnnnnnnnnnnnnnnnnnnnnnnnnnnnnnnnnnnnnnnnnnnnnnnnnnnnnnnnnnnnnnnnnnnnnnnnnnnnnnnnnnnnnnnnnnnnnnnnnnnnnnnnnnnnnnnnnnnnnnnnnnnnnnnnnnnnnnnnnnnnnnnnnnnnnnnnnnnnnnnnnnnnnnnnnnnnnnnnnnnnnnnnnnnnnnnnnnnnnnnnnnnnnnnnnnnnnnnnnnnnnnnnnnnnnnnnnnnnnnnnnnnnnnnnnnnnnnnnnnnnnnnnnnnnnnnnnnnnnnnnnnnnnnnnnnnnnnnnnnnnnnnnnnnnnnnnnnnnnnnnnnnnnnnnnnnnnnnnnnnnnnnnnnnnnnnnnnnnnnnnnnnnnnnnnnnnnnnnnnnnnnnnnnnnnnnnnnnnnnnnnnnnnnnnnnnnnnnnnnnnnnnnnnnnnnnnnnnnnnnnnnnnnnnnnnnnnnnnnnnnnnnnnnnnnnnnnnnnnnnnnnnnnnnnnnnnnnnnnnnnnnnnnnnnnnnnnnnnnnnnnnnnnnnnnnnnnnnnnnnnnnnnnnnnnnnnnnnnnnnnnnnnnnnnnnnnnnnnnnnnnnnnnnnnnnnnnnnnnnnnnnnnnnnnnnnnnnnnnnnnnnnnnnnnnnnnnnnnnnnnnnnnnnnnnnnnnnnnnnnnnnnnnnnnnnnnnnnnnnnnnnnnnnnnnnnnnnnnnnnnnnnnnnnnnnnnnnnnnnnnnnnnnnnnnnnnnnnnnnnnnnnnnnnnnnnnnnnnnnnnnnnnnnnnnnnnnnnnnnnnnnnnnnnnnnnnnnnnnnnnnnnnnnnnnnnnnnnnnnnnnnnnnnnnnnnnnnnnnnnnnnnnnnnnnnnnnnnnnnnnnnnnnnnnnnnnnnnnnnnnnnnnnnnnnnnnnnnnnnnnnnnnnnnnnnnnnnnnnnnnnnnnnnnnnnnnnnnnnnnnnnnnnnnnnnnnnnnnnnnnnnnnnnnnnnnnnnnnnnnnnnnnnnnnnnnnnnnnnnnnnnnnnnnnnnnnnnnnnnnnnnnnnnnnnnnnnnnnnnnnnnnnnnnnnnnnnnnnnnnnnnnnnnnnnnnnnnnnnnnnnnnnnnnnnnnnnnnnnnnnnnnnnnnnnnnnnnnnnnnnnnnnnnnnnnnnnnnnnnnnnnnnnnnnnnnnnnnnnnnnnnnnnnnnnnnnnnnnnnnnnnnnnnnnnnnnnnnnnnnnnnnnnnnnnnnnnnnnnnnnnnnnnnnnnnnnnnnnnnnnnnnnnnnnnnnnnnnnnnnnnnnnnnnnnnnnnnnnnnnnnnnnnnnnnnnnnnnnnnnnnnnnnnnnnnnnnnnnnnnnnnnnnnnnnnnnnnnnnnnnnnnnnnnnnnnnnnnnnnnnnnnnnnnnnnnnnnnnnnnnnnnnnnnnnnnnnnnnnnnnnnnnnnnnnnnnnnnnnnnnnnnnnnnnnnnnnnnnnnnnnnnnnnnnnnnnnnnnnnnnnnnnnnnnnnnnnnnnnnnnnnnnnnnnnnnnnnnnnnnnnnnnnnnnnnnnnnnnnnnnnnnnnnnnnnnnnnnnnnnnnnnnnnnnnnnnnnnnnnnnnnnnnnnnnnnnnnnnnnnnnnnnnnnnnnnnnnnnnnnnnnnnnnnnnnnnnnnnnnnnnnnnnnnnnnnnnnnnnnnnnnnnnnnnnnnnnnnnnnnnnnnnnnnnnnnnnnnnnnnnnnnnnnnnnnnnnnnnnnnnnnnnnnnnnnnnnnnnnnnnnnnnnnnnnnnnnnnnnnnnnnnnnnnnnnnnnnnnnnnnnnnnnnnnnnnnnnnnnnnnnnnnnnnnnnnnnnnnnnnnnnnnnnnnnnnnnnnnnnnnnnnnnnnnnnnnnnnnnnnnnnnnnnnnnnnnnnnnnnnnnnnnnnnnnnnnnnnnnnnnnnnnnnnnnnnnnnnnnnnnnnnnnnnnnnnnnnnnnnnnnnnnnnnnnnnnnnnnnnnnnnnnnnnnnnnnnnnnnnnnnnnnnnnnnnnnnnnnnnnnnnnnnnnnnnnnnnnnnnnnnnnnnnnnnnnnnnnnnnnnnnnnnnnnnnnnnnnnnnnnnnnnnnnnnnnnnnnnnnnnnnnnnnnnnnnnnnnnnnnnnnnnnnnnnnnnnnnnnnnnnnnnnnnnnnnnnnnnnnnnnnnnnnnnnnnnnnnnnnnnnnnnnnnnnnnnnnnnnnnnnnnnnnnnnnnnnnnnnnnnnnnnnnnnnnnnnnnnnnnnnnnnnnnnnnnnnnnnnnnnnnnnnnnnnnnnnnnnnnnnnnnnnnnnnnnnnnnnnnnnnnnnnnnnnnnnnnnnnnnnnnnnnnnnnnnnnnnnnnnnnnnnnnnnnnnnnnnnnnnnnnnnnnnnnnnnnnnnnnnnnnnnnnnnnnnnnnnnnnnnnnnnnnnnnnnnnnnnnnnnnnnnnnnnnnnnnnnnnnnnnnnnnnnnnnnnnnnnnnnnnnnnnnnnnnnnnnnnnnnnnnnnnnnnnnnnnnnnnnnnnnnnnnnnnnnnnnnnnnnnnnnnnnnnnnnnnnnnnnnnnnnnnnnnnnnnnnnnnnnnnnnnnnnnnnnnnnnnnnnnnnnnnnnnnnnnnnnnnnnnnnnnnnnnnnnnnnnnnnnnnnnnnnnnnnnnnnnnnnnnnnnnnnnnnnnnnnnnnnnnnnnnnnnnnnnnnnnnnnnnnnnnnnnnnnnnnnnnnnnnnnnnnnnnnnnnnnnnnnnnnnnnnnnnnnnnnnnnnnnnnnnnnnnnnnnnnnnnnnnnnnnnnnnnnnnnnnnnnnnnnnnnnnnnnnnnnnnnnnnnnnnnnnnnnnnnnnnnnnnnnnnnnnnnnnnnnnnnnnnnnnnnnnnnnnnnnnnnnnnnnnnnnnnnnnnnnnnnnnnnnnnnnnnnnnnnnnnnnnnnnnnnnnnnnnnnnnnnnnnnnnnnnnnnnnnnnnnnnnnnnnnnnnnnnnnnnnnnnnnnnnnnnnnnnnnnnnnnnnnnnnnnnnnnnnnnnnnnnnnnnnnnnnnnnnnnnnnnnnnnnnnnnnnnnnnnnnnnnnnnnnnnnnnnnnnnnnnnnnnnnnnnnnnnnnnnnnnnnnnnnnnnnnnnnnnnnnnnnnnnnnnnnnnnnnnnnnnnnnnnnnnnnnnnnnnnnnnnnnnnnnnnnnnnnnnnnnnnnnnnnnnnnnnnnnnnnnnnnnnnnnnnnnnnnnnnnnnnnnnnnnnnnnnnnnnnnnnnnnnnnnnnnnnnnnnnnnnnnnnnnnnnnnnnnnnnnnnnnnnnnnnnnnnnnnnnnnnnnnnnnnnnnnnnnnnnnnnnnnnnnnnnnnnnnnnnnnnnnnnnnnnnnnnnnnnnnnnnnnnnnnnnnnnnnnnnnnnnnnnnnnnnnnnnnnnnnnnnnnnnnnnnnnnnnnnnnnnnnnnnnnnnnnnnnnnnnnnnnnnnnnnnnnnnnnnnnnnnnnnnnnnnnnnnnnnnnnnnnnnnnnnnnnnnnnnnnnnnnnnnnnnnnnnnnnnnnnnnnnnnnnnnnnnnnnnnnnnnnnnnnnnnnnnnnnnnnnnnnnnnnnnnnnnnnnnnnnnnnnnnnnnnnnnnnnnnnnnnnnnnnnnnnnnnnnnnnnnnnnnnnnnnnnnnnnnnnnnnnnnnnnnnnnnnnnnnnnnnnnnnnnnnnnnnnnnnnnnnnnnnnnnnnnnnnnnnnnnnnnnnnnnnnnnnnnnnnnnnnnnnnnnnnnnnnnnnnnnnnnnnnnnnnnnnnnnnnnnnnnnnnnnnnnnnnnnnnnnnnnnnnnnnnnnnnnnnnnnnnnnnnnnnnnnnnnnnnnnnnnnnnnnnnnnnnnnnnnnnnnnnnnnnnnnnnnnnnnnnnnnnnnnnnnnnnnnnnnnnnnnnnnnnnnnnnnnnnnnnnnnnnnnnnnnnnnnnnnnnnnnnnnnnnnnnnnnnnnnnnnnnnnnnnnnnnnnnnnnnnnnnnnnnnnnnnnnnnnnnnnnnnnnnnnnnnnnnnnnnnnnnnnnnnnnnnnnnnnnnnnnnnnnnnnnnnnnnnnnnnnnnnnnnnnnnnnnnnnnnnnnnnnnnnnnnnnnnnnnnnnnnnnnnnnnnnnnnnnnnnnnnnnnnnnnnnnnnnnnnnnnnnnnnnnnnnnnnnnnnnnnnnnnnnnnnnnnnnnnnnnnnnnnnnnnnnnnnnnnnnnnnnnnnnnnnnnnnnnnnnnnnnnnnnnnnnnnnnnnnnnnnnnnnnnnnnnnnnnnnnnnnnnnnnnnnnnnnnnnnnnnnnnnnnnnnnnnnnnnnnnnnnnnnnnnnnnnnnnnnnnnnnnnnnnnnnnnnnnnnnnnnnnnnnnnnnnnnnnnnnnnnnnnnnnnnnnnnnnnnnnnnnnnnnnnnnnnnnnnnnnnnnnnnnnnnnnnnnnnnnnnnnnnnnnnnnnnnnnnnnnnnnnnnnnnnnnnnnnnnnnnnnnnnnnnnnnnnnnnnnnnnnnnnnnnnnnnnnnnnnnnnnnnnnnnnnnnnnnnnnnnnnnnnnnnnnnnnnnnnnnnnnnnnnnnnnnnnnnnnnnnnnnnnnnnnnnnnnnnnnnnnnnnnnnnnnnnnnnnnnnnnnnnnnnnnnnnnnnnnnnnnnnnnnnnnnnnnnnnnnnnnnnnnnnnnnnnnnnnnnnnnnnnnnnnnnnnnnnnnnnnnnnnnnnnnnnnnnnnnnnnnnnnnnnnnnnnnnnnnnnnnnnnnnnnnnnnnnnnnnnnnnnnnnnnnnnnnnnnnnnnnnnnnnnnnnnnnnnnnnnnnnnnnnnnnnnnnnnnnnnnnnnnnnnnnnnnnnnnnnnnnnnnnnnnnnnnnnnnnnnnnnnnnnnnnnnnnnnnnnnnnnnnnnnnnnnnnnnnnnnnnnnnnnnnnnnnnnnnnnnnnnnnnnnnnnnnnnnnnnnnnnnnnnnnnnnnnnnnnnnnnnnnnnnnnnnnnnnnnnnnnnnnnnnnnnnnnnnnnnnnnnnnnnnnnnnnnnnnnnnnnnnnnnnnnnnnnnnnnnnnnnnnnnnnnnnnnnnnnnnnnnnnnnnnnnnnnnnnnnnnnnnnnnnnnnnnnnnnnnnnnnnnnnnnnnnnnnnnnnnnnnnnnnnnnnnnnnnnnnnnnnnnnnnnnnnnnnnnnnnnnnnnnnnnnnnnnnnnnnnnnnnnnnnnnnnnnnnnnnnnnnnnnnnnnnnnnnnnnnnnnnnnnnnnnnnnnnnnnnnnnnnnnnnnnnnnnnnnnnnnnnnnnnnnnnnnnnnnnnnnnnnnnnnnnnnnnnnnnnnnnnnnnnnnnnnnnnnnnnnnnnnnnnnnnnnnnnnnnnnnnnnnnnnnnnnnnnnnnnnnnnnnnnnnnnnnnnnnnnnnnnnnnnnnnnnnnnnnnnnnnnnnnnnnnnnnnnnnnnnnnnnnnnnnnnnnnnnnnnnnnnnnnnnnnnnnnnnnnnnnnnnnnnnnnnnnnnnnnnnnnnnnnnnnnnnnnnnnnnnnnnnnnnnnnnnnnnnnnnnnnnnnnnnnnnnnnnnnnnnnnnnnnnnnnnnnnnnnnnnnnnnnnnnnnnnnnnnnnnnnnnnnnnnnnnnnnnnnnnnnnnnnnnnnnnnnnnnnnnnnnnnnnnnnnnnnnnnnnnnnnnnnnnnnnnnnnnnnnnnnnnnnnnnnnnnnnnnnnnnnnnnnnnnnnnnnnnnnnnnnnnnnnnnnnnnnnnnnnnnnnnnnnnnnnnnnnnnnnnnnnnnnnnnnnnnnnnnnnnnnnnnnnnnnnnnnnnnnnnnnnnnnnnnnnnnnnnnnnnnnnnnnnnnnnnnnnnnnnnnnnnnnnnnnnnnnnnnnnnnnnnnnnnnnnnnnnnnnnnnnnnnnnnnnnnnnnnnnnnnnnnnnnnnnnnnnnnnnnnnnnnnnnnnnnnnnnnnnnnnnnnnnnnnnnnnnnnnnnnnnnnnnnnnnnnnnnnnnnnnnnnnnnnnnnnnnnnnnnnnnnnnnnnnnnnnnnnnnnnnnnnnnnnnnnnnnnnnnnnnnnnnnnnnnnnnnnnnnnnnnnnnnnnnnnnnnnnnnnnnnnnnnnnnnnnnnnnnnnnnnnnnnnnnnnnnnnnnnnnnnnnnnnnnnnnnnnnnnnnnnnnnnnnnnnnnnnnnnnnnnnnnnnnnnnnnnnnnnnnnnnnnnnnnnnnnnnnnnnnnnnnnnnnnnnnnnnnnnnnnnnnnnnnnnnnnnnnnnnnnnnnnnnnnnnnnnnnnnnnnnnnnnnnnnnnnnnnnnnnnnnnnnnnnnnnnnnnnnnnnnnnnnnnnnnnnnnnnnnnnnnnnnnnnnnnnnnnnnnnnnnnnnnnnnnnnnnnnnnnnnnnnnnnnnnnnnnnnnnnnnnnnnnnnnnnnnnnnnnnnnnnnnnnnnnnnnnnnnnnnnnnnnnnnnnnnnnnnnnnnnnnnnnnnnnnnnnnnnnnnnnnnnnnnnnnnnnnnnnnnnnnnnnnnnnnnnnnnnnnnnnnnnnnnnnnnnnnnnnnnnnnnnnnnnnnnnnnnnnnnnnnnnnnnnnnnnnnnnnnnnnnnnnnnnnnnnnnnnnnnnnnnnnnnnnnnnnnnnnnnnnnnnnnnnnnnnnnnnnnnnnnnnnnnnnnnnnnnnnnnnnnnnnnnnnnnnnnnnnnnnnnnnnnnnnnnnnnnnnnnnnnnnnnnnnnnnnnnnnnnnnnnnnnnnnnnnnnnnnnnnnnnnnnnnnnnnnnnnnnnnnnnnnnnnnnnnnnnnnnnnnnnnnnnnnnnnnnnnnnnnnnnnnnnnnnnnnnnnnnnnnnnnnnnnnnnnnnnnnnnnnnnnnnnnnnnnnnnnnnnnnnnnnnnnnnnnnnnnnnnnnnnnnnnnnnnnnnnnnnnnnnnnnnnnnnnnnnnnnnnnnnnnnnnnnnnnnnnnnnnnnnnnnnnnnnnnnnnnnnnnnnnnnnnnnnnnnnnnnnnnnnnnnnnnnnnnnnnnnnnnnnnnnnnnnnnnnnnnnnnnnnnnnnnnnnnnnnnnnnnnnnnnnnnnnnnnnnnnnnnnnnnnnnnnnnnnnnnnnnnnnnnnnnnnnnnnnnnnnnnnnnnnnnnnnnnnnnnnnnnnnnnnnnnnnnnnnnnnnnnnnnnnnnnnnnnnnnnnnnnnnnnnnnnnnnnnnnnnnnnnnnnnnnnnnnnnnnnnnnnnnnnnnnnnnnnnnnnnnnnnnnnnnnnnnnnnnnnnnnnnnnnnnnnnnnnnnnnnnnnnnnnnnnnnnnnnnnnnnnnnnnnnnnnnnnnnnnnnnnnnnnnnnnnnnnnnnnnnnnnnnnnnnnnnnnnnnnnnnnnnnnnnnnnnnnnnnnnnnnnnnnnnnnnnnnnnnnnnnnnnnnnnnnnnnnnnnnnnnnnnnnnnnnnnnnnnnnnnnnnnnnnnnnnnnnnnnnnnnnnnnnnnnnnnnnnnnnnnnnnnnnnnnnnnnnnnnnnnnnnnnnnnnnnnnnnnnnnnnnnnnnnnnnnnnnnnnnnnnnnnnnnnnnnnnnnnnnnnnnnnnnnnnnnnnacctgcccgtggacgactggcgttccaggcgcgagtggttcgacaaggaggccgacaagcacggtttccagatccttggcgtgcacatcaggggcgacatgcaaaaggtcgagacgcacgacggccggcgcttctcgctcgacgccaccgagttcaccggcttgctgcaggtgaaagacccagccgccttcgcccagtgcctgctcaagggcgtgggccgcgtcggcaaggcctttggcctgggcatgctcatcgtgcgctgaccagccgcaccaccaccacatcactttctgcaccaaggagcgccacgtggccaacgtctttgcaaacatcgaaatcaccacgatcaacccgctgagcttcagccaccacggcacgtcagcacgcgccgacggcagcaagccgctgccgaccatgatccgaggcatcagcgaaggcggcgatccgctgcgcaccgtcttctggcccgctgcggcactgcgcggtgcgctgcgtcacggcgctgccttggccgacatgcgcgctgcgggcaacctcacgctgcaagacgcctatctgctcgcactgggccaagacctggagcgcgaagaatccgaggcacgcgacaagatcgaggccaagaagaccggcaagaaacccgaggccaaggcgcaggacatcatggcgacggtggccgaccgagaggctgcccatgcggtgctcgatctgttcggcacctggaagatgcccagtcgcttgcaggtggccaacctgctgccaccggtaaatgtgcgtgccgacaagttcgccttcattcgccgagacctggacactgacgccgagatgttcgacgccctgcctgagtccgagcgcgacgccttctatggccggcagcgccggcagtcagacgcctcgaaggtgggcgaccagatcgacgtggcagaaaaggccatcaaggccgcgaagaaggcgaagaacgaagacctgctgctcgagctcgaggccaagctggccgagctccagacgctgaaagaggccaccaagggcgacgatcagtcgggcaacaccaagcacctgctcgaggtcgaggccatcccggccggcgtggtgctcaccggcaagctggtggtgcagcgcgccaaggcacgcgacctggacttgctcatcgacggcctggatgcgatcagccgcaaacctgtcttcggcgcccacatggcacgcgggttcggcgagatcgagggcaaggccaccttcaccaacgacgacggcgaggtgctgtgcctggtgcgctttggcggttacgccaaggccgccgtggagtggacgcaagccggcagcgagatgaaggagggcatggcggtcgcctgatttttgtgggctgtggcaggcagaaaaggcaagcggatcaacgttttgcgggtaatgaggtcaagccgccctgagtttgggtggttactagaactacgcctcctctgcacctggtacaaacagggtcaagccgccctgagtttgggtggttactagaacgggaacaaaaccgggcagtcgctcccgtatggtcaagccgccctgagtttgggcggttactagaacatcttgaatgcaccgacgccgaacttgagcggtcaagccgccctgagtttgggcggttactaaaacgacaaccattggcaatggcctgcggatgtgggtcaagccgctcttaatttgagcggttactagaaggttagcaccagagccatcgtgatcgttctcggtcaagccgctcttaatttgagcggttactagaactagttgccttcgcctgccatataaaccattggccagccgctctgaaaatggacggttactagaatgttatttcttagatttgccactttacctggtgatcaagccgctctgagttttagcggttactagaaaaggtagtagcgcatcgccttctggcgctggttccagccgctctgaaaatgggtggttactagaaaacttggcccttggtaggtagccccatgtagtggcgaagccgctcggaagttgagcggttacttgaagtacgactgcgctctgcgttttgccattaatggtccagccgcctcggcggttatttgatttcgaggaagtgccacgtgtatcgcagcaaagagcagaaaacctatgccacgctcatcgagcgggccatcgccaggccaggtgcgccgctgctggccggtgctgctgccggcctgggcaagacgcacggctactcggtcccgctggtgacgagcggcaagcgcgtggcgatcgccttcagcacccgcgcgctgatcgcgcagtacctgggcagcgatgccttggcggcggccatggaggcagcaccaggcaccacggtggccgagctgaaaagccggcgcgacttcgacagcgccaaggactaccgcgagcaccgcgaccaggcgctcgccgcccaggtgctgctggtgacgcacgctgctgcgctgatcgacgcacgcatggccgactacgcgcaactgcgcgagcgcgacgtggtgctgttcgacgaggccgacctgctcgccgatgcggcagacctgcgcagcacgttcgagatcagcgccgacgtgctgaaggactgcggcgcgggcgatgacgtgcgcgctgctgccgaggccgtcaagcgcaaggccgcagacgctgaagaccgtgccgccgcgtcggcgatcgtctacgcgctcgacacgccgcgctggtatcgcgtggtcggctggagcgacgacggcgcgctgctgctcaagcaccgcatgccgggtcgcatgcttcgcccgctgctggccgaggtgcctcgcctgatcttcaccagcggcacgctgcaagtgggcggcaggttcgatcacttcgtgcgcgccctgggcctgctgcagatcgacccggcaagcacgcacatcgaccccgcccagcacgggcagctcgaggtggtgatggtggatgccgagctgagcgccgaggaccaggccaagcgcatcgcccaggcagccaggccggcgctggtgctcacgaccagccacgccaccacgcgcaagctcgccgcgctgctgcctggatcggtggcacgcgccgaaggcgagacgctggccgacgtgctcgcgcgctgtgcggccgacggcatcatgatcgcggccggtgcctggagtggcctggacgacccgaggctgcgctgggccacggtggttgtgccgacagcgccctacggcccgccggccaccctatcaggtcagcaggtgtcgcactacatcgacagcgaggtctgcgcgatccgcaggaccaaccagggcctgcaccgtggcctgcgcacgccagacgcacgctgcacgctgctgctgctcgacgagcgcttcaaccggccggcgctgcgccaggccatccccgagcgcttccgcgccgccgtggtgctgggcgcccaggaaggccaagagcaccagatgacgcaccgcgagcgctcgatccggcccaaggccttgaagcactacggcagccgctgcatgcacccaggctgcactgagacggccgagcaccggctcgatgcccatcacaagaaaccgatctcagacggagagcgcttcacgctgatggaagacgtggcgatcttgtgcaagcaccatcacgcggacttgcatcacgagcagcgtcaagcggcggcgtgaggccgcacaaatcactgggacagagaccaactggcatcaaccgcaacgacgaagtgaaaaacatggacaaggaatgctcttttcttcagatcgacagccccaactacaacgacccgtaccacttcaatgccgtgcatgtcgtggctagcagcctgcgcgacaggcgaaaaaagatgtccggctacgcccgcgcgctggttgcagtcttcggcaagcacagccccctgccggagacctaacccggcgactgggcccaggattgcgccttggtgcggaagcactttcttgacgaagctgcggagtgcaacgccgacgctttctacgatgcgcacgacgacgcgcaggaaaactaccgcgaccacctgatcgcctctggcatcagcgcgaagctcgctgccagcgaagccgcgcggcgcgggtactacatcgacgcggtgatcctcgcgggcccgttcgggttgccccgcgacgtttatgtgcgctgtgacaacttcatccgccacggccatccgcacgccgtggccgccagtttcttcacataggcagataaagacgtcgagggcgcagcatcggcggcgccctagtcgcttggctgtgcctcaccgccccacaaacaacctctcatcccaaaccacagcctccggcacgctggccgtgatgtgggcgaaatccgggtggcccgggttgatgagcacgttgccttcgcggcgggccacgaccgagggcaccaccagcactgccgttcgccgctcgcggatccaggcgttgccaaaggcccgggccacacgcaggtcggcatggtcccagccggcgggaagctggctttcgtggtggcgctcaacggcaaccgcctgtgccaccgcaatctcgacggccacatgggtgcgtggcacccggccgatgccggcgtgggccagacactcgagcatcgcgcccgcatacgaatggctggcgtaaatcacgcccaggccgggtgaattccagcggccacccaccagcgaagcacccacggggctgaagggatcaaagcggccatcggc

SEQ ID NO: 176 - DNA, 12585 bp, Artificial Sequence
  Synthetic Oligonucleotide
  misc_feature (1)..(5018): n is a, c, g, or t
nnnnnnnnnnnnnnnnnnnnnnnnnnnnnnnnnnnnnnnnnnnnnnnnnnnnnnnnnnnnnnnnnnnnnnnnnnnnnnnnnnnnnnnnnnnnnnnnnnnnnnnnnnnnnnnnnnnnnnnnnnnnnnnnnnnnnnnnnnnnnnnnnnnnnnnnnnnnnnnnnnnnnnnnnnnnnnnnnnnnnnnnnnnnnnnnnnnnnnnnnnnnnnnnnnnnnnnnnnnnnnnnnnnnnnnnnnnnnnnnnnnnnnnnnnnnnnnnnnnnnnnnnnnnnnnnnnnnnnnnnnnnnnnnnnnnnnnnnnnnnnnnnnnnnnnnnnnnnnnnnnnnnnnnnnnnnnnnnnnnnnnnnnnnnnnnnnnnnnnnnnnnnnnnnnnnnnnnnnnnnnnnnnnnnnnnnnnnnnnnnnnnnnnnnnnnnnnnnnnnnnnnnnnnnnnnnnnnnnnnnnnnnnnnnnnnnnnnnnnnnnnnnnnnnnnnnnnnnnnnnnnnnnnnnnnnnnnnnnnnnnnnnnnnnnnnnnnnnnnnnnnnnnnnnnnnnnnnnnnnnnnnnnnnnnnnnnnnnnnnnnnnnnnnnnnnnnnnnnnnnnnnnnnnnnnnnnnnnnnnnnnnnnnnnnnnnnnnnnnnnnnnnnnnnnnnnnnnnnnnnnnnnnnnnnnnnnnnnnnnnnnnnnnnnnnnnnnnnnnnnnnnnnnnnnnnnnnnnnnnnnnnnnnnnnnnnnnnnnnnnnnnnnnnnnnnnnnnnnnnnnnnnnnnnnnnnnnnnnnnnnnnnnnnnnnnnnnnnnnnnnnnnnnnnnnnnnnnnnnnnnnnnnnnnnnnnnnnnnnnnnnnnnnnnnnnnnnnnnnnnnnnnnnnnnnnnnnnnnnnnnnnnnnnnnnnnnnnnnnnnnnnnnnnnnnnnnnnnnnnnnnnnnnnnnnnnnnnnnnnnnnnnnnnnnnnnnnnnnnnnnnnnnnnnnnnnnnnnnnnnnnnnnnnnnnnnnnnnnnnnnnnnnnnnnnnnnnnnnnnnnnnnnnnnnnnnnnnnnnnnnnnnnnnnnnnnnnnnnnnnnnnnnnnnnnnnnnnnnnnnnnnnnnnnnnnnnnnnnnnnnnnnnnnnnnnnnnnnnnnnnnnnnnnnnnnnnnnnnnnnnnnnnnnnnnnnnnnnnnnnnnnnnnnnnnnnnnnnnnnnnnnnnnnnnnnnnnnnnnnnnnnnnnnnnnnnnnnnnnnnnnnnnnnnnnnnnnnnnnnnnnnnnnnnnnnnnnnnnnnnnnnnnnnnnnnnnnnnnnnnnnnnnnnnnnnnnnnnnnnnnnnnnnnnnnnnnnnnnnnnnnnnnnnnnnnnnnnnnnnnnnnnnnnnnnnnnnnnnnnnnnnnnnnnnnnnnnnnnnnnnnnnnnnnnnnnnnnnnnnnnnnnnnnnnnnnnnnnnnnnnnnnnnnnnnnnnnnnnnnnnnnnnnnnnnnnnnnnnnnnnnnnnnnnnnnnnnnnnnnnnnnnnnnnnnnnnnnnnnnnnnnnnnnnnnnnnnnnnnnnnnnnnnnnnnnnnnnnnnnnnnnnnnnnnnnnnnnnnnnnnnnnnnnnnnnnnnnnnnnnnnnnnnnnnnnnnnnnnnnnnnnnnnnnnnnnnnnnnnnnnnnnnnnnnnnnnnnnnnnnnnnnnnnnnnnnnnnnnnnnnnnnnnnnnnnnnnnnnnnnnnnnnnnnnnnnnnnnnnnnnnnnnnnnnnnnnnnnnnnnnnnnnnnnnnnnnnnnnnnnnnnnnnnnnnnnnnnnnnnnnnnnnnnnnnnnnnnnnnnnnnnnnnnnnnnnnnnnnnnnnnnnnnnnnnnnnnnnnnnnnnnnnnnnnnnnnnnnnnnnnnnnnnnnnnnnnnnnnnnnnnnnnnnnnnnnnnnnnnnnnnnnnnnnnnnnnnnnnnnnnnnnnnnnnnnnnnnnnnnnnnnnnnnnnnnnnnnnnnnnnnnnnnnnnnnnnnnnnnnnnnnnnnnnnnnnnnnnnnnnnnnnnnnnnnnnnnnnnnnnnnnnnnnnnnnnnnnnnnnnnnnnnnnnnnnnnnnnnnnnnnnnnnnnnnnnnnnnnnnnnnnnnnnnnnnnnnnnnnnnnnnnnnnnnnnnnnnnnnnnnnnnnnnnnnnnnnnnnnnnnnnnnnnnnnnnnnnnnnnnnnnnnnnnnnnnnnnnnnnnnnnnnnnnnnnnnnnnnnnnnnnnnnnnnnnnnnnnnnnnnnnnnnnnnnnnnnnnnnnnnnnnnnnnnnnnnnnnnnnnnnnnnnnnnnnnnnnnnnnnnnnnnnnnnnnnnnnnnnnnnnnnnnnnnnnnnnnnnnnnnnnnnnnnnnnnnnnnnnnnnnnnnnnnnnnnnnnnnnnnnnnnnnnnnnnnnnnnnnnnnnnnnnnnnnnnnnnnnnnnnnnnnnnnnnnnnnnnnnnnnnnnnnnnnnnnnnnnnnnnnnnnnnnnnnnnnnnnnnnnnnnnnnnnnnnnnnnnnnnnnnnnnnnnnnnnnnnnnnnnnnnnnnnnnnnnnnnnnnnnnnnnnnnnnnnnnnnnnnnnnnnnnnnnnnnnnnnnnnnnnnnnnnnnnnnnnnnnnnnnnnnnnnnnnnnnnnnnnnnnnnnnnnnnnnnnnnnnnnnnnnnnnnnnnnnnnnnnnnnnnnnnnnnnnnnnnnnnnnnnnnnnnnnnnnnnnnnnnnnnnnnnnnnnnnnnnnnnnnnnnnnnnnnnnnnnnnnnnnnnnnnnnnnnnnnnnnnnnnnnnnnnnnnnnnnnnnnnnnnnnnnnnnnnnnnnnnnnnnnnnnnnnnnnnnnnnnnnnnnnnnnnnnnnnnnnnnnnnnnnnnnnnnnnnnnnnnnnnnnnnnnnnnnnnnnnnnnnnnnnnnnnnnnnnnnnnnnnnnnnnnnnnnnnnnnnnnnnnnnnnnnnnnnnnnnnnnnnnnnnnnnnnnnnnnnnnnnnnnnnnnnnnnnnnnnnnnnnnnnnnnnnnnnnnnnnnnnnnnnnnnnnnnnnnnnnnnnnnnnnnnnnnnnnnnnnnnnnnnnnnnnnnnnnnnnnnnnnnnnnnnnnnnnnnnnnnnnnnnnnnnnnnnnnnnnnnnnnnnnnnnnnnnnnnnnnnnnnnnnnnnnnnnnnnnnnnnnnnnnnnnnnnnnnnnnnnnnnnnnnnnnnnnnnnnnnnnnnnnnnnnnnnnnnnnnnnnnnnnnnnnnnnnnnnnnnnnnnnnnnnnnnnnnnnnnnnnnnnnnnnnnnnnnnnnnnnnnnnnnnnnnnnnnnnnnnnnnnnnnnnnnnnnnnnnnnnnnnnnnnnnnnnnnnnnnnnnnnnnnnnnnnnnnnnnnnnnnnnnnnnnnnnnnnnnnnnnnnnnnnnnnnnnnnnnnnnnnnnnnnnnnnnnnnnnnnnnnnnnnnnnnnnnnnnnnnnnnnnnnnnnnnnnnnnnnnnnnnnnnnnnnnnnnnnnnnnnnnnnnnnnnnnnnnnnnnnnnnnnnnnnnnnnnnnnnnnnnnnnnnnnnnnnnnnnnnnnnnnnnnnnnnnnnnnnnnnnnnnnnnnnnnnnnnnnnnnnnnnnnnnnnnnnnnnnnnnnnnnnnnnnnnnnnnnnnnnnnnnnnnnnnnnnnnnnnnnnnnnnnnnnnnnnnnnnnnnnnnnnnnnnnnnnnnnnnnnnnnnnnnnnnnnnnnnnnnnnnnnnnnnnnnnnnnnnnnnnnnnnnnnnnnnnnnnnnnnnnnnnnnnnnnnnnnnnnnnnnnnnnnnnnnnnnnnnnnnnnnnnnnnnnnnnnnnnnnnnnnnnnnnnnnnnnnnnnnnnnnnnnnnnnnnnnnnnnnnnnnnnnnnnnnnnnnnnnnnnnnnnnnnnnnnnnnnnnnnnnnnnnnnnnnnnnnnnnnnnnnnnnnnnnnnnnnnnnnnnnnnnnnnnnnnnnnnnnnnnnnnnnnnnnnnnnnnnnnnnnnnnnnnnnnnnnnnnnnnnnnnnnnnnnnnnnnnnnnnnnnnnnnnnnnnnnnnnnnnnnnnnnnnnnnnnnnnnnnnnnnnnnnnnnnnnnnnnnnnnnnnnnnnnnnnnnnnnnnnnnnnnnnnnnnnnnnnnnnnnnnnnnnnnnnnnnnnnnnnnnnnnnnnnnnnnnnnnnnnnnnnnnnnnnnnnnnnnnnnnnnnnnnnnnnnnnnnnnnnnnnnnnnnnnnnnnnnnnnnnnnnnnnnnnnnnnnnnnnnnnnnnnnnnnnnnnnnnnnnnnnnnnnnnnnnnnnnnnnnnnnnnnnnnnnnnnnnnnnnnnnnnnnnnnnnnnnnnnnnnnnnnnnnnnnnnnnnnnnnnnnnnnnnnnnnnnnnnnnnnnnnnnnnnnnnnnnnnnnnnnnnnnnnnnnnnnnnnnnnnnnnnnnnnnnnnnnnnnnnnnnnnnnnnnnnnnnnnnnnnnnnnnnnnnnnnnnnnnnnnnnnnnnnnnnnnnnnnnnnnnnnnnnnnnnnnnnnnnnnnnnnnnnnnnnnnnnnnnnnnnnnnnnnnnnnnnnnnnnnnnnnnnnnnnnnnnnnnnnnnnnnnnnnnnnnnnnnnnnnnnnnnnnnnnnnnnnnnnnnnnnnnnnnnnnnnnnnnnnnnnnnnnnnnnnnnnnnnnnnnnnnnnnnnnnnnnnnnnnnnnnnnnnnnnnnnnnnnnnnnnnnnnnnnnnnnnnnnnnnnnnnnnnnnnnnnnnnnnnnnnnnnnnnnnnnnnnnnnnnnnnnnnnnnnnnnnnnnnnnnnnnnnnnnnnnnnnnnnnnnnnnnnnnnnnnnnnnnnnnnnnnnnnnnnnnnnnnnnnnnnnnnnnnnnnnnnnnnnnnnnnnnnnnnnnnnnnnnnnnnnnnnnnnnnnnnnnnnnnnnnnnnnnnnnnnnnnnnnnnnnnnnnnnnnnnnnnnnnnnnnnnnnnnnnnnnnnnnnnnnnnnnnnnnnnnnnnnnnnnnnnnnnnnnnnnnnnnnnnnnnnnnnnnnnnnnnnnnnnnnnnnnnnnnnnnnnnnnnnnnnnnnnnnnnnnnnnnnnnnnnnnnnnnnnnnnnnnnnnnnnnnnnnnnnnnnnnnnnnnnnnnnnnnnnnnnnnnnnnnnnnnnnnnnnnnnnnnnnnnnnnnacccgtggcgcgcaacaagcatttcatggtggtgaaggtgctggaacccgaacccccggccaccgccctggaatgggtggagctggaagcggtgtattcgggcacggtcacgcgcatcgcttggcgcgaactgcgcgacaccgggcgctggcggcagggctgggtgtagccaccccggagagcccccaaccgcatccgttacgatttccccagcgccacacggcgctacagggaggaaatcaaccgatggaccgattcaaagtcacggcgacgctgggcagccccctcgtcgtcaatgggggctacatgacccttgatgccctgctcgcggcgctcatctatgagcacacgggcgatctggagcgggctcatgccgacattccgctgcacaacaccgaaggcctctggcacggcagcgcggccatctatgaaaagtgggacgaacaacgggtgggtttcgtcgccaacttacaggcccgacacgatctggatctcgacctcattgcccagaacaagcagggcaagacccacaccatgatcggcatgacgcgccgccgcgagttcggcgcggtcatgaacagctaccggacggtcaccacccccaccgtcacctggtatgcccaaggcgatgccgacgccgtgcgccgcctgctcgccaatgtgtccttcatcggcaagcggcgcgccagcggctttggtcaggtctcgggtttcaccatcgaacccgacgaactcgacggggttaccggcttctttggtgaacccttgcgccccgtgcccatcgacctgttcaccggcaacggcagcaccgcgctgaaggccgacgcagcctggcgtcccgcctattggcaccccaccaaccgcgccatttgctgcgtacctgaggcgatggcatgaacaccttcgaattctttaacgaacacttcggtcgccacctcgtgcggcttgacggcgctccccacgaagccgcctaccgagccctcagcagcaaccaccggctctccaaaggcaccgaaagccgcctgtcttccggctgggccatcgtgcgccccggcacctccagcgtgcagctcaaactcgccgccgcccacctgcactttgacgagcgcacccgcatcgaagccttcatggacgagctggcgcactgggacgaaaaagagccgcgcatctttctcatgttcgacaaagcgcccgtgcccttggcccacctgttcctcacggtggacaagcgcgccgtgcgcatctgttcgcccgctggcgtcgaaacattcaactggcacttggcgcccgcgccagacgccggtggtatccagaaaaccctgtggaaaaggaggcaccccgcatgatggaccacaccatccccaagcccgcgcaaaccgcaggctacccgctgcaccggctggtggccgagctgctggacggcgcgcccgcgctctttgccgaccaaggcgaccgcctgatcgtgcgcaccgaaaagcacatcaccgcgcaggggcggcgcgtgcagccgcccgccctgggcgacgtgatcgccttcgagctcaaggcctgcgcggcccagcgccacggcgggcgcaacatctaccccgagcgcggcgactggcgcacccgccgcgcctggctcgaagccgaaggcgtcaaacatggctttgaggtcatggccgtccacatcaccggcgaccgcctgcaagtcagcgccagcggtggacgccgtttctggatcgacgccagccagttcaccggcgtgctcaaagtcaccgaagccacccgcttcgcccaggcactgtccaccggcattggccgcgtgggcaaagccttcggcatgggcctgctgatcatctgaaccgctgtcacacccgcaccaccccattcaaggagcccccatgaacaccccaaacacccgcatcgtcatcaacgccaccatcaccaccgttggcccgctctccatccgcatgcccaaacccgaaggcgggcgcgaaaacgaatgggacaacttccccgtcatgacccgtggggtggacgaggccggcaaccgccagcaaaccggctacctgcccgccaccaccgtgcgcggtttcttgcgccgtgccgtcaccctgcgcaacatgcgcagcgccgccgaagccggcaagccctacaagctgccgcagatttacagcgaaatgatcggccaggacgccgagagcgaaaaacaggccggtgatattgatctgctcgcgctgcgccaggcgcgcgaagccagccccgtgctcgacctgtttggcagtggcttgggcatcaaatcgcggctgaaggtgagccactttctgcccgctgtcaacgtcctgcccgaagccttcacgggtgtgcgcaaagacctggacgacaccgaagaagcgctggagctgatggaccccgccgacatggccgcctttttgggccgcagcgacagcaacaaccggcgcgccgcctccgccgccgtggtcaaacagttggaaagccaggtcaggaagctggagaaaaaaggcgagcccatccctgaagacgtggccaaggccctgctggctgcccgggccgagaccgaaaagttcaaagacgccatgggcgagatgcaaaacagcacgcgcaccatcgtgcaacaccacgcgctgcccgcaggcctgccgctgagcgggcgcctggtgatcgacaacgcccgcgaccgcgatgtggcgctgctggacgatgccctcaacgcgctcagcctgcgccccctgctcggcgcgcagagcgcgcgcggttgcggggaaattgcgggccagtttcagttctttgacggcgagggccagctgctgaaaaccgtcaccgtgggcgggttccaaccggccagaatggtgaaaatctgaacggtcgtgtctgggttttctgtgtggaatcaagcacttggaagattgcggtgcaagccatcccgaaatggggtggctactagaaccatccaggccgaggcagagcgcgatgaagcgtgcaagccatcccgaaatggggtggctactagaacagcgctggtcaatgggcgaagacacctggtgtgcaagccatcccgaaatggggtggctactagaaccaaaacgcatcatcattcagactacgccatgtgcaagccatcccgaaatggggtggctactagaacatgaggtgccgttatgcgcctgaacagccagtgcaagccatcccgaaatggggtggctactagaaccgtcaatctggctgatgccctccacatagggtgcaagccatcccgaaatggggtggctactagaacatggagggcttcatcaacgaaacgttggggtgcaagccatcccgaaatggggtggctactagaacacgacgacattgagcagcaaattcaagccagtgcaagccatcccgaaatggggtggctactagaactgagccaggcggccattgggcgtgcgcttgtgcaagccatcccgaaatggggtggctactagaactctcgctccgttacttctttgatcctcttggtgcaagccatcccgaaatggggtggctactagaaccatccgtcccggcaggctgcgaaaagtcctgtgcaagccatcccgaaatggggtggctactagaacacccggcccaagcggccactcaacaggacggtgcaagccatcccgaaatggggtggctactagaacaccaccccaccgaaaggaccgacccatgaggtgcaagccatcccgaaatggggtggctactagaacctgtccttcagtacagatcaagtttgtgcggtgcaagccatcccgaaatggggtggctactagaaccttgggcgtggaccagtccaccccgggctcggtgcaagccatcccgaaatggggtggctactagaacggttggtcagtgcgcctgtgcggtggtcttgtgcaagccatcccgaaatggggtggctactagaacagacgaatgccacttgccgcatggtgcgtggtgcaagccatcccgaaatggggtggctactagaaccgccctgataatccgacgcagaagccgccagtgcaagccatcccgaaatggggtggctactagaacacatgaacctggcgggcctgaagtcgagcggtgcaagccatcccgaaatggggtggctactagaacagcgagcgcgcggcatgcaaccggtttgcagtgcaagccatcccgaaatggggtggctactagaaccacccagcctgccaccccatgaaattcttggtgcaagccatcccgaaatggggtggctactagaactaccaacgcgtcaacacaccaaccgattacgtgcaagccatcccgaaatggggtggctactagaacaacgaatttgtgtgcagctcgatagccacagtgcaagccatcccgaaatggggtggctactagaacgcgtagccgtgcaggcgcttccatgctgccgtgcaagccatcccgaaatggggtggctactagaaggtcacgttgtcaatggcgaacgtgagcaccgtgcgagccatcctgaaatggggtggctactagaagacgcccgacttgatcgccatgaacaaggcggtgcaagccatcccgaaatggggtggctactagaagcaggccggtatcgtggtgctcgactggatcgtacaagccatcccgaaatggggtggctactagaagcatataggtatggtatcgctgggctgccccgtgcaagccatcccgaaatggggtggctactagaagtagatgaccttgccgccgcacatcatttctgtgcaagccatcctcaaatggggtggctactagaagaccatcacgtcgtcgtgcaacacgtcgttggtacaagccatccctacatggggtggctactaaaagttcatcgccaaaaagctgaacaccacgcaggtgcaagccatcccgaaacgggttggctactagaaaaaaagtggcgttaagggtaaatcgctgcgggtgcaagccatcctgaaatggaatggctactagaagatggcgccggtgccgtagtacacctggccggtgcaagccatcccgaaatgggatggctattaagcagccacgatctcgatccattggctgcgagccacccgccagcgggtggctgtttgctttcgcgatactcaacaccatgacctcccaagaagcgcccatgttccgctctgtcgcccagaccaacttccacgccctcgtggcgcgccacatggcgcaacccgatgcgcccctgttgctggagggcagcaccggcctgggcaagacgcgcgcgctgctggcggcggtgatgcaggctgcggcacatgggcagcgcatcaccgtggccctgcccagccaccagttgatcgaccaatggctcgcgtccagcgatctcgcggccacgcggcgaccgggtgtggccgtggtggcgtttcggcctgcgcggtggttcgcgcagcgggccgactacgccgcccagcgcggggcggcgatggcggcgccggtgctgctgtgtaccagcgcggcggtgatcatcgaccggcggctggacggcgcctacaacggcgccagcgaacgggactacctgctgtttgacgaggccgaccagttgcccgacgccgccgcgctgcaaagcgaccgcgagatttctgcggccaccctacaggggctgggcgtggcacgcccaaccagcaccccagacgccacacaggcgctggccaccgtgttgcaacacgcgggggccgagcccgaaacccgcgctgcggcgctgctgatgcaagacgccctgaacgaaccggcttggtaccaccgcgtgggctggacggacgagggcggcctgatgctgtaccaccagatgccggggcggctgctccagcgcatcgccaaccggccgggcgtggctttcgtcagcgccacgctcaccgtgggcgggcaaatggacgatttcaagcgggcgctgggcattgcgcagcagagcgcgctgtcgggcgtgatcgagcccgagcaccatggtgcgctggactttgtggtgaccgaggccgaggtggacacgcccgagtggctggcccgcaccgccgccaccattgaagccgcccagttgggcggcccggtgctggtggccacgccaagccacacgctggcgcagcaactgggcgggctgctgccgtgggctacggtgcgccgtgccgacgaaaccacgggcgaagcggcggcgcgcatgggcagcagccgggttctgatcgcggcgggcgcgtgggccggtctggacacccccgtggtgtggaagagcatcgtggtgccacgggtgccgttcgagcgcccggtggtgctggatgggcaggtggagagccggtatgtggacacccgcaacacggcggtgcgccgcatgcgccaggtgatcgggcgcggcctgcgctcgcccgacgcgagctgcaccgtgcacattctggacaaccgctacacgcggatcgaggcttttgtgcccccgcgctttcgcgcgcagtgggcgcagcggcaacgctttgccgaaggcgcacgggccgaagtcacgctgtcgagcattgagcgcgcccccgccgtgcgcaaggcggcgctggctcaccacggcaaacgctgcatgtgttgtggcttcgtgcccaaagtggacagccagctggatgtgcaccacctgaacccgctggggaccggcggcgaaaggctgaccggtctcgacgatgtggctgtgctctgcgccaactgccaccggttggcgcattccgaatcgccgccgctggcgctggccgcgctgcgcacactcgtgctggcttgaaaagcgccgccagcccgccctcaacgccccgccaacaccttcagtaaccagccgttcagatcagaaatttcctgtgggcacaccgagtgctccatcgggtaggtgaaccagtccacggagtagcccagcgcctgcaaggtgtcgcgggcggcttcgccgcgctctaaaaccaccaccgggtcgtgcaggccgtgggccataaaaatgggggtctgctgattggctgggctgcgctcggcggcggtttgctcggccagcggcaaatagcctgagagcgccaccaaacccgccagccgctgcggggcgcgcaaaccggccagcaaggtcatggcgcagccttgcgaaaaacccatgagcacggtgcgctcgggcggcacaccgcgcgccgcttcgcggttcagcaactgctgcacgatgctttgcgaagcccgcaggccggggccgtcttcgcgccgcatgccctgcgcatcgggcggggcaatgtcgtaccaggcgcgcatctcgtacccgccgttgatggtgaccgggcgcaccggggcgctgggaaagatgaagcgcaccgggccgatggcgctcaggtccagctcctgggcaatgggcacgaagtcgctgccatcggcccccaggccgtgcagcaccacgatgctggccacgggctgggccgcggtgtcgccaccggcgacgagttccatgatttcgatggtttgggtgttcatgggtggcagcatagcgggtgctggggtggactctctaacccacagcaggacaaaccctctgccaccg

SEQ ID NO: 177 - DNA, 12580 bp, Artificial Sequence
  Synthetic Oligonucleotide
  misc_feature (1)..(6177): n is a, c, g, or t
nnnnnnnnnnnnnnnnnnnnnnnnnnnnnnnnnnnnnnnnnnnnnnnnnnnnnnnnnnnnnnnnnnnnnnnnnnnnnnnnnnnnnnnnnnnnnnnnnnnnnnnnnnnnnnnnnnnnnnnnnnnnnnnnnnnnnnnnnnnnnnnnnnnnnnnnnnnnnnnnnnnnnnnnnnnnnnnnnnnnnnnnnnnnnnnnnnnnnnnnnnnnnnnnnnnnnnnnnnnnnnnnnnnnnnnnnnnnnnnnnnnnnnnnnnnnnnnnnnnnnnnnnnnnnnnnnnnnnnnnnnnnnnnnnnnnnnnnnnnnnnnnnnnnnnnnnnnnnnnnnnnnnnnnnnnnnnnnnnnnnnnnnnnnnnnnnnnnnnnnnnnnnnnnnnnnnnnnnnnnnnnnnnnnnnnnnnnnnnnnnnnnnnnnnnnnnnnnnnnnnnnnnnnnnnnnnnnnnnnnnnnnnnnnnnnnnnnnnnnnnnnnnnnnnnnnnnnnnnnnnnnnnnnnnnnnnnnnnnnnnnnnnnnnnnnnnnnnnnnnnnnnnnnnnnnnnnnnnnnnnnnnnnnnnnnnnnnnnnnnnnnnnnnnnnnnnnnnnnnnnnnnnnnnnnnnnnnnnnnnnnnnnnnnnnnnnnnnnnnnnnnnnnnnnnnnnnnnnnnnnnnnnnnnnnnnnnnnnnnnnnnnnnnnnnnnnnnnnnnnnnnnnnnnnnnnnnnnnnnnnnnnnnnnnnnnnnnnnnnnnnnnnnnnnnnnnnnnnnnnnnnnnnnnnnnnnnnnnnnnnnnnnnnnnnnnnnnnnnnnnnnnnnnnnnnnnnnnnnnnnnnnnnnnnnnnnnnnnnnnnnnnnnnnnnnnnnnnnnnnnnnnnnnnnnnnnnnnnnnnnnnnnnnnnnnnnnnnnnnnnnnnnnnnnnnnnnnnnnnnnnnnnnnnnnnnnnnnnnnnnnnnnnnnnnnnnnnnnnnnnnnnnnnnnnnnnnnnnnnnnnnnnnnnnnnnnnnnnnnnnnnnnnnnnnnnnnnnnnnnnnnnnnnnnnnnnnnnnnnnnnnnnnnnnnnnnnnnnnnnnnnnnnnnnnnnnnnnnnnnnnnnnnnnnnnnnnnnnnnnnnnnnnnnnnnnnnnnnnnnnnnnnnnnnnnnnnnnnnnnnnnnnnnnnnnnnnnnnnnnnnnnnnnnnnnnnnnnnnnnnnnnnnnnnnnnnnnnnnnnnnnnnnnnnnnnnnnnnnnnnnnnnnnnnnnnnnnnnnnnnnnnnnnnnnnnnnnnnnnnnnnnnnnnnnnnnnnnnnnnnnnnnnnnnnnnnnnnnnnnnnnnnnnnnnnnnnnnnnnnnnnnnnnnnnnnnnnnnnnnnnnnnnnnnnnnnnnnnnnnnnnnnnnnnnnnnnnnnnnnnnnnnnnnnnnnnnnnnnnnnnnnnnnnnnnnnnnnnnnnnnnnnnnnnnnnnnnnnnnnnnnnnnnnnnnnnnnnnnnnnnnnnnnnnnnnnnnnnnnnnnnnnnnnnnnnnnnnnnnnnnnnnnnnnnnnnnnnnnnnnnnnnnnnnnnnnnnnnnnnnnnnnnnnnnnnnnnnnnnnnnnnnnnnnnnnnnnnnnnnnnnnnnnnnnnnnnnnnnnnnnnnnnnnnnnnnnnnnnnnnnnnnnnnnnnnnnnnnnnnnnnnnnnnnnnnnnnnnnnnnnnnnnnnnnnnnnnnnnnnnnnnnnnnnnnnnnnnnnnnnnnnnnnnnnnnnnnnnnnnnnnnnnnnnnnnnnnnnnnnnnnnnnnnnnnnnnnnnnnnnnnnnnnnnnnnnnnnnnnnnnnnnnnnnnnnnnnnnnnnnnnnnnnnnnnnnnnnnnnnnnnnnnnnnnnnnnnnnnnnnnnnnnnnnnnnnnnnnnnnnnnnnnnnnnnnnnnnnnnnnnnnnnnnnnnnnnnnnnnnnnnnnnnnnnnnnnnnnnnnnnnnnnnnnnnnnnnnnnnnnnnnnnnnnnnnnnnnnnnnnnnnnnnnnnnnnnnnnnnnnnnnnnnnnnnnnnnnnnnnnnnnnnnnnnnnnnnnnnnnnnnnnnnnnnnnnnnnnnnnnnnnnnnnnnnnnnnnnnnnnnnnnnnnnnnnnnnnnnnnnnnnnnnnnnnnnnnnnnnnnnnnnnnnnnnnnnnnnnnnnnnnnnnnnnnnnnnnnnnnnnnnnnnnnnnnnnnnnnnnnnnnnnnnnnnnnnnnnnnnnnnnnnnnnnnnnnnnnnnnnnnnnnnnnnnnnnnnnnnnnnnnnnnnnnnnnnnnnnnnnnnnnnnnnnnnnnnnnnnnnnnnnnnnnnnnnnnnnnnnnnnnnnnnnnnnnnnnnnnnnnnnnnnnnnnnnnnnnnnnnnnnnnnnnnnnnnnnnnnnnnnnnnnnnnnnnnnnnnnnnnnnnnnnnnnnnnnnnnnnnnnnnnnnnnnnnnnnnnnnnnnnnnnnnnnnnnnnnnnnnnnnnnnnnnnnnnnnnnnnnnnnnnnnnnnnnnnnnnnnnnnnnnnnnnnnnnnnnnnnnnnnnnnnnnnnnnnnnnnnnnnnnnnnnnnnnnnnnnnnnnnnnnnnnnnnnnnnnnnnnnnnnnnnnnnnnnnnnnnnnnnnnnnnnnnnnnnnnnnnnnnnnnnnnnnnnnnnnnnnnnnnnnnnnnnnnnnnnnnnnnnnnnnnnnnnnnnnnnnnnnnnnnnnnnnnnnnnnnnnnnnnnnnnnnnnnnnnnnnnnnnnnnnnnnnnnnnnnnnnnnnnnnnnnnnnnnnnnnnnnnnnnnnnnnnnnnnnnnnnnnnnnnnnnnnnnnnnnnnnnnnnnnnnnnnnnnnnnnnnnnnnnnnnnnnnnnnnnnnnnnnnnnnnnnnnnnnnnnnnnnnnnnnnnnnnnnnnnnnnnnnnnnnnnnnnnnnnnnnnnnnnnnnnnnnnnnnnnnnnnnnnnnnnnnnnnnnnnnnnnnnnnnnnnnnnnnnnnnnnnnnnnnnnnnnnnnnnnnnnnnnnnnnnnnnnnnnnnnnnnnnnnnnnnnnnnnnnnnnnnnnnnnnnnnnnnnnnnnnnnnnnnnnnnnnnnnnnnnnnnnnnnnnnnnnnnnnnnnnnnnnnnnnnnnnnnnnnnnnnnnnnnnnnnnnnnnnnnnnnnnnnnnnnnnnnnnnnnnnnnnnnnnnnnnnnnnnnnnnnnnnnnnnnnnnnnnnnnnnnnnnnnnnnnnnnnnnnnnnnnnnnnnnnnnnnnnnnnnnnnnnnnnnnnnnnnnnnnnnnnnnnnnnnnnnnnnnnnnnnnnnnnnnnnnnnnnnnnnnnnnnnnnnnnnnnnnnnnnnnnnnnnnnnnnnnnnnnnnnnnnnnnnnnnnnnnnnnnnnnnnnnnnnnnnnnnnnnnnnnnnnnnnnnnnnnnnnnnnnnnnnnnnnnnnnnnnnnnnnnnnnnnnnnnnnnnnnnnnnnnnnnnnnnnnnnnnnnnnnnnnnnnnnnnnnnnnnnnnnnnnnnnnnnnnnnnnnnnnnnnnnnnnnnnnnnnnnnnnnnnnnnnnnnnnnnnnnnnnnnnnnnnnnnnnnnnnnnnnnnnnnnnnnnnnnnnnnnnnnnnnnnnnnnnnnnnnnnnnnnnnnnnnnnnnnnnnnnnnnnnnnnnnnnnnnnnnnnnnnnnnnnnnnnnnnnnnnnnnnnnnnnnnnnnnnnnnnnnnnnnnnnnnnnnnnnnnnnnnnnnnnnnnnnnnnnnnnnnnnnnnnnnnnnnnnnnnnnnnnnnnnnnnnnnnnnnnnnnnnnnnnnnnnnnnnnnnnnnnnnnnnnnnnnnnnnnnnnnnnnnnnnnnnnnnnnnnnnnnnnnnnnnnnnnnnnnnnnnnnnnnnnnnnnnnnnnnnnnnnnnnnnnnnnnnnnnnnnnnnnnnnnnnnnnnnnnnnnnnnnnnnnnnnnnnnnnnnnnnnnnnnnnnnnnnnnnnnnnnnnnnnnnnnnnnnnnnnnnnnnnnnnnnnnnnnnnnnnnnnnnnnnnnnnnnnnnnnnnnnnnnnnnnnnnnnnnnnnnnnnnnnnnnnnnnnnnnnnnnnnnnnnnnnnnnnnnnnnnnnnnnnnnnnnnnnnnnnnnnnnnnnnnnnnnnnnnnnnnnnnnnnnnnnnnnnnnnnnnnnnnnnnnnnnnnnnnnnnnnnnnnnnnnnnnnnnnnnnnnnnnnnnnnnnnnnnnnnnnnnnnnnnnnnnnnnnnnnnnnnnnnnnnnnnnnnnnnnnnnnnnnnnnnnnnnnnnnnnnnnnnnnnnnnnnnnnnnnnnnnnnnnnnnnnnnnnnnnnnnnnnnnnnnnnnnnnnnnnnnnnnnnnnnnnnnnnnnnnnnnnnnnnnnnnnnnnnnnnnnnnnnnnnnnnnnnnnnnnnnnnnnnnnnnnnnnnnnnnnnnnnnnnnnnnnnnnnnnnnnnnnnnnnnnnnnnnnnnnnnnnnnnnnnnnnnnnnnnnnnnnnnnnnnnnnnnnnnnnnnnnnnnnnnnnnnnnnnnnnnnnnnnnnnnnnnnnnnnnnnnnnnnnnnnnnnnnnnnnnnnnnnnnnnnnnnnnnnnnnnnnnnnnnnnnnnnnnnnnnnnnnnnnnnnnnnnnnnnnnnnnnnnnnnnnnnnnnnnnnnnnnnnnnnnnnnnnnnnnnnnnnnnnnnnnnnnnnnnnnnnnnnnnnnnnnnnnnnnnnnnnnnnnnnnnnnnnnnnnnnnnnnnnnnnnnnnnnnnnnnnnnnnnnnnnnnnnnnnnnnnnnnnnnnnnnnnnnnnnnnnnnnnnnnnnnnnnnnnnnnnnnnnnnnnnnnnnnnnnnnnnnnnnnnnnnnnnnnnnnnnnnnnnnnnnnnnnnnnnnnnnnnnnnnnnnnnnnnnnnnnnnnnnnnnnnnnnnnnnnnnnnnnnnnnnnnnnnnnnnnnnnnnnnnnnnnnnnnnnnnnnnnnnnnnnnnnnnnnnnnnnnnnnnnnnnnnnnnnnnnnnnnnnnnnnnnnnnnnnnnnnnnnnnnnnnnnnnnnnnnnnnnnnnnnnnnnnnnnnnnnnnnnnnnnnnnnnnnnnnnnnnnnnnnnnnnnnnnnnnnnnnnnnnnnnnnnnnnnnnnnnnnnnnnnnnnnnnnnnnnnnnnnnnnnnnnnnnnnnnnnnnnnnnnnnnnnnnnnnnnnnnnnnnnnnnnnnnnnnnnnnnnnnnnnnnnnnnnnnnnnnnnnnnnnnnnnnnnnnnnnnnnnnnnnnnnnnnnnnnnnnnnnnnnnnnnnnnnnnnnnnnnnnnnnnnnnnnnnnnnnnnnnnnnnnnnnnnnnnnnnnnnnnnnnnnnnnnnnnnnnnnnnnnnnnnnnnnnnnnnnnnnnnnnnnnnnnnnnnnnnnnnnnnnnnnnnnnnnnnnnnnnnnnnnnnnnnnnnnnnnnnnnnnnnnnnnnnnnnnnnnnnnnnnnnnnnnnnnnnnnnnnnnnnnnnnnnnnnnnnnnnnnnnnnnnnnnnnnnnnnnnnnnnnnnnnnnnnnnnnnnnnnnnnnnnnnnnnnnnnnnnnnnnnnnnnnnnnnnnnnnnnnnnnnnnnnnnnnnnnnnnnnnnnnnnnnnnnnnnnnnnnnnnnnnnnnnnnnnnnnnnnnnnnnnnnnnnnnnnnnnnnnnnnnnnnnnnnnnnnnnnnnnnnnnnnnnnnnnnnnnnnnnnnnnnnnnnnnnnnnnnnnnnnnnnnnnnnnnnnnnnnnnnnnnnnnnnnnnnnnnnnnnnnnnnnnnnnnnnnnnnnnnnnnnnnnnnnnnnnnnnnnnnnnnnnnnnnnnnnnnnnnnnnnnnnnnnnnnnnnnnnnnnnnnnnnnnnnnnnnnnnnnnnnnnnnnnnnnnnnnnnnnnnnnnnnnnnnnnnnnnnnnnnnnnnnnnnnnnnnnnnnnnnnnnnnnnnnnnnnnnnnnnnnnnnnnnnnnnnnnnnnnnnnnnnnnnnnnnnnnnnnnnnnnnnnnnnnnnnnnnnnnnnnnnnnnnnnnnnnnnnnnnnnnnnnnnnnnnnnnnnnnnnnnnnnnnnnnnnnnnnnnnnnnnnnnnnnnnnnnnnnnnnnnnnnnnnnnnnnnnnnnnnnnnnnnnnnnnnnnnnnnnnnnnnnnnnnnnnnnnnnnnnnnnnnnnnnnnnnnnnnnnnnnnnnnnnnnnnnnnnnnnnnnnnnnnnnnnnnnnnnnnnnnnnnnnnnnnnnnnnnnnnnnnnnnnnnnnnnnnnnnnnnnnnnnnnnnnnnnnnnnnnnnnnnnnnnnnnnnnnnnnnnnnnnnnnnnnnnnnnnnnnnnnnnnnnnnnnnnnnnnnnnnnnnnnnnnnacatggtacggtgaaggtgatgtaatcaaagtcaaagacctcatgtcaacgatttcgtttattggtaaaagacgagcaaacggatttggtgaaattgaatcaatcgatttagaagaatcagaccttgacggtgttcttggttataccaatgaacctctgcgaccgatacctgagtccttgtttcaaggagatacatcatctctacgagcagatgcggcatggcgacctgcctactggcatcctgataatcgtgctgtttgctatgtaccccagtcgagtttatgaatacctacgaattcttttttgaatacttcggaaaacatcttttggattgtgaaggactcacaccatcggcagcagcatggaaagtcctaagtagcagtcacaagcaaaagaaagggacagtaagtcgacttacatcgggttgggcaatcctgcgtccacacaaatccacaattcaacttgaacttgccgcctctggtttggaatacactggtaatacaataaatcggtacgatgcctttgaagaagaatttgaatcttgggatggggtagaacctcgaatgttcctaactttcgataaagcaccgattcccatttctaatctgtttttaacactcgataagagaatgattcgtatttgctcacccaaaacagtccaaaactttgacattaatgcagaaccaaatgaactttctggagatgtacaaaaggtgctttggagtagaaaacaaaaagcgatggaattagaaaagaaaatccgaaaagtagaataatgcgtgaccacataataactaaacctctgacacttcaggcatatgcgatgcatcgtatggttgctgaactgtgtgctggttctacatatcaattcgttgatagaggtgactattttgttgtaaggacaagcaaagaaatcacgaatactggtaaagcactgctacttccactatcgggagcagtgattgcatttgagttaagagcatctgttgcggcaagacataaaaatacgaatctttaccctgataccaacgattggagatttcgtagggcatggttggaaaaatatggttctcggtatggatttgagattcttgctttgaatgtgacttctaagcatttaaagattaaaaataaagatgagcgaacattttctatcgactccacagatttcacaggagtgctaaaagtcactgatgccaatcaatttaaggatgctttgcacaaaggaattggacgagtcggcaaggcatttggtatgggtatgctagttatttgagttaaatggagaaataacatgaaagatatcatcagaattgaggcagtcattcgcaccgagtctcctctatcaataaagatgccagtagcagaaggttcgagagaaaatcatttcgaaaattttccagtgatgactagaggcattgatgccgatggcaataaattacagactgggtttttacctgccactacaatacgaggattcctacgcagggcgattgttttgcggagcatgagaaaagcatctgatgaaggtaaaccctaccgactgccacagatttatacagaaatgattgggcaagatgccgatagtgaaaagcaatctgatgacattgatttgcaagcattgaaagcagcaagggaatctagtccagtattagatttgttcggtagtggtctgggtataaagtcacgattgaaagttgggcactttgttcctttggtcaatgtactacccgaagtttttactggtgttcgcaaagatttagacgacacggaagacgctctagatttaatggacaaaggggacatgcagagttttctgggcaggagtcaaaacaataatcagcgggctgctgctgctgcggttgtaaagcaattggaaggaaagatacggcgggatagtaaaaagaatgaagtatcagccgatgatgagaaagcattagaggtagcaaaagcaaatcttgaaaaatttaaagagggaatgggcgacatgcaagttagcacacgaacaatagtgcaacattttgccctaccttctcatgttgatttacatggtcgaatcatcatcgataaggcaaatgaaaaagaccttgaaatgattgtgtatagcctgtctgaattaagtaaagcaccgattcttggagcgcatagtgcacgaggatgtggtgaaatatctggtaagtttgatttctatgacggttcaggtaagcaattaaaaacagtcaaagtaggtggattttctgcagcaaaaatcactaatttttaaagtcagagtagtattattatttgtgatatcaatgacttatagaacttcggttcaagccactcagtaaatgagaggctactggaagcccgcatacgcatgaactagccaagcgccggttcaagccactcagtaaatgagaggctactggaaggatgtaaattttcctaacttagtgaggacagttcaagccactcagtaaatgagaggctactggaagcaaaactttgccatctctttgacaagctcagttcaagccactcagcaaatgagaggctactggaagcaacacgctcctgagcctgaaagccagcttgttcaagccactcagtaaatgagaggctactggaagactgatgctgatacaggcacagaggtaagtgttcaagccactcagtaaatgagaggctactggaagtacatcgaaataacaacgatggcagagcttgttcaagccactcagtaaatgagaggctactggaagatagaacccatgatgtcttggacgctacaggttcaagccactcagtaaatgagaggctactggaagtgttaggaaaggttaggaatgccagataaggttcaagccacttagtaaataagaggctgctgaaagttgcgctccgctagagatacgatgcatttgttcaagccagtcagtaaatgagaggctactgaaaaagtggttatgttatttgttacggaacgaaattaaagccacttaataaataagaggctactgaaagatgaaaatccctccgactaaaatagtgaattatcaagccatctaatttaatgaaggctatttcggttgtttaaatatgaattaaattaaatatggaaaagaaagcaccatcacctcatattactaaagtagatttagataaaaatattcctttacctaatcctcgacaaaagtatccatacaaagaaatgaatgtaggagattcattctttgttgagggtgcttcaatgcaaaatatttgcaatcaaaactatcgaaatggcaaaacacttaatatgtcatttatcgctaggacagaagaaaacggtataagagtgtggagagtaaaataattttctttataaatttaatttgagccactcagtaaatgggaggctactgaaagtctaaaagcccaaccgctggttttacagaggttcaagccactcagtaaatgagaggctactggaagaagaacttgtgtggaattggaatcgggcagattcaagccactaagtaaatgagaggctactggaagtattctgtgtttgggtaggctgctatttgtgttcaagccactcagtaaatgagaggctactgaaagaatggtacttctgatatagcttttgaaaatgttcaagccactcacttaatgagaggctactggaagaataaagcccgaatataaccttccttgtcagttcaagccactcagtaaatgagaggctactggaagaagaggacgagtaaattccagcaggtaatcgttcaagccactcagtaattgagaggctattatgttgttttagaggtcactgatttcggtgacctttcttttatgcgaccacccatgtttcgttctgccgaacaagaaaatttctactccagactaaaggcacatctttctgcgcctgagagacctttgctacttgaaggtgcaactgggttaggtaaaacacgagcctatcttgctgcaattgctgagtatgtttcaagtggtaagcaagtagccattgttctaccaacgcatatgctcattgagcaattacttaattcatctgatttaaaaacagtaatccaaccacctatctctgtagttgcatttctgcctcgaagtcgatttgagacccaagcactgtacaaagaacataagcaaaaagcacttgatgcagacattatgctttgtaccagtgcatcagtcattattgaccaacgacttcaaggtgactacaacggcataagcaaacgagactttattcttttcgatgaagccgatgttctacctgaagcagcagcacttcaaaaagattgcgaaattaaagcattcgatttgagagaaatgaatatcaacgtagttactgctaaacaggctgtaaccgaagtcttatccaaagcaggtatttctcaagagataaaggcttcagcattattgattcttgaagcgattgaagaacctgcatggtacaagtctgcgggtaaaacagatgatggtggcattatgcttttccataaaatgccaggacgattattaaagcgaatatcgaatcaaggcaatgtagcttttattagcgcaacgctttcgattggcggtacttttgatgattttaagcggtctatgggtatatcaaacgaaagtcatctatctaccatcatcgaacctaagcagcacggttcattgacatttcatgtgtccgacaaagcagtagatgaccctgattggttaatttctgtcgtttcaagtattaattcagcggcaaaaccatgtctggttgtaaccgcaagtcatactttgtcaaatactcttggtaatttgctgccaattgctactattcgcagcaaagaagaaactacatctgatgctgcaagtcgtatgggaaattcacagatattaattgcagctggtgcatgggcaggcttagacactccgactcaatggaaaagtattgttgtgcctcgaataccctatgagagaccagtcattttagatgaccaagtagagagcagttttctacacacacgaaacactgctattcgaagaatgcgtcaagtaatcggaagaggattaagaactccagatgcatcttgcgacatttttattcttgataatcgattcaagaatgttgagtcttttattcccgaaagatttaaatcaagctggggtaaaaagacttttcttgaaggtagtaggtcagaagttactctttcacgaatagaaagagattcgtccgtcagaaaaaatgcactcaaccattacagtagaaaatgtatgtcatgtggttttgtgcctaaggtagattctcagcttgatgtgcatcacttacatcctcttgcagatgggggtgaacgatttacatcaattgcagatgtggcggtgctttgtgcgaattgtcatcgtctggcacatactgcatcaccaccattgccgattgagacattaaagttaatgatggttgattcagatgacgagagtatttcgtaaaaatcgtattaattttttatatatttttattctgaacttaaaactgcgtagcaagttccgactccaattccaagttcacgacatattttttttatcggcataccattttcacgaagtagtttgactgctgattttataccttcatttaaacgagatggtctacccaatttcacaccgtttgctttggctctctgctgacctgccaacacacgttcacgaataagattacgttcaaactcgccaatagcaccaaataccgagaaaatcatcctaccgctgggtgtgcttgtatccattccgttttgcaagaagaacaaatcaatcttcattgcttggagttcgttgagtatctctacgaggtgctgaagacttctcccaagacggtcgatgctccagcacatgaccatatcgaatttacgccttgtagcgtctttcattaggtcattgagagcagggcgttcatcacgactcttagcacctgagatgccgttgtccgtgtattcctgaacgattgtgtaaccgagtttggtacagaggattcgaagttctagtagttgattctcagttgattgcttatcggtcgaaacacgtgcgtagatggcgattcttttcatgtcgttttcctatcaaaaatgacagataaactatacaacaaactatacaacaagtaaataataatgaataaaaacaagtacatacgtcaataaaattcgcactcataacccgaaggtcgtaggttcaaatcctgcccccgcaaccagttatttaagcccggttaatttaaccgggctttgttttttgtgtggcaatcgcgttgactagcagtcaattcgattcaagcgctgctgaaggcgatggttttcatgcatgcaagctgtgggccctttggctcagcccaaaatttcaggcgatgacaagctccaggaagtgccctataatc

SEQ ID NO: 178 - DNA, 12574 bp, Artificial Sequence
  Synthetic Oligonucleotide
  misc_feature (1)..(9717): n is a, c, g, or t
nnnnnnnnnnnnnnnnnnnnnnnnnnnnnnnnnnnnnnnnnnnnnnnnnnnnnnnnnnnnnnnnnnnnnnnnnnnnnnnnnnnnnnnnnnnnnnnnnnnnnnnnnnnnnnnnnnnnnnnnnnnnnnnnnnnnnnnnnnnnnnnnnnnnnnnnnnnnnnnnnnnnnnnnnnnnnnnnnnnnnnnnnnnnnnnnnnnnnnnnnnnnnnnnnnnnnnnnnnnnnnnnnnnnnnnnnnnnnnnnnnnnnnnnnnnnnnnnnnnnnnnnnnnnnnnnnnnnnnnnnnnnnnnnnnnnnnnnnnnnnnnnnnnnnnnnnnnnnnnnnnnnnnnnnnnnnnnnnnnnnnnnnnnnnnnnnnnnnnnnnnnnnnnnnnnnnnnnnnnnnnnnnnnnnnnnnnnnnnnnnnnnnnnnnnnnnnnnnnnnnnnnnnnnnnnnnnnnnnnnnnnnnnnnnnnnnnnnnnnnnnnnnnnnnnnnnnnnnnnnnnnnnnnnnnnnnnnnnnnnnnnnnnnnnnnnnnnnnnnnnnnnnnnnnnnnnnnnnnnnnnnnnnnnnnnnnnnnnnnnnnnnnnnnnnnnnnnnnnnnnnnnnnnnnnnnnnnnnnnnnnnnnnnnnnnnnnnnnnnnnnnnnnnnnnnnnnnnnnnnnnnnnnnnnnnnnnnnnnnnnnnnnnnnnnnnnnnnnnnnnnnnnnnnnnnnnnnnnnnnnnnnnnnnnnnnnnnnnnnnnnnnnnnnnnnnnnnnnnnnnnnnnnnnnnnnnnnnnnnnnnnnnnnnnnnnnnnnnnnnnnnnnnnnnnnnnnnnnnnnnnnnnnnnnnnnnnnnnnnnnnnnnnnnnnnnnnnnnnnnnnnnnnnnnnnnnnnnnnnnnnnnnnnnnnnnnnnnnnnnnnnnnnnnnnnnnnnnnnnnnnnnnnnnnnnnnnnnnnnnnnnnnnnnnnnnnnnnnnnnnnnnnnnnnnnnnnnnnnnnnnnnnnnnnnnnnnnnnnnnnnnnnnnnnnnnnnnnnnnnnnnnnnnnnnnnnnnnnnnnnnnnnnnnnnnnnnnnnnnnnnnnnnnnnnnnnnnnnnnnnnnnnnnnnnnnnnnnnnnnnnnnnnnnnnnnnnnnnnnnnnnnnnnnnnnnnnnnnnnnnnnnnnnnnnnnnnnnnnnnnnnnnnnnnnnnnnnnnnnnnnnnnnnnnnnnnnnnnnnnnnnnnnnnnnnnnnnnnnnnnnnnnnnnnnnnnnnnnnnnnnnnnnnnnnnnnnnnnnnnnnnnnnnnnnnnnnnnnnnnnnnnnnnnnnnnnnnnnnnnnnnnnnnnnnnnnnnnnnnnnnnnnnnnnnnnnnnnnnnnnnnnnnnnnnnnnnnnnnnnnnnnnnnnnnnnnnnnnnnnnnnnnnnnnnnnnnnnnnnnnnnnnnnnnnnnnnnnnnnnnnnnnnnnnnnnnnnnnnnnnnnnnnnnnnnnnnnnnnnnnnnnnnnnnnnnnnnnnnnnnnnnnnnnnnnnnnnnnnnnnnnnnnnnnnnnnnnnnnnnnnnnnnnnnnnnnnnnnnnnnnnnnnnnnnnnnnnnnnnnnnnnnnnnnnnnnnnnnnnnnnnnnnnnnnnnnnnnnnnnnnnnnnnnnnnnnnnnnnnnnnnnnnnnnnnnnnnnnnnnnnnnnnnnnnnnnnnnnnnnnnnnnnnnnnnnnnnnnnnnnnnnnnnnnnnnnnnnnnnnnnnnnnnnnnnnnnnnnnnnnnnnnnnnnnnnnnnnnnnnnnnnnnnnnnnnnnnnnnnnnnnnnnnnnnnnnnnnnnnnnnnnnnnnnnnnnnnnnnnnnnnnnnnnnnnnnnnnnnnnnnnnnnnnnnnnnnnnnnnnnnnnnnnnnnnnnnnnnnnnnnnnnnnnnnnnnnnnnnnnnnnnnnnnnnnnnnnnnnnnnnnnnnnnnnnnnnnnnnnnnnnnnnnnnnnnnnnnnnnnnnnnnnnnnnnnnnnnnnnnnnnnnnnnnnnnnnnnnnnnnnnnnnnnnnnnnnnnnnnnnnnnnnnnnnnnnnnnnnnnnnnnnnnnnnnnnnnnnnnnnnnnnnnnnnnnnnnnnnnnnnnnnnnnnnnnnnnnnnnnnnnnnnnnnnnnnnnnnnnnnnnnnnnnnnnnnnnnnnnnnnnnnnnnnnnnnnnnnnnnnnnnnnnnnnnnnnnnnnnnnnnnnnnnnnnnnnnnnnnnnnnnnnnnnnnnnnnnnnnnnnnnnnnnnnnnnnnnnnnnnnnnnnnnnnnnnnnnnnnnnnnnnnnnnnnnnnnnnnnnnnnnnnnnnnnnnnnnnnnnnnnnnnnnnnnnnnnnnnnnnnnnnnnnnnnnnnnnnnnnnnnnnnnnnnnnnnnnnnnnnnnnnnnnnnnnnnnnnnnnnnnnnnnnnnnnnnnnnnnnnnnnnnnnnnnnnnnnnnnnnnnnnnnnnnnnnnnnnnnnnnnnnnnnnnnnnnnnnnnnnnnnnnnnnnnnnnnnnnnnnnnnnnnnnnnnnnnnnnnnnnnnnnnnnnnnnnnnnnnnnnnnnnnnnnnnnnnnnnnnnnnnnnnnnnnnnnnnnnnnnnnnnnnnnnnnnnnnnnnnnnnnnnnnnnnnnnnnnnnnnnnnnnnnnnnnnnnnnnnnnnnnnnnnnnnnnnnnnnnnnnnnnnnnnnnnnnnnnnnnnnnnnnnnnnnnnnnnnnnnnnnnnnnnnnnnnnnnnnnnnnnnnnnnnnnnnnnnnnnnnnnnnnnnnnnnnnnnnnnnnnnnnnnnnnnnnnnnnnnnnnnnnnnnnnnnnnnnnnnnnnnnnnnnnnnnnnnnnnnnnnnnnnnnnnnnnnnnnnnnnnnnnnnnnnnnnnnnnnnnnnnnnnnnnnnnnnnnnnnnnnnnnnnnnnnnnnnnnnnnnnnnnnnnnnnnnnnnnnnnnnnnnnnnnnnnnnnnnnnnnnnnnnnnnnnnnnnnnnnnnnnnnnnnnnnnnnnnnnnnnnnnnnnnnnnnnnnnnnnnnnnnnnnnnnnnnnnnnnnnnnnnnnnnnnnnnnnnnnnnnnnnnnnnnnnnnnnnnnnnnnnnnnnnnnnnnnnnnnnnnnnnnnnnnnnnnnnnnnnnnnnnnnnnnnnnnnnnnnnnnnnnnnnnnnnnnnnnnnnnnnnnnnnnnnnnnnnnnnnnnnnnnnnnnnnnnnnnnnnnnnnnnnnnnnnnnnnnnnnnnnnnnnnnnnnnnnnnnnnnnnnnnnnnnnnnnnnnnnnnnnnnnnnnnnnnnnnnnnnnnnnnnnnnnnnnnnnnnnnnnnnnnnnnnnnnnnnnnnnnnnnnnnnnnnnnnnnnnnnnnnnnnnnnnnnnnnnnnnnnnnnnnnnnnnnnnnnnnnnnnnnnnnnnnnnnnnnnnnnnnnnnnnnnnnnnnnnnnnnnnnnnnnnnnnnnnnnnnnnnnnnnnnnnnnnnnnnnnnnnnnnnnnnnnnnnnnnnnnnnnnnnnnnnnnnnnnnnnnnnnnnnnnnnnnnnnnnnnnnnnnnnnnnnnnnnnnnnnnnnnnnnnnnnnnnnnnnnnnnnnnnnnnnnnnnnnnnnnnnnnnnnnnnnnnnnnnnnnnnnnnnnnnnnnnnnnnnnnnnnnnnnnnnnnnnnnnnnnnnnnnnnnnnnnnnnnnnnnnnnnnnnnnnnnnnnnnnnnnnnnnnnnnnnnnnnnnnnnnnnnnnnnnnnnnnnnnnnnnnnnnnnnnnnnnnnnnnnnnnnnnnnnnnnnnnnnnnnnnnnnnnnnnnnnnnnnnnnnnnnnnnnnnnnnnnnnnnnnnnnnnnnnnnnnnnnnnnnnnnnnnnnnnnnnnnnnnnnnnnnnnnnnnnnnnnnnnnnnnnnnnnnnnnnnnnnnnnnnnnnnnnnnnnnnnnnnnnnnnnnnnnnnnnnnnnnnnnnnnnnnnnnnnnnnnnnnnnnnnnnnnnnnnnnnnnnnnnnnnnnnnnnnnnnnnnnnnnnnnnnnnnnnnnnnnnnnnnnnnnnnnnnnnnnnnnnnnnnnnnnnnnnnnnnnnnnnnnnnnnnnnnnnnnnnnnnnnnnnnnnnnnnnnnnnnnnnnnnnnnnnnnnnnnnnnnnnnnnnnnnnnnnnnnnnnnnnnnnnnnnnnnnnnnnnnnnnnnnnnnnnnnnnnnnnnnnnnnnnnnnnnnnnnnnnnnnnnnnnnnnnnnnnnnnnnnnnnnnnnnnnnnnnnnnnnnnnnnnnnnnnnnnnnnnnnnnnnnnnnnnnnnnnnnnnnnnnnnnnnnnnnnnnnnnnnnnnnnnnnnnnnnnnnnnnnnnnnnnnnnnnnnnnnnnnnnnnnnnnnnnnnnnnnnnnnnnnnnnnnnnnnnnnnnnnnnnnnnnnnnnnnnnnnnnnnnnnnnnnnnnnnnnnnnnnnnnnnnnnnnnnnnnnnnnnnnnnnnnnnnnnnnnnnnnnnnnnnnnnnnnnnnnnnnnnnnnnnnnnnnnnnnnnnnnnnnnnnnnnnnnnnnnnnnnnnnnnnnnnnnnnnnnnnnnnnnnnnnnnnnnnnnnnnnnnnnnnnnnnnnnnnnnnnnnnnnnnnnnnnnnnnnnnnnnnnnnnnnnnnnnnnnnnnnnnnnnnnnnnnnnnnnnnnnnnnnnnnnnnnnnnnnnnnnnnnnnnnnnnnnnnnnnnnnnnnnnnnnnnnnnnnnnnnnnnnnnnnnnnnnnnnnnnnnnnnnnnnnnnnnnnnnnnnnnnnnnnnnnnnnnnnnnnnnnnnnnnnnnnnnnnnnnnnnnnnnnnnnnnnnnnnnnnnnnnnnnnnnnnnnnnnnnnnnnnnnnnnnnnnnnnnnnnnnnnnnnnnnnnnnnnnnnnnnnnnnnnnnnnnnnnnnnnnnnnnnnnnnnnnnnnnnnnnnnnnnnnnnnnnnnnnnnnnnnnnnnnnnnnnnnnnnnnnnnnnnnnnnnnnnnnnnnnnnnnnnnnnnnnnnnnnnnnnnnnnnnnnnnnnnnnnnnnnnnnnnnnnnnnnnnnnnnnnnnnnnnnnnnnnnnnnnnnnnnnnnnnnnnnnnnnnnnnnnnnnnnnnnnnnnnnnnnnnnnnnnnnnnnnnnnnnnnnnnnnnnnnnnnnnnnnnnnnnnnnnnnnnnnnnnnnnnnnnnnnnnnnnnnnnnnnnnnnnnnnnnnnnnnnnnnnnnnnnnnnnnnnnnnnnnnnnnnnnnnnnnnnnnnnnnnnnnnnnnnnnnnnnnnnnnnnnnnnnnnnnnnnnnnnnnnnnnnnnnnnnnnnnnnnnnnnnnnnnnnnnnnnnnnnnnnnnnnnnnnnnnnnnnnnnnnnnnnnnnnnnnnnnnnnnnnnnnnnnnnnnnnnnnnnnnnnnnnnnnnnnnnnnnnnnnnnnnnnnnnnnnnnnnnnnnnnnnnnnnnnnnnnnnnnnnnnnnnnnnnnnnnnnnnnnnnnnnnnnnnnnnnnnnnnnnnnnnnnnnnnnnnnnnnnnnnnnnnnnnnnnnnnnnnnnnnnnnnnnnnnnnnnnnnnnnnnnnnnnnnnnnnnnnnnnnnnnnnnnnnnnnnnnnnnnnnnnnnnnnnnnnnnnnnnnnnnnnnnnnnnnnnnnnnnnnnnnnnnnnnnnnnnnnnnnnnnnnnnnnnnnnnnnnnnnnnnnnnnnnnnnnnnnnnnnnnnnnnnnnnnnnnnnnnnnnnnnnnnnnnnnnnnnnnnnnnnnnnnnnnnnnnnnnnnnnnnnnnnnnnnnnnnnnnnnnnnnnnnnnnnnnnnnnnnnnnnnnnnnnnnnnnnnnnnnnnnnnnnnnnnnnnnnnnnnnnnnnnnnnnnnnnnnnnnnnnnnnnnnnnnnnnnnnnnnnnnnnnnnnnnnnnnnnnnnnnnnnnnnnnnnnnnnnnnnnnnnnnnnnnnnnnnnnnnnnnnnnnnnnnnnnnnnnnnnnnnnnnnnnnnnnnnnnnnnnnnnnnnnnnnnnnnnnnnnnnnnnnnnnnnnnnnnnnnnnnnnnnnnnnnnnnnnnnnnnnnnnnnnnnnnnnnnnnnnnnnnnnnnnnnnnnnnnnnnnnnnnnnnnnnnnnnnnnnnnnnnnnnnnnnnnnnnnnnnnnnnnnnnnnnnnnnnnnnnnnnnnnnnnnnnnnnnnnnnnnnnnnnnnnnnnnnnnnnnnnnnnnnnnnnnnnnnnnnnnnnnnnnnnnnnnnnnnnnnnnnnnnnnnnnnnnnnnnnnnnnnnnnnnnnnnnnnnnnnnnnnnnnnnnnnnnnnnnnnnnnnnnnnnnnnnnnnnnnnnnnnnnnnnnnnnnnnnnnnnnnnnnnnnnnnnnnnnnnnnnnnnnnnnnnnnnnnnnnnnnnnnnnnnnnnnnnnnnnnnnnnnnnnnnnnnnnnnnnnnnnnnnnnnnnnnnnnnnnnnnnnnnnnnnnnnnnnnnnnnnnnnnnnnnnnnnnnnnnnnnnnnnnnnnnnnnnnnnnnnnnnnnnnnnnnnnnnnnnnnnnnnnnnnnnnnnnnnnnnnnnnnnnnnnnnnnnnnnnnnnnnnnnnnnnnnnnnnnnnnnnnnnnnnnnnnnnnnnnnnnnnnnnnnnnnnnnnnnnnnnnnnnnnnnnnnnnnnnnnnnnnnnnnnnnnnnnnnnnnnnnnnnnnnnnnnnnnnnnnnnnnnnnnnnnnnnnnnnnnnnnnnnnnnnnnnnnnnnnnnnnnnnnnnnnnnnnnnnnnnnnnnnnnnnnnnnnnnnnnnnnnnnnnnnnnnnnnnnnnnnnnnnnnnnnnnnnnnnnnnnnnnnnnnnnnnnnnnnnnnnnnnnnnnnnnnnnnnnnnnnnnnnnnnnnnnnnnnnnnnnnnnnnnnnnnnnnnnnnnnnnnnnnnnnnnnnnnnnnnnnnnnnnnnnnnnnnnnnnnnnnnnnnnnnnnnnnnnnnnnnnnnnnnnnnnnnnnnnnnnnnnnnnnnnnnnnnnnnnnnnnnnnnnnnnnnnnnnnnnnnnnnnnnnnnnnnnnnnnnnnnnnnnnnnnnnnnnnnnnnnnnnnnnnnnnnnnnnnnnnnnnnnnnnnnnnnnnnnnnnnnnnnnnnnnnnnnnnnnnnnnnnnnnnnnnnnnnnnnnnnnnnnnnnnnnnnnnnnnnnnnnnnnnnnnnnnnnnnnnnnnnnnnnnnnnnnnnnnnnnnnnnnnnnnnnnnnnnnnnnnnnnnnnnnnnnnnnnnnnnnnnnnnnnnnnnnnnnnnnnnnnnnnnnnnnnnnnnnnnnnnnnnnnnnnnnnnnnnnnnnnnnnnnnnnnnnnnnnnnnnnnnnnnnnnnnnnnnnnnnnnnnnnnnnnnnnnnnnnnnnnnnnnnnnnnnnnnnnnnnnnnnnnnnnnnnnnnnnnnnnnnnnnnnnnnnnnnnnnnnnnnnnnnnnnnnnnnnnnnnnnnnnnnnnnnnnnnnnnnnnnnnnnnnnnnnnnnnnnnnnnnnnnnnnnnnnnnnnnnnnnnnnnnnnnnnnnnnnnnnnnnnnnnnnnnnnnnnnnnnnnnnnnnnnnnnnnnnnnnnnnnnnnnnnnnnnnnnnnnnnnnnnnnnnnnnnnnnnnnnnnnnnnnnnnnnnnnnnnnnnnnnnnnnnnnnnnnnnnnnnnnnnnnnnnnnnnnnnnnnnnnnnnnnnnnnnnnnnnnnnnnnnnnnnnnnnnnnnnnnnnnnnnnnnnnnnnnnnnnnnnnnnnnnnnnnnnnnnnnnnnnnnnnnnnnnnnnnnnnnnnnnnnnnnnnnnnnnnnnnnnnnnnnnnnnnnnnnnnnnnnnnnnnnnnnnnnnnnnnnnnnnnnnnnnnnnnnnnnnnnnnnnnnnnnnnnnnnnnnnnnnnnnnnnnnnnnnnnnnnnnnnnnnnnnnnnnnnnnnnnnnnnnnnnnnnnnnnnnnnnnnnnnnnnnnnnnnnnnnnnnnnnnnnnnnnnnnnnnnnnnnnnnnnnnnnnnnnnnnnnnnnnnnnnnnnnnnnnnnnnnnnnnnnnnnnnnnnnnnnnnnnnnnnnnnnnnnnnnnnnnnnnnnnnnnnnnnnnnnnnnnnnnnnnnnnnnnnnnnnnnnnnnnnnnnnnnnnnnnnnnnnnnnnnnnnnnnnnnnnnnnnnnnnnnnnnnnnnnnnnnnnnnnnnnnnnnnnnnnnnnnnnnnnnnnnnnnnnnnnnnnnnnnnnnnnnnnnnnnnnnnnnnnnnnnnnnnnnnnnnnnnnnnnnnnnnnnnnnnnnnnnnnnnnnnnnnnnnnnnnnnnnnnnnnnnnnnnnnnnnnnnnnnnnnnnnnnnnnnnnnnnnnnnnnnnnnnnnnnnnnnnnnnnnnnnnnnnnnnnnnnnnnnnnnnnnnnnnnnnnnnnnnnnnnnnnnnnnnnnnnnnnnnnnnnnnnnnnnnnnnnnnnnnnnnnnnnnnnnnnnnnnnnnnnnnnnnnnnnnnnnnnnnnnnnnnnnnnnnnnnnnnnnnnnnnnnnnnnnnnnnnnnnnnnnnnnnnnnnnnnnnnnnnnnnnnnnnnnnnnnnnnnnnnnnnnnnnnnnnnnnnnnnnnnnnnnnnnnnnnnnnnnnnnnnnnnnnnnnnnnnnnnnnnnnnnnnnnnnnnnnnnnnnnnnnnnnnnnnnnnnnnnnnnnnnnnnnnnnnnnnnnnnnnnnnnnnnnnnnnnnnnnnnnnnnnnnnnnnnnnnnnnnnnnnnnnnnnnnnnnnnnnnnnnnnnnnnnnnnnnnnnnnnnnnnnnnnnnnnnnnnnnnnnnnnnnnnnnnnnnnnnnnnnnnnnnnnnnnnnnnnnnnnnnnnnnnnnnnnnnnnnnnnnnnnnnnnnnnnnnnnnnnnnnnnnnnnnnnnnnnnnnnnnnnnnnnnnnnnnnnnnnnnnnnnnnnnnnnnnnnnnnnnnnnnnnnnnnnnnnnnnnnnnnnnnnnnnnnnnnnnnnnnnnnnnnnnnnnnnnnnnnnnnnnnnnnnnnnnnnnnnnnnnnnnnnnnnnnnnnnnnnnnnnnnnnnnnnnnnnnnnnnnnnnnnnnnnnnnnnnnnnnnnnnnnnnnnnnnnnnnnnnnnnnnnnnnnnnnnnnnnnnnnnnnnnnnnnnnnnnnnnnnnnnnnnnnnnnnnnnnnnnnnnnnnnnnnnnnnnnnnnnnnnnnnnnnnnnnnnnnnnnnnnnnnnnnnnnnnnnnnnnnnnnnnnnnnnnnnnnnnnnnnnnnnnnnnnnnnnnnnnnnnnnnnnnnnnnnnnnnnnnnnnnnnnnnnnnnnnnnnnnnnnnnnnnnnnnnnnnnnnnnnnnnnnnnnnnnnnnnnnnnnnnnnnnnnnnnnnnnnnnnnnnnnnnnnnnnnnnnnnnnnnnnnnnnnnnnnnnnnnnnnnnnnnnnnnnnnnnnnnnnnnnnnnnnnnnnnnnnnnnnnnnnnnnnnnnnnnnnnnnnnnnnnnnnnnnnnnnnnnnnnnnnnnnnnnnnnnnnnnnnnnnnnnnnnnnnnnnnnnnnnnnnnnnnnnnnnnnnnnnnnnnnnnnnnnnnnnnnnnnnnnnnnnnnnnnnnnnnnnnnnnnnnnnnnnnnnnnnnnnnnnnnnnnnnnnnnnnnnnnnnnnnnnnnnnnnnnnnnnnnnnnnnnnnnnnnnnnnnnnnnnnnnnnnnnnnnnnnnnnnnnnnnnnnnnnnnnnnnnnnnnnnnnnnnnnnnnnnnnnnnnnnnnnnnnnnnnnnnnnnnnnnnnnnnnnnnnnnnnnnnnnnnnnnnnnnnnnnnnnnnnnnnnnnnnnnnnnnnnnnnnnnnnnnnnnnnnnnnnnnnnnnnnnnnnnnnnnnnnnnnnnnnnnnnnnnnnnnnnnnnnnnnnnnnnnnnnnnnnnnnnnnnnnnnnnnnnnnnnnnnnnnnnnnnnnnnnnnnnnnnnnnnnnnnnnnnnnnnnnnnnnnnnnnnnnnnnnnnnnnnnnnnnnnnnatcgcagctcctctgaatttgaggagctactgaaaccagttccaagcctatcaaggcgcggatgttatcgcagctcctctgaattggaggagctactgaaactgcgcttatgtgcgccagtacatcgagtggtcgcagctcctctgaatttgaggagctactgaaacaagaacgcgccgaggatagccgcttcaaaatcgcagctcctctgaaattgaggagctattttctatagcgccactttaatgtggcgcttttttcctgtaccgatagaatcagactatgtttcgttccgttgagcagtccaatttttctgcgcgactcgctgcgcatattcagcaggctgatgcgccattattgcttgaaggaacaacagggcttggaaaaactagagcctatctagctgcgctcaacaccgcgattcagcagggcaagcgtgtcgctatcgtcgttccaacgcacgcgctgatcgagcagcttcttgcttcttctgatctcgcgttgattgttccgccgacagtcactcgcgcagcgttcaagcccaagtcgttttattcatcagcccaacagtttaaagacgcaaaagccttgtctcttgagtcgtcgctgatgatttgtactagctcttcagtgatcgttgatcaacgcgccaagggtaactacaacggcgtgactactcgagactatattttatttgacgaggcggatcagctccctcagtacgctgctctgtctagagaccgcgaaattcgtggcgcagaactgaaggaactcggtgttcgaggctcgactacgaaagagatcgcggaacaggttatcgcgcacaaagctgcggaaacggaaactcgcgccgcagcagtgatgatcttggaggctcttgatgagcctgcttggtatcacaacgcaggcaagaccgacgatggcgggattgcgctttttcacaaaatgccaggaaggctgctcaagaaaatcgctaaccgctctaatgtcgccttcgttagcgcaacgctctctattgggggaaagttcgatgactttaagcgcgcaatgggcattggagagcagagtgcgctctcatcgatcatcgagcctgcgcatcacgggacgctgaaattctttcacgaaccgcacccagttctatcgcaagaatggctcaccgcgacaaccgaagcaatcaccaaggcgaaaaagccaacgcttgtggtcacgccaagcaatgagttgtctcagaccttgggtgcgcttttccctgacgccattgttcgtgcggcagaggaaaagacttcagacgcgattttgcggctgacagacgaccagaacatcctgatcgcgtcagcagcgtgggcgggacttgacacgcccattgagtggaaaagcattgtcattccgcgcattccgttcctgcgccctcaagtgatagacggcaatattgaaagcagcttctttgattcgcggaatagcgctatccgccgaatgcgtcaggtgattgggcgagggctcagaaaacctgaggcggagtgcgaggtgtacattttggacgaccgtttggcgatgattgagtcgttcattccaacgcgattcagagagttgtgggcgaatagacagcgtcttgtggggtcatcgtatgttgaagggcgtgactatgagaaaggcggaaggggagtagagcgtcatccgctggtcagaaaaaacgccctgaagcattttggtagacggtgtatgtcgtgtgacttcgttcccaaagtggacagtcagttagaggttcaccatttgttcccgcttgctgatggcggtgagcgggttacgaagattcaaaccgatgtggcggtgctttgcgccaactgtcaccgtttggcgcattcggcgtcgccgccgctgcctcttggggtcctgagaggacttcaccaagacggcgggttatcagggtagggtgaatacagcgagaaggcggttccataagggttccacaatccgccctaaaccgtcgcctacctcgccactcaagccgccaatagacccttagatttgagcgtatggaaggctgtcccaacgccacagcggagggtctgactgatcttcttggggctcatccccttcttgtacagttccacgatggcggcacgggtcgaatccgtcaccgagcttgggcgaccgagtttcttcccttcccttcgagcgcgttccacgcctaacttgatccgctcgcggatgaggtcgcgctcgaactcagcgaacgatgagaacacaccgaacatcagcttccctgaaggctgcgtggtgtctaaagcctgttggtggaagtagagctgaacgcctgaagcgtgaaggtcgttcacagtggtgacaaggtgctgtagggaccgtccaaggcggtcgatgctccaaacggcgatgaggtcgaactcacggcgagtggcggctttcaggagagcatcgagggcagggcgaccatcgcgacccttggctcctgagatgccgtcgtcgcggtaggtggcgacgatgttccacccacgaagagcggcgacacgctcaagctcgtggagttggttgtcggcggtttggtgagcggtggagacgcgaagatagagtgcggttttcatatgggtagcctctaagtgtctgataaaattaggaaattctgcgaatttcaaggctcataccgtactactataccgtactactaaagcgtaaaactcctaaaaaagagggtttttcttgtttttaaacgcgttgaaaatccgcgtgtcgttggttcgattccgaccccggccaccatcctccaagatctctgtccggtctcgccgaaggcccgcccgaggactttcgtatggattttccgccgacacgccaagccgcg

SEQ ID NO: 179 - DNA, 12573 bp, Artificial Sequence
  Synthetic Oligonucleotide
  misc_feature (1)..(8871): n is a, c, g, or t
nnnnnnnnnnnnnnnnnnnnnnnnnnnnnnnnnnnnnnnnnnnnnnnnnnnnnnnnnnnnnnnnnnnnnnnnnnnnnnnnnnnnnnnnnnnnnnnnnnnnnnnnnnnnnnnnnnnnnnnnnnnnnnnnnnnnnnnnnnnnnnnnnnnnnnnnnnnnnnnnnnnnnnnnnnnnnnnnnnnnnnnnnnnnnnnnnnnnnnnnnnnnnnnnnnnnnnnnnnnnnnnnnnnnnnnnnnnnnnnnnnnnnnnnnnnnnnnnnnnnnnnnnnnnnnnnnnnnnnnnnnnnnnnnnnnnnnnnnnnnnnnnnnnnnnnnnnnnnnnnnnnnnnnnnnnnnnnnnnnnnnnnnnnnnnnnnnnnnnnnnnnnnnnnnnnnnnnnnnnnnnnnnnnnnnnnnnnnnnnnnnnnnnnnnnnnnnnnnnnnnnnnnnnnnnnnnnnnnnnnnnnnnnnnnnnnnnnnnnnnnnnnnnnnnnnnnnnnnnnnnnnnnnnnnnnnnnnnnnnnnnnnnnnnnnnnnnnnnnnnnnnnnnnnnnnnnnnnnnnnnnnnnnnnnnnnnnnnnnnnnnnnnnnnnnnnnnnnnnnnnnnnnnnnnnnnnnnnnnnnnnnnnnnnnnnnnnnnnnnnnnnnnnnnnnnnnnnnnnnnnnnnnnnnnnnnnnnnnnnnnnnnnnnnnnnnnnnnnnnnnnnnnnnnnnnnnnnnnnnnnnnnnnnnnnnnnnnnnnnnnnnnnnnnnnnnnnnnnnnnnnnnnnnnnnnnnnnnnnnnnnnnnnnnnnnnnnnnnnnnnnnnnnnnnnnnnnnnnnnnnnnnnnnnnnnnnnnnnnnnnnnnnnnnnnnnnnnnnnnnnnnnnnnnnnnnnnnnnnnnnnnnnnnnnnnnnnnnnnnnnnnnnnnnnnnnnnnnnnnnnnnnnnnnnnnnnnnnnnnnnnnnnnnnnnnnnnnnnnnnnnnnnnnnnnnnnnnnnnnnnnnnnnnnnnnnnnnnnnnnnnnnnnnnnnnnnnnnnnnnnnnnnnnnnnnnnnnnnnnnnnnnnnnnnnnnnnnnnnnnnnnnnnnnnnnnnnnnnnnnnnnnnnnnnnnnnnnnnnnnnnnnnnnnnnnnnnnnnnnnnnnnnnnnnnnnnnnnnnnnnnnnnnnnnnnnnnnnnnnnnnnnnnnnnnnnnnnnnnnnnnnnnnnnnnnnnnnnnnnnnnnnnnnnnnnnnnnnnnnnnnnnnnnnnnnnnnnnnnnnnnnnnnnnnnnnnnnnnnnnnnnnnnnnnnnnnnnnnnnnnnnnnnnnnnnnnnnnnnnnnnnnnnnnnnnnnnnnnnnnnnnnnnnnnnnnnnnnnnnnnnnnnnnnnnnnnnnnnnnnnnnnnnnnnnnnnnnnnnnnnnnnnnnnnnnnnnnnnnnnnnnnnnnnnnnnnnnnnnnnnnnnnnnnnnnnnnnnnnnnnnnnnnnnnnnnnnnnnnnnnnnnnnnnnnnnnnnnnnnnnnnnnnnnnnnnnnnnnnnnnnnnnnnnnnnnnnnnnnnnnnnnnnnnnnnnnnnnnnnnnnnnnnnnnnnnnnnnnnnnnnnnnnnnnnnnnnnnnnnnnnnnnnnnnnnnnnnnnnnnnnnnnnnnnnnnnnnnnnnnnnnnnnnnnnnnnnnnnnnnnnnnnnnnnnnnnnnnnnnnnnnnnnnnnnnnnnnnnnnnnnnnnnnnnnnnnnnnnnnnnnnnnnnnnnnnnnnnnnnnnnnnnnnnnnnnnnnnnnnnnnnnnnnnnnnnnnnnnnnnnnnnnnnnnnnnnnnnnnnnnnnnnnnnnnnnnnnnnnnnnnnnnnnnnnnnnnnnnnnnnnnnnnnnnnnnnnnnnnnnnnnnnnnnnnnnnnnnnnnnnnnnnnnnnnnnnnnnnnnnnnnnnnnnnnnnnnnnnnnnnnnnnnnnnnnnnnnnnnnnnnnnnnnnnnnnnnnnnnnnnnnnnnnnnnnnnnnnnnnnnnnnnnnnnnnnnnnnnnnnnnnnnnnnnnnnnnnnnnnnnnnnnnnnnnnnnnnnnnnnnnnnnnnnnnnnnnnnnnnnnnnnnnnnnnnnnnnnnnnnnnnnnnnnnnnnnnnnnnnnnnnnnnnnnnnnnnnnnnnnnnnnnnnnnnnnnnnnnnnnnnnnnnnnnnnnnnnnnnnnnnnnnnnnnnnnnnnnnnnnnnnnnnnnnnnnnnnnnnnnnnnnnnnnnnnnnnnnnnnnnnnnnnnnnnnnnnnnnnnnnnnnnnnnnnnnnnnnnnnnnnnnnnnnnnnnnnnnnnnnnnnnnnnnnnnnnnnnnnnnnnnnnnnnnnnnnnnnnnnnnnnnnnnnnnnnnnnnnnnnnnnnnnnnnnnnnnnnnnnnnnnnnnnnnnnnnnnnnnnnnnnnnnnnnnnnnnnnnnnnnnnnnnnnnnnnnnnnnnnnnnnnnnnnnnnnnnnnnnnnnnnnnnnnnnnnnnnnnnnnnnnnnnnnnnnnnnnnnnnnnnnnnnnnnnnnnnnnnnnnnnnnnnnnnnnnnnnnnnnnnnnnnnnnnnnnnnnnnnnnnnnnnnnnnnnnnnnnnnnnnnnnnnnnnnnnnnnnnnnnnnnnnnnnnnnnnnnnnnnnnnnnnnnnnnnnnnnnnnnnnnnnnnnnnnnnnnnnnnnnnnnnnnnnnnnnnnnnnnnnnnnnnnnnnnnnnnnnnnnnnnnnnnnnnnnnnnnnnnnnnnnnnnnnnnnnnnnnnnnnnnnnnnnnnnnnnnnnnnnnnnnnnnnnnnnnnnnnnnnnnnnnnnnnnnnnnnnnnnnnnnnnnnnnnnnnnnnnnnnnnnnnnnnnnnnnnnnnnnnnnnnnnnnnnnnnnnnnnnnnnnnnnnnnnnnnnnnnnnnnnnnnnnnnnnnnnnnnnnnnnnnnnnnnnnnnnnnnnnnnnnnnnnnnnnnnnnnnnnnnnnnnnnnnnnnnnnnnnnnnnnnnnnnnnnnnnnnnnnnnnnnnnnnnnnnnnnnnnnnnnnnnnnnnnnnnnnnnnnnnnnnnnnnnnnnnnnnnnnnnnnnnnnnnnnnnnnnnnnnnnnnnnnnnnnnnnnnnnnnnnnnnnnnnnnnnnnnnnnnnnnnnnnnnnnnnnnnnnnnnnnnnnnnnnnnnnnnnnnnnnnnnnnnnnnnnnnnnnnnnnnnnnnnnnnnnnnnnnnnnnnnnnnnnnnnnnnnnnnnnnnnnnnnnnnnnnnnnnnnnnnnnnnnnnnnnnnnnnnnnnnnnnnnnnnnnnnnnnnnnnnnnnnnnnnnnnnnnnnnnnnnnnnnnnnnnnnnnnnnnnnnnnnnnnnnnnnnnnnnnnnnnnnnnnnnnnnnnnnnnnnnnnnnnnnnnnnnnnnnnnnnnnnnnnnnnnnnnnnnnnnnnnnnnnnnnnnnnnnnnnnnnnnnnnnnnnnnnnnnnnnnnnnnnnnnnnnnnnnnnnnnnnnnnnnnnnnnnnnnnnnnnnnnnnnnnnnnnnnnnnnnnnnnnnnnnnnnnnnnnnnnnnnnnnnnnnnnnnnnnnnnnnnnnnnnnnnnnnnnnnnnnnnnnnnnnnnnnnnnnnnnnnnnnnnnnnnnnnnnnnnnnnnnnnnnnnnnnnnnnnnnnnnnnnnnnnnnnnnnnnnnnnnnnnnnnnnnnnnnnnnnnnnnnnnnnnnnnnnnnnnnnnnnnnnnnnnnnnnnnnnnnnnnnnnnnnnnnnnnnnnnnnnnnnnnnnnnnnnnnnnnnnnnnnnnnnnnnnnnnnnnnnnnnnnnnnnnnnnnnnnnnnnnnnnnnnnnnnnnnnnnnnnnnnnnnnnnnnnnnnnnnnnnnnnnnnnnnnnnnnnnnnnnnnnnnnnnnnnnnnnnnnnnnnnnnnnnnnnnnnnnnnnnnnnnnnnnnnnnnnnnnnnnnnnnnnnnnnnnnnnnnnnnnnnnnnnnnnnnnnnnnnnnnnnnnnnnnnnnnnnnnnnnnnnnnnnnnnnnnnnnnnnnnnnnnnnnnnnnnnnnnnnnnnnnnnnnnnnnnnnnnnnnnnnnnnnnnnnnnnnnnnnnnnnnnnnnnnnnnnnnnnnnnnnnnnnnnnnnnnnnnnnnnnnnnnnnnnnnnnnnnnnnnnnnnnnnnnnnnnnnnnnnnnnnnnnnnnnnnnnnnnnnnnnnnnnnnnnnnnnnnnnnnnnnnnnnnnnnnnnnnnnnnnnnnnnnnnnnnnnnnnnnnnnnnnnnnnnnnnnnnnnnnnnnnnnnnnnnnnnnnnnnnnnnnnnnnnnnnnnnnnnnnnnnnnnnnnnnnnnnnnnnnnnnnnnnnnnnnnnnnnnnnnnnnnnnnnnnnnnnnnnnnnnnnnnnnnnnnnnnnnnnnnnnnnnnnnnnnnnnnnnnnnnnnnnnnnnnnnnnnnnnnnnnnnnnnnnnnnnnnnnnnnnnnnnnnnnnnnnnnnnnnnnnnnnnnnnnnnnnnnnnnnnnnnnnnnnnnnnnnnnnnnnnnnnnnnnnnnnnnnnnnnnnnnnnnnnnnnnnnnnnnnnnnnnnnnnnnnnnnnnnnnnnnnnnnnnnnnnnnnnnnnnnnnnnnnnnnnnnnnnnnnnnnnnnnnnnnnnnnnnnnnnnnnnnnnnnnnnnnnnnnnnnnnnnnnnnnnnnnnnnnnnnnnnnnnnnnnnnnnnnnnnnnnnnnnnnnnnnnnnnnnnnnnnnnnnnnnnnnnnnnnnnnnnnnnnnnnnnnnnnnnnnnnnnnnnnnnnnnnnnnnnnnnnnnnnnnnnnnnnnnnnnnnnnnnnnnnnnnnnnnnnnnnnnnnnnnnnnnnnnnnnnnnnnnnnnnnnnnnnnnnnnnnnnnnnnnnnnnnnnnnnnnnnnnnnnnnnnnnnnnnnnnnnnnnnnnnnnnnnnnnnnnnnnnnnnnnnnnnnnnnnnnnnnnnnnnnnnnnnnnnnnnnnnnnnnnnnnnnnnnnnnnnnnnnnnnnnnnnnnnnnnnnnnnnnnnnnnnnnnnnnnnnnnnnnnnnnnnnnnnnnnnnnnnnnnnnnnnnnnnnnnnnnnnnnnnnnnnnnnnnnnnnnnnnnnnnnnnnnnnnnnnnnnnnnnnnnnnnnnnnnnnnnnnnnnnnnnnnnnnnnnnnnnnnnnnnnnnnnnnnnnnnnnnnnnnnnnnnnnnnnnnnnnnnnnnnnnnnnnnnnnnnnnnnnnnnnnnnnnnnnnnnnnnnnnnnnnnnnnnnnnnnnnnnnnnnnnnnnnnnnnnnnnnnnnnnnnnnnnnnnnnnnnnnnnnnnnnnnnnnnnnnnnnnnnnnnnnnnnnnnnnnnnnnnnnnnnnnnnnnnnnnnnnnnnnnnnnnnnnnnnnnnnnnnnnnnnnnnnnnnnnnnnnnnnnnnnnnnnnnnnnnnnnnnnnnnnnnnnnnnnnnnnnnnnnnnnnnnnnnnnnnnnnnnnnnnnnnnnnnnnnnnnnnnnnnnnnnnnnnnnnnnnnnnnnnnnnnnnnnnnnnnnnnnnnnnnnnnnnnnnnnnnnnnnnnnnnnnnnnnnnnnnnnnnnnnnnnnnnnnnnnnnnnnnnnnnnnnnnnnnnnnnnnnnnnnnnnnnnnnnnnnnnnnnnnnnnnnnnnnnnnnnnnnnnnnnnnnnnnnnnnnnnnnnnnnnnnnnnnnnnnnnnnnnnnnnnnnnnnnnnnnnnnnnnnnnnnnnnnnnnnnnnnnnnnnnnnnnnnnnnnnnnnnnnnnnnnnnnnnnnnnnnnnnnnnnnnnnnnnnnnnnnnnnnnnnnnnnnnnnnnnnnnnnnnnnnnnnnnnnnnnnnnnnnnnnnnnnnnnnnnnnnnnnnnnnnnnnnnnnnnnnnnnnnnnnnnnnnnnnnnnnnnnnnnnnnnnnnnnnnnnnnnnnnnnnnnnnnnnnnnnnnnnnnnnnnnnnnnnnnnnnnnnnnnnnnnnnnnnnnnnnnnnnnnnnnnnnnnnnnnnnnnnnnnnnnnnnnnnnnnnnnnnnnnnnnnnnnnnnnnnnnnnnnnnnnnnnnnnnnnnnnnnnnnnnnnnnnnnnnnnnnnnnnnnnnnnnnnnnnnnnnnnnnnnnnnnnnnnnnnnnnnnnnnnnnnnnnnnnnnnnnnnnnnnnnnnnnnnnnnnnnnnnnnnnnnnnnnnnnnnnnnnnnnnnnnnnnnnnnnnnnnnnnnnnnnnnnnnnnnnnnnnnnnnnnnnnnnnnnnnnnnnnnnnnnnnnnnnnnnnnnnnnnnnnnnnnnnnnnnnnnnnnnnnnnnnnnnnnnnnnnnnnnnnnnnnnnnnnnnnnnnnnnnnnnnnnnnnnnnnnnnnnnnnnnnnnnnnnnnnnnnnnnnnnnnnnnnnnnnnnnnnnnnnnnnnnnnnnnnnnnnnnnnnnnnnnnnnnnnnnnnnnnnnnnnnnnnnnnnnnnnnnnnnnnnnnnnnnnnnnnnnnnnnnnnnnnnnnnnnnnnnnnnnnnnnnnnnnnnnnnnnnnnnnnnnnnnnnnnnnnnnnnnnnnnnnnnnnnnnnnnnnnnnnnnnnnnnnnnnnnnnnnnnnnnnnnnnnnnnnnnnnnnnnnnnnnnnnnnnnnnnnnnnnnnnnnnnnnnnnnnnnnnnnnnnnnnnnnnnnnnnnnnnnnnnnnnnnnnnnnnnnnnnnnnnnnnnnnnnnnnnnnnnnnnnnnnnnnnnnnnnnnnnnnnnnnnnnnnnnnnnnnnnnnnnnnnnnnnnnnnnnnnnnnnnnnnnnnnnnnnnnnnnnnnnnnnnnnnnnnnnnnnnnnnnnnnnnnnnnnnnnnnnnnnnnnnnnnnnnnnnnnnnnnnnnnnnnnnnnnnnnnnnnnnnnnnnnnnnnnnnnnnnnnnnnnnnnnnnnnnnnnnnnnnnnnnnnnnnnnnnnnnnnnnnnnnnnnnnnnnnnnnnnnnnnnnnnnnnnnnnnnnnnnnnnnnnnnnnnnnnnnnnnnnnnnnnnnnnnnnnnnnnnnnnnnnnnnnnnnnnnnnnnnnnnnnnnnnnnnnnnnnnnnnnnnnnnnnnnnnnnnnnnnnnnnnnnnnnnnnnnnnnnnnnnnnnnnnnnnnnnnnnnnnnnnnnnnnnnnnnnnnnnnnnnnnnnnnnnnnnnnnnnnnnnnnnnnnnnnnnnnnnnnnnnnnnnnnnnnnnnnnnnnnnnnnnnnnnnnnnnnnnnnnnnnnnnnnnnnnnnnnnnnnnnnnnnnnnnnnnnnnnnnnnnnnnnnnnnnnnnnnnnnnnnnnnnnnnnnnnnnnnnnnnnnnnnnnnnnnnnnnnnnnnnnnnnnnnnnnnnnnnnnnnnnnnnnnnnnnnnnnnnnnnnnnnnnnnnnnnnnnnnnnnnnnnnnnnnnnnnnnnnnnnnnnnnnnnnnnnnnnnnnnnnnnnnnnnnnnnnnnnnnnnnnnnnnnnnnnnnnnnnnnnnnnnnnnnnnnnnnnnnnnnnnnnnnnnnnnnnnnnnnnnnnnnnnnnnnnnnnnnnnnnnnnnnnnnnnnnnnnnnnnnnnnnnnnnnnnnnnnnnnnnnnnnnnnnnnnnnnnnnnnnnnnnnnnnnnnnnnnnnnnnnnnnnnnnnnnnnnnnnnnnnnnnnnnnnnnnnnnnnnnnnnnnnnnnnnnnnnnnnnnnnnnnnnnnnnnnnnnnnnnnnnnnnnnnnnnnnnnnnnnnnnnnnnnnnnnnnnnnnnnnnnnnnnnnnnnnnnnnnnnnnnnnnnnnnnnnnnnnnnnnnnnnnnnnnnnnnnnnnnnnnnnnnnnnnnnnnnnnnnnnnnnnnnnnnnnnnnnnnnnnnnnnnnnnnnnnnnnnnnnnnnnnnnnnnnnnnnnnnnnnnnnnnnnnnnnnnnnnnnnnnnnnnnnnnnnnnnnnnnnnnnnnnnnnnnnnnnnnnnnnnnnnnnnnnnnnnnnnnnnnnnnnnnnnnnnnnnnnnnnnnnnnnnnnnnnnnnnnnnnnnnnnnnnnnnnnnnnnnnnnnnnnnnnnnnnnnnnnnnnnnnnnnnnnnnnnnnnnnnnnnnnnnnnnnnnnnnnnnnnnnnnnnnnnnnnnnnnnnnnnnnnnnnnnnnnnnnnnnnnnnnnnnnnnnnnnnnnnnnnnnnnnnnnnnnnnnnnnnnnnnnnnnnnnnnnnnnnnnnnnnnnnnnnnnnnnnnnnnnnnnnnnnnnnnnnnnnnnnnnnnnnnnnnnnnnnnnnnnnnnnnnnnnnnnnnnnnnnnnnnnnnnnnnnnnnnnnnnnnnnnnnnnnnnnnnnnnnnnnnnnnnnnnnnnnnnnnnnnnnnnnnnnnnnnnnnnnnnnnnnnnnnnnnnnnnnnnnnnnnnnnnnnnnnnnnnnnnnnnnnnnnnnnnnnnnnnnnnnnnnnnnnnnnnnnnnnnnnnnnnnnnnnnnnnnnnnnnnnnnnnnnnnnnnnnnnnnnnnnnnnnnnnnnnnnnnnnnnnnnnnnnnnnnnnnnnnnnnnnnnnnnnnnnnnnnnnnnnnnnnnnnnnnnnnnnnnnnnnnnnnnnnnnnnnnnnnnnnnnnnnnnnnnnnnnnnnnnnnnnnnnnnnnnnnnnnnnnnnnnnnnnnnnnnnnnnnnnnnnnnnnnnnnnnnnnnnnnnnnnnnnnnnnnnnnnnnnnnnnnnnnnnnnnnnnnnnnnnnnnnnnnnnnnnnnnnnnnnnnnnnnnnnnnnnnnnnnnnnnnnnnnnnnnnnnnnnnnnnnnnnnnnnnnnnnnnnnnnnnnnnnnnnnnnnnnnnnnnnnnnnnnnnnnnnnnnnnnnnnnnnnnnnnnnnnnnnnnnnnnnnnnnnnnnnnnnnnnnnnnnnnnnnnnnnnnnnnnnnnnnnnnnnnnnnnnnnnnnnnnnnnnnnnnnnnnnnnnnnnnnnnnnnnnnnnnnnnnnnnnnnnnnnnnnnnnnnnnnnnnnnnnnnnnnnnnnnnnnnnnnnnnnnnnnnnnnnnnnnnnnnnnnnnnnnnnnnnnnnnnnnnnnnnnnnnnnnnnnnnnnnnnnnnnnnnnnnnnnnnnnnnnnnnnnnnnnnnnnnnnnnnnnnnnnnnnnnnnnnnnnnnnnnaactcaaaggccgattagtgattgagaaagcgcgtgagcgtgatctggccatgatcgaactcgcgctgaatagactttcacagcgtccgattcttggcgcgcaaagcgcgcgcggctgcggggaaattgccggcgtattggatgtattagtggatggcctgcttgccaaaaaaatcaccatctgcgcatggcaagcagcgattattagcaatttttctgctgtcgaatcttgaaaataggtttaataatcaatgcataacaacagattggatcaagccaccccttgtttgggtgcttactataaataaaaatctggcattgtttcacgtgaaacaatcggtttggtcgtttacgaaaaagggaagttgaatgttccgttctgccgagcaaggtaattttgccgctatcgtcgcccggcacatcgcctcggctgacgcaccgttattgctggaaggcggcacggggatcggtaaaactcgtgcctatctttccgcgctgattcaatccggtttgcgcgtcactatcgtgctgcctacccatcagttgattgaccagatgttggcctcaaacgacttggcggcgacgcgaagcgcggccagtattgccgcctttcgtccagcgcgactatttgaaaattggtcggactatgaagctaataagcgcgccgcaatggccgcaaccgtgatgttttgcacagcggccagcgtcatcattgatcagcgtctgggcggcgaatataacggcgcaacaaaccgcgactatttgttgtttgatgaagccgatcaactaccggacatggccgcattgcaaagcgacttcaccattacacaggcggaactgacagcgttgggcataacactcagctgcgtgactgaagccttgcaagccattttggtcaaagcgccaaacgtggttgagccggaaaccagagccgccgcacgcatcattctcgatgccatcgagcaaccagcgtggtatcagtccgctggtgtaagcgatgaaggcgacattatgctgacgcacagcttgcccggtcgtttactgaaataaatcagcaattcagcccatttcgcctttgtctctgccacgctaaccgtcgccagacagctcaaggattttcaaaattcgatgggcattgcgacggtaagtaacttgtcgggcgtgatagaaccggagcgtcacggtacgcttgatttccactttatgccggtggtggttgataccgaggaatggcgcagtgccgtcatccgaatggcgaacgaagcgcctaaaccggtgctgatcgcgaccacatcacaccgtttttccagcctgctcggcgaacaattatcaggtgcaacggtaaggtcggacagcgaatccaccgctcacgccgccgtgcgcgtttcagccaatgggttttttattgcagccggtgcctgggcagggctggatacgccgttgcgctggcgttcgatcatcgtgccgcgcgtgccatacggacaaccagtggtgatagacggcgaaaccaccacccgttatttcgatgcgcacaacacggcgattcgccgtttgcgccaggtgataggccgtggtttacgttcggcggatgcaatctgtagcgtttacatcctcgatggcagggctgaaaaattaacgggctttgtaccggagcgtttttccgccgcatgggcatcacgcaaaacgtatttggagggggcgaggcaagcgctgattttgagcaggaacgaacgctatcccgccgtccgtcgtgccgcactcaattactatggtcgaaaatgtatggcgtgtagctttgtgccgcgcgtggatgcacaactggacgtgcatcatctcgacccgattgccgaaggtgttcgctgcatcaggattgaggatgtggtcgttttgtgtgcaaactgtcaccgtctggttcacgctacccatccccctttagcactcaccgatctaattgcgctactcaacgcaacaatatgattatccttaacgtaaaactcgcgcagcgacgaactgtacccctcgccctctgggagaggggggacgggggtgagggaacgggcatggcgggttttatcatcaggggtggttacttttccatgcccgttagatttttttcaattaaattcccgttagctaacggttttccctagcagcctgtcggacatgatgttaaatcatccgactttcctggcaagccggaagaatttgttcccgatttcataaaaataaccttcaggttgtcataaaaatccatttttggcgttgaagagcggttgttttcgttctcagcatgctactttcccgcttctttagcccgctaatacaaacattcgcttcaaattccatgccagtgcaacgagattgaactcgccgttgacgtttttcagtccgcgcagcgagaattgccggaatcccagtatcgctttgataatcccgaacacgggttccaccgtacatttgcgcatcgcataaatggcgcgtcccgacatcgtcagaagctgatggcgcatcttttctacttcgctcgcgttttccttgagtgatggtggttcggtgaagcgtgccatcggctcgggatgatgttcttcccggcttacggcaatcagcggggtgaccttctgctcaacacacagcttgacgttgacctcggagaaataccccgtgtctgcgaccagattgccgggcttgcccaactcaactggcatcgccttgagctgtttgatgatttgctcgacctgttgtttgtcgttgcacgcctgcacagtgttggtcgtcacaatcagcatgctgtccatatccaccgcgatctgaccgttgtagcattgatcaaatccgccgcccgccgttttcatgatgcgagattcttcgtcggtaagattgagttgatccttatcctgcgcgccctcgacaggggcgaccggtgctctgccacgcggcggcttaccgctatcgtttgattttgcctcacgcctgtccaccttcgcctgatagtcggcttgttcctgttcaaagcgctctttggcacgcgcttcaattttaactttggcctctgcaattgccttgaggcggtctttacggcgcgtaatttcctcaggcaaattcattccatccggtatcttttggctatccgccgcttcggccaattccatgagcttcgcgacctcgccttgcaattgcgcttccagctgcttgatgtgcccgtaactcaaggcgctgtgtttcgacgcattcgccttgatcttgctgccgtccagcgcgatgttgcccagtttcaacatacccatggtgcgggcgatcatcagcacctgcaccatcaacacttcgatctccttcaggaaacgtttgcggaacgtgttcagtgtgtcgtgatcggggtgttcattcgccgccacaaaacgaaaggcgacagaatcataagtggcatgctccaacttccggctggaaaaaacaccagtggcataaccgtaaatcaggatcgacaacaacaatgcggggtgaaacgcggcgctgccgctgcgaccgtaagcacgctccatctctctcaaatccaactgctcgataatctcaacaataaatcgcgccagatgctgttccggcagccaatcattcatcgatggcggaaacaggaaatccacatctctttgaattgacctgaaattgctcataaaataactttaacctattgaataacaagcataatta

SEQ ID NO: 180 - DNA, 12572 bp, Artificial Sequence
  Synthetic Oligonucleotide
  misc_feature (1)..(8989): n is a, c, g, or t
nnnnnnnnnnnnnnnnnnnnnnnnnnnnnnnnnnnnnnnnnnnnnnnnnnnnnnnnnnnnnnnnnnnnnnnnnnnnnnnnnnnnnnnnnnnnnnnnnnnnnnnnnnnnnnnnnnnnnnnnnnnnnnnnnnnnnnnnnnnnnnnnnnnnnnnnnnnnnnnnnnnnnnnnnnnnnnnnnnnnnnnnnnnnnnnnnnnnnnnnnnnnnnnnnnnnnnnnnnnnnnnnnnnnnnnnnnnnnnnnnnnnnnnnnnnnnnnnnnnnnnnnnnnnnnnnnnnnnnnnnnnnnnnnnnnnnnnnnnnnnnnnnnnnnnnnnnnnnnnnnnnnnnnnnnnnnnnnnnnnnnnnnnnnnnnnnnnnnnnnnnnnnnnnnnnnnnnnnnnnnnnnnnnnnnnnnnnnnnnnnnnnnnnnnnnnnnnnnnnnnnnnnnnnnnnnnnnnnnnnnnnnnnnnnnnnnnnnnnnnnnnnnnnnnnnnnnnnnnnnnnnnnnnnnnnnnnnnnnnnnnnnnnnnnnnnnnnnnnnnnnnnnnnnnnnnnnnnnnnnnnnnnnnnnnnnnnnnnnnnnnnnnnnnnnnnnnnnnnnnnnnnnnnnnnnnnnnnnnnnnnnnnnnnnnnnnnnnnnnnnnnnnnnnnnnnnnnnnnnnnnnnnnnnnnnnnnnnnnnnnnnnnnnnnnnnnnnnnnnnnnnnnnnnnnnnnnnnnnnnnnnnnnnnnnnnnnnnnnnnnnnnnnnnnnnnnnnnnnnnnnnnnnnnnnnnnnnnnnnnnnnnnnnnnnnnnnnnnnnnnnnnnnnnnnnnnnnnnnnnnnnnnnnnnnnnnnnnnnnnnnnnnnnnnnnnnnnnnnnnnnnnnnnnnnnnnnnnnnnnnnnnnnnnnnnnnnnnnnnnnnnnnnnnnnnnnnnnnnnnnnnnnnnnnnnnnnnnnnnnnnnnnnnnnnnnnnnnnnnnnnnnnnnnnnnnnnnnnnnnnnnnnnnnnnnnnnnnnnnnnnnnnnnnnnnnnnnnnnnnnnnnnnnnnnnnnnnnnnnnnnnnnnnnnnnnnnnnnnnnnnnnnnnnnnnnnnnnnnnnnnnnnnnnnnnnnnnnnnnnnnnnnnnnnnnnnnnnnnnnnnnnnnnnnnnnnnnnnnnnnnnnnnnnnnnnnnnnnnnnnnnnnnnnnnnnnnnnnnnnnnnnnnnnnnnnnnnnnnnnnnnnnnnnnnnnnnnnnnnnnnnnnnnnnnnnnnnnnnnnnnnnnnnnnnnnnnnnnnnnnnnnnnnnnnnnnnnnnnnnnnnnnnnnnnnnnnnnnnnnnnnnnnnnnnnnnnnnnnnnnnnnnnnnnnnnnnnnnnnnnnnnnnnnnnnnnnnnnnnnnnnnnnnnnnnnnnnnnnnnnnnnnnnnnnnnnnnnnnnnnnnnnnnnnnnnnnnnnnnnnnnnnnnnnnnnnnnnnnnnnnnnnnnnnnnnnnnnnnnnnnnnnnnnnnnnnnnnnnnnnnnnnnnnnnnnnnnnnnnnnnnnnnnnnnnnnnnnnnnnnnnnnnnnnnnnnnnnnnnnnnnnnnnnnnnnnnnnnnnnnnnnnnnnnnnnnnnnnnnnnnnnnnnnnnnnnnnnnnnnnnnnnnnnnnnnnnnnnnnnnnnnnnnnnnnnnnnnnnnnnnnnnnnnnnnnnnnnnnnnnnnnnnnnnnnnnnnnnnnnnnnnnnnnnnnnnnnnnnnnnnnnnnnnnnnnnnnnnnnnnnnnnnnnnnnnnnnnnnnnnnnnnnnnnnnnnnnnnnnnnnnnnnnnnnnnnnnnnnnnnnnnnnnnnnnnnnnnnnnnnnnnnnnnnnnnnnnnnnnnnnnnnnnnnnnnnnnnnnnnnnnnnnnnnnnnnnnnnnnnnnnnnnnnnnnnnnnnnnnnnnnnnnnnnnnnnnnnnnnnnnnnnnnnnnnnnnnnnnnnnnnnnnnnnnnnnnnnnnnnnnnnnnnnnnnnnnnnnnnnnnnnnnnnnnnnnnnnnnnnnnnnnnnnnnnnnnnnnnnnnnnnnnnnnnnnnnnnnnnnnnnnnnnnnnnnnnnnnnnnnnnnnnnnnnnnnnnnnnnnnnnnnnnnnnnnnnnnnnnnnnnnnnnnnnnnnnnnnnnnnnnnnnnnnnnnnnnnnnnnnnnnnnnnnnnnnnnnnnnnnnnnnnnnnnnnnnnnnnnnnnnnnnnnnnnnnnnnnnnnnnnnnnnnnnnnnnnnnnnnnnnnnnnnnnnnnnnnnnnnnnnnnnnnnnnnnnnnnnnnnnnnnnnnnnnnnnnnnnnnnnnnnnnnnnnnnnnnnnnnnnnnnnnnnnnnnnnnnnnnnnnnnnnnnnnnnnnnnnnnnnnnnnnnnnnnnnnnnnnnnnnnnnnnnnnnnnnnnnnnnnnnnnnnnnnnnnnnnnnnnnnnnnnnnnnnnnnnnnnnnnnnnnnnnnnnnnnnnnnnnnnnnnnnnnnnnnnnnnnnnnnnnnnnnnnnnnnnnnnnnnnnnnnnnnnnnnnnnnnnnnnnnnnnnnnnnnnnnnnnnnnnnnnnnnnnnnnnnnnnnnnnnnnnnnnnnnnnnnnnnnnnnnnnnnnnnnnnnnnnnnnnnnnnnnnnnnnnnnnnnnnnnnnnnnnnnnnnnnnnnnnnnnnnnnnnnnnnnnnnnnnnnnnnnnnnnnnnnnnnnnnnnnnnnnnnnnnnnnnnnnnnnnnnnnnnnnnnnnnnnnnnnnnnnnnnnnnnnnnnnnnnnnnnnnnnnnnnnnnnnnnnnnnnnnnnnnnnnnnnnnnnnnnnnnnnnnnnnnnnnnnnnnnnnnnnnnnnnnnnnnnnnnnnnnnnnnnnnnnnnnnnnnnnnnnnnnnnnnnnnnnnnnnnnnnnnnnnnnnnnnnnnnnnnnnnnnnnnnnnnnnnnnnnnnnnnnnnnnnnnnnnnnnnnnnnnnnnnnnnnnnnnnnnnnnnnnnnnnnnnnnnnnnnnnnnnnnnnnnnnnnnnnnnnnnnnnnnnnnnnnnnnnnnnnnnnnnnnnnnnnnnnnnnnnnnnnnnnnnnnnnnnnnnnnnnnnnnnnnnnnnnnnnnnnnnnnnnnnnnnnnnnnnnnnnnnnnnnnnnnnnnnnnnnnnnnnnnnnnnnnnnnnnnnnnnnnnnnnnnnnnnnnnnnnnnnnnnnnnnnnnnnnnnnnnnnnnnnnnnnnnnnnnnnnnnnnnnnnnnnnnnnnnnnnnnnnnnnnnnnnnnnnnnnnnnnnnnnnnnnnnnnnnnnnnnnnnnnnnnnnnnnnnnnnnnnnnnnnnnnnnnnnnnnnnnnnnnnnnnnnnnnnnnnnnnnnnnnnnnnnnnnnnnnnnnnnnnnnnnnnnnnnnnnnnnnnnnnnnnnnnnnnnnnnnnnnnnnnnnnnnnnnnnnnnnnnnnnnnnnnnnnnnnnnnnnnnnnnnnnnnnnnnnnnnnnnnnnnnnnnnnnnnnnnnnnnnnnnnnnnnnnnnnnnnnnnnnnnnnnnnnnnnnnnnnnnnnnnnnnnnnnnnnnnnnnnnnnnnnnnnnnnnnnnnnnnnnnnnnnnnnnnnnnnnnnnnnnnnnnnnnnnnnnnnnnnnnnnnnnnnnnnnnnnnnnnnnnnnnnnnnnnnnnnnnnnnnnnnnnnnnnnnnnnnnnnnnnnnnnnnnnnnnnnnnnnnnnnnnnnnnnnnnnnnnnnnnnnnnnnnnnnnnnnnnnnnnnnnnnnnnnnnnnnnnnnnnnnnnnnnnnnnnnnnnnnnnnnnnnnnnnnnnnnnnnnnnnnnnnnnnnnnnnnnnnnnnnnnnnnnnnnnnnnnnnnnnnnnnnnnnnnnnnnnnnnnnnnnnnnnnnnnnnnnnnnnnnnnnnnnnnnnnnnnnnnnnnnnnnnnnnnnnnnnnnnnnnnnnnnnnnnnnnnnnnnnnnnnnnnnnnnnnnnnnnnnnnnnnnnnnnnnnnnnnnnnnnnnnnnnnnnnnnnnnnnnnnnnnnnnnnnnnnnnnnnnnnnnnnnnnnnnnnnnnnnnnnnnnnnnnnnnnnnnnnnnnnnnnnnnnnnnnnnnnnnnnnnnnnnnnnnnnnnnnnnnnnnnnnnnnnnnnnnnnnnnnnnnnnnnnnnnnnnnnnnnnnnnnnnnnnnnnnnnnnnnnnnnnnnnnnnnnnnnnnnnnnnnnnnnnnnnnnnnnnnnnnnnnnnnnnnnnnnnnnnnnnnnnnnnnnnnnnnnnnnnnnnnnnnnnnnnnnnnnnnnnnnnnnnnnnnnnnnnnnnnnnnnnnnnnnnnnnnnnnnnnnnnnnnnnnnnnnnnnnnnnnnnnnnnnnnnnnnnnnnnnnnnnnnnnnnnnnnnnnnnnnnnnnnnnnnnnnnnnnnnnnnnnnnnnnnnnnnnnnnnnnnnnnnnnnnnnnnnnnnnnnnnnnnnnnnnnnnnnnnnnnnnnnnnnnnnnnnnnnnnnnnnnnnnnnnnnnnnnnnnnnnnnnnnnnnnnnnnnnnnnnnnnnnnnnnnnnnnnnnnnnnnnnnnnnnnnnnnnnnnnnnnnnnnnnnnnnnnnnnnnnnnnnnnnnnnnnnnnnnnnnnnnnnnnnnnnnnnnnnnnnnnnnnnnnnnnnnnnnnnnnnnnnnnnnnnnnnnnnnnnnnnnnnnnnnnnnnnnnnnnnnnnnnnnnnnnnnnnnnnnnnnnnnnnnnnnnnnnnnnnnnnnnnnnnnnnnnnnnnnnnnnnnnnnnnnnnnnnnnnnnnnnnnnnnnnnnnnnnnnnnnnnnnnnnnnnnnnnnnnnnnnnnnnnnnnnnnnnnnnnnnnnnnnnnnnnnnnnnnnnnnnnnnnnnnnnnnnnnnnnnnnnnnnnnnnnnnnnnnnnnnnnnnnnnnnnnnnnnnnnnnnnnnnnnnnnnnnnnnnnnnnnnnnnnnnnnnnnnnnnnnnnnnnnnnnnnnnnnnnnnnnnnnnnnnnnnnnnnnnnnnnnnnnnnnnnnnnnnnnnnnnnnnnnnnnnnnnnnnnnnnnnnnnnnnnnnnnnnnnnnnnnnnnnnnnnnnnnnnnnnnnnnnnnnnnnnnnnnnnnnnnnnnnnnnnnnnnnnnnnnnnnnnnnnnnnnnnnnnnnnnnnnnnnnnnnnnnnnnnnnnnnnnnnnnnnnnnnnnnnnnnnnnnnnnnnnnnnnnnnnnnnnnnnnnnnnnnnnnnnnnnnnnnnnnnnnnnnnnnnnnnnnnnnnnnnnnnnnnnnnnnnnnnnnnnnnnnnnnnnnnnnnnnnnnnnnnnnnnnnnnnnnnnnnnnnnnnnnnnnnnnnnnnnnnnnnnnnnnnnnnnnnnnnnnnnnnnnnnnnnnnnnnnnnnnnnnnnnnnnnnnnnnnnnnnnnnnnnnnnnnnnnnnnnnnnnnnnnnnnnnnnnnnnnnnnnnnnnnnnnnnnnnnnnnnnnnnnnnnnnnnnnnnnnnnnnnnnnnnnnnnnnnnnnnnnnnnnnnnnnnnnnnnnnnnnnnnnnnnnnnnnnnnnnnnnnnnnnnnnnnnnnnnnnnnnnnnnnnnnnnnnnnnnnnnnnnnnnnnnnnnnnnnnnnnnnnnnnnnnnnnnnnnnnnnnnnnnnnnnnnnnnnnnnnnnnnnnnnnnnnnnnnnnnnnnnnnnnnnnnnnnnnnnnnnnnnnnnnnnnnnnnnnnnnnnnnnnnnnnnnnnnnnnnnnnnnnnnnnnnnnnnnnnnnnnnnnnnnnnnnnnnnnnnnnnnnnnnnnnnnnnnnnnnnnnnnnnnnnnnnnnnnnnnnnnnnnnnnnnnnnnnnnnnnnnnnnnnnnnnnnnnnnnnnnnnnnnnnnnnnnnnnnnnnnnnnnnnnnnnnnnnnnnnnnnnnnnnnnnnnnnnnnnnnnnnnnnnnnnnnnnnnnnnnnnnnnnnnnnnnnnnnnnnnnnnnnnnnnnnnnnnnnnnnnnnnnnnnnnnnnnnnnnnnnnnnnnnnnnnnnnnnnnnnnnnnnnnnnnnnnnnnnnnnnnnnnnnnnnnnnnnnnnnnnnnnnnnnnnnnnnnnnnnnnnnnnnnnnnnnnnnnnnnnnnnnnnnnnnnnnnnnnnnnnnnnnnnnnnnnnnnnnnnnnnnnnnnnnnnnnnnnnnnnnnnnnnnnnnnnnnnnnnnnnnnnnnnnnnnnnnnnnnnnnnnnnnnnnnnnnnnnnnnnnnnnnnnnnnnnnnnnnnnnnnnnnnnnnnnnnnnnnnnnnnnnnnnnnnnnnnnnnnnnnnnnnnnnnnnnnnnnnnnnnnnnnnnnnnnnnnnnnnnnnnnnnnnnnnnnnnnnnnnnnnnnnnnnnnnnnnnnnnnnnnnnnnnnnnnnnnnnnnnnnnnnnnnnnnnnnnnnnnnnnnnnnnnnnnnnnnnnnnnnnnnnnnnnnnnnnnnnnnnnnnnnnnnnnnnnnnnnnnnnnnnnnnnnnnnnnnnnnnnnnnnnnnnnnnnnnnnnnnnnnnnnnnnnnnnnnnnnnnnnnnnnnnnnnnnnnnnnnnnnnnnnnnnnnnnnnnnnnnnnnnnnnnnnnnnnnnnnnnnnnnnnnnnnnnnnnnnnnnnnnnnnnnnnnnnnnnnnnnnnnnnnnnnnnnnnnnnnnnnnnnnnnnnnnnnnnnnnnnnnnnnnnnnnnnnnnnnnnnnnnnnnnnnnnnnnnnnnnnnnnnnnnnnnnnnnnnnnnnnnnnnnnnnnnnnnnnnnnnnnnnnnnnnnnnnnnnnnnnnnnnnnnnnnnnnnnnnnnnnnnnnnnnnnnnnnnnnnnnnnnnnnnnnnnnnnnnnnnnnnnnnnnnnnnnnnnnnnnnnnnnnnnnnnnnnnnnnnnnnnnnnnnnnnnnnnnnnnnnnnnnnnnnnnnnnnnnnnnnnnnnnnnnnnnnnnnnnnnnnnnnnnnnnnnnnnnnnnnnnnnnnnnnnnnnnnnnnnnnnnnnnnnnnnnnnnnnnnnnnnnnnnnnnnnnnnnnnnnnnnnnnnnnnnnnnnnnnnnnnnnnnnnnnnnnnnnnnnnnnnnnnnnnnnnnnnnnnnnnnnnnnnnnnnnnnnnnnnnnnnnnnnnnnnnnnnnnnnnnnnnnnnnnnnnnnnnnnnnnnnnnnnnnnnnnnnnnnnnnnnnnnnnnnnnnnnnnnnnnnnnnnnnnnnnnnnnnnnnnnnnnnnnnnnnnnnnnnnnnnnnnnnnnnnnnnnnnnnnnnnnnnnnnnnnnnnnnnnnnnnnnnnnnnnnnnnnnnnnnnnnnnnnnnnnnnnnnnnnnnnnnnnnnnnnnnnnnnnnnnnnnnnnnnnnnnnnnnnnnnnnnnnnnnnnnnnnnnnnnnnnnnnnnnnnnnnnnnnnnnnnnnnnnnnnnnnnnnnnnnnnnnnnnnnnnnnnnnnnnnnnnnnnnnnnnnnnnnnnnnnnnnnnnnnnnnnnnnnnnnnnnnnnnnnnnnnnnnnnnnnnnnnnnnnnnnnnnnnnnnnnnnnnnnnnnnnnnnnnnnnnnnnnnnnnnnnnnnnnnnnnnnnnnnnnnnnnnnnnnnnnnnnnnnnnnnnnnnnnnnnnnnnnnnnnnnnnnnnnnnnnnnnnnnnnnnnnnnnnnnnnnnnnnnnnnnnnnnnnnnnnnnnnnnnnnnnnnnnnnnnnnnnnnnnnnnnnnnnnnnnnnnnnnnnnnnnnnnnnnnnnnnnnnnnnnnnnnnnnnnnnnnnnnnnnnnnnnnnnnnnnnnnnnnnnnnnnnnnnnnnnnnnnnnnnnnnnnnnnnnnnnnnnnnnnnnnnnnnnnnnnnnnnnnnnnnnnnnnnnnnnnnnnnnnnnnnnnnnnnnnnnnnnnnnnnnnnnnnnnnnnnnnnnnnnnnnnnnnnnnnnnnnnnnnnnnnnnnnnnnnnnnnnnnnnnnnnnnnnnnnnnnnnnnnnnnnnnnnnnnnnnnnnnnnnnnnnnnnnnnnnnnnnnnnnnnnnnnnnnnnnnnnnnnnnnnnnnnnnnnnnnnnnnnnnnnnnnnnnnnnnnnnnnnnnnnnnnnnnnnnnnnnnnnnnnnnnnnnnnnnnnnnnnnnnnnnnnnnnnnnnnnnnnnnnnnnnnnnnnnnnnnnnnnnnnnnnnnnnnnnnnnnnnnnnnnnnnnnnnnnnnnnnnnnnnnnnnnnnnnnnnnnnnnnnnnnnnnnnnnnnnnnnnnnnnnnnnnnnnnnnnnnnnnnnnnnnnnnnnnnnnnnnnnnnnnnnnnnnnnnnnnnnnnnnnnnnnnnnnnnnnnnnnnnnnnnnnnnnnnnnnnnnnnnnnnnnnnnnnnnnnnnnnnnnnnnnnnnnnnnnnnnnnnnnnnnnnnnnnnnnnnnnnnnnnnnnnnnnnnnnnnnnnnnnnnnnnnnnnnnnnnnnnnnnnnnnnnnnnnnnnnnnnnnnnnnnnnnnnnnnnnnnnnnnnnnnnnnnnnnnnnnnnnnnnnnnnnnnnnnnnnnnnnnnnnnnnnnnnnnnnnnnnnnnnnnnnnnnnnnnnnnnnnnnnnnnnnnnnnnnnnnnnnnnnnnnnnnnnnnnnnnnnnnnnnnnnnnnnnnnnnnnnnnnnnnnnnnnnnnnnnnnnnnnnnnnnnnnnnnnnnnnnnnnnnnnnnnnnnnnnnnnnnnnnnnnnnnnnnnnnnnnnnnnnnnnnnnnnnnnnnnnnnnnnnnnnnnnnnnnnnnnnnnnnnnnnnnnnnnnnnnnnnnnnnnnnnnnnnnnnnnnnnnnnnnnnnnnnnnnnnnnnnnnnnnnnnnnnnnnnnnnnnnnnnnnnnnnnnnnnnnnnnnnnnnnnnnnnnnnnnnnnnnnnnnnnnnnnnnnnnnnnnnnnnnnnnnnnnnnnnnnnnnnnnnnnnnnnnnnnnnnnnnnnnnnnnnnnnnnnnnnnnnnnnnnnnnnnnnnnnnnnnnnnnnnnnnnnnnnnnnnnnnnnnnnnnnnnnnnnnnnnnnnnnnnnnnnnnnnnnnnnnnnnnnnnnnnnnnnnnnnnnnnnnnnnnnnnnnnnnnnnnnnnnnnnnnnnnnnnnnnnnnnnnnnnnnnnnnnnnnnnnnnnnnnnnnnnnnnnnnnnnnnnnnnnnnnnnnnnnnnnnnnnnnnnnnnnnnnnnnnnnnnnnnnnnnnnnnnnnnnnnnnnnnnnnnnnnnnnnnnnnnnnnnnnnnnnnnnnnnnnnnnnnnnnnnnnnnnnngaagagtaccgtgatgcgatggatggcatgaccaattcttctcggaccatacttacgcattacgccatgcctgcgggtgtacagtggacgggacgtttaattattacaaactccactgaaaaagatatcgatgctctgtgtggagccttagatcgtttcagtagctatccgatgattggtgcccagcatgcccgtggatgcggtgagattagtggtattgctaatatagaaacagatagaaggctggttaaaagaattagttttggtggctttgcgccagcacaaatagacaacgtagcctaggatgaaggagctaatcatacattttttatattggaaatgcggttaaagttaacttttctaaatggttatgaaaactctgttgtggcccccattaatttgtggggcaactgaaactcgaaggtctgtattgtacggtcatagaaggttgtggcccccatttatttgtggggcaactgaaaccataaccctgacaccttctattggactaatgctgcggcccccagtagtttgaggggcaactgaaacatggagcaacaactaataaaaacactactggttgtggcccccattaatttgtggggcaactgaaacaagtcggtggccagttgggtgttgtaggatgttgtggcccccattaatttgtggggcaactgaaacgatggcttcacgcaagttatagcagccgatgttgtggcccccattaatttgtggggcaactgaaactctgcaccgaagcggatcttttgccgccccgttgtggcccccattaatttgtggggcaactgaaaccgccgcgtacccggccttatttctgcgatgttgtggcccccattaatttgtggggcaactgaaacaagatggcttgcccaggtgcgccagcctgccgttgtggcccccatcgatatgtggggcaaaataaagagagccaagcatgctagttttggctctctttaacgtaacgcaccatatgaagttggatttaactagtgtttaattcacacttttggttaggtttactgattcaaagtggaaaatgggggatgatcagaatttttagatcggaagagcaagatcagttttttaagctgatccaaaaacatatagaaacccctgatgcacctttactgctggaaggagccactggactgggtaaaacgctgccgttccttgttgccgcagcggtaagtggtaaaaaggttgcgatagttttcccaacccatcagctgatcaatcaggctttggatagctgggacttaaaaacaacacttgcggcctatcccgcagtgattgtgaaggcctttagacctaggtcatatttcgaagcctcacctgcagattacgcggcacacaaacaagaagcgttagacgcagacataatgttctgcacctcggtatccgtgatcatagaccaaagactcaatggcgattataatggctcaacagacagagatgtgattatctttgatgaggcagatcagcttcctcaatttgctgctttgacctctgatatttcactcagcagaattgatctaagaagcctcagaattaatgaatcttcgccaaaagagaccattgatgcaatcttcaaaaagaagacattgccgtcagaaatcagggcaaaggcgcgcttgatagaagaagcattaggccttggcgatgtttggtttattaaggtgggttttgcggatgatggagccttagaggtgcgctcacgcttgcctggaaggctgttaaaacgcgtatccaaccgagcatcgacaatttttataagcgcaaccctgtctgtaaatggtacatttaaagacttttgtcgtgcgatgggaatagaagagaagagtagactgtctgcaatagttgagcccaagaaacatggggacctacaatttgattttataactgatgaagagcttggaagcgatgcttggctggacgcagtttgtgaagcaattgaatatgccgatcatcctgtactggtcgctacaccgtcgcattctttagctcaacagattgcaagtaatgctactcaggcgaccttaagagccgcggatgaaacaacgtcgcaagctgctgcgcgtatgggagatacaaaggttctcatagcagcgggtgcatgggcagggcttgatacgccggtacaatggaaaacggttgtggtacctagaataccctacactgggccaaacaatctcagagagttttggtatgatgatgaagaggactttggcgtccagaagccagatccgatgtcatcttttatagattcaaaaaatgctgcggctcgtaggctgaagcaggtctttggcagaggcttaagaacacccgatgccgaatgctcaatcatactttgcgacccgcgaattgatcgttttaataagattgcaccagccagatttcagaaaacgtattttgagggaatggccatttcagttaatgcaacaaaatctgaacgttcgcctctgcttagaaaagcagcactcgctcattatggtgaaacctgcatggcctgtgactttattcctgagtctttaaggcaattagaaatccaccatcttgagccccttgctgatcgtgggccaagccacacgaccctgaatgacgtcgtggtattgtgcagaaactgccacggtttggcacatgacactaatccgcccatacagttgccagagcttaaattacgatctcaaaagttgaaaaagaaaagacctggattgtccatgatttaaagatttcgattttcctgtacgctggtatccattaagttaaccagtcaatttggctgatcccaaacaacaattgtttgatgaatagccccagttttttgccgtactgacataccactgacacgtgactgcgcatacgcactggctaagtaactaggttttaacgaaattggatagaattttgttaaaacggaatgtcgtcgttatcaaacgaattaatatccgcaattggtggagtgttggcgttttggaaattaactgactgcgagctgttagcgtcgttaccattgcgtgaaactttccacgccttaacatccgtgtaccaacgcccattatattctcggctctccagatcgattgaaacctcaacggtttctccctgctggatattaaactgatcaatcttatcaccccaagccatgaagcagactttcttggggtattgggcctcagtctccagaacatactcttgcttgcgccattctccattcgctgactgtccggatttaacttccaatatttcaacaatcttccctgaaatttccaaagtcattacctttcctgcatccattgtccctagttactttcgtatcaaactaggcgatctgaataaaaggccaagcgtattcttctgaatcttgtggattgagttgaagctacgcatgtgcagtaaattgtaggtatggatattcagtttgccaaatacaaagagcttatcgagcagcaattagaggggcttactgcagaggatgtgctgggccagagcgcacagaagactgtcgagttggaccagcagtccgttggaaggctttcgcgcatggacgcgctgcaatcccaag

SEQ ID NO: 181 - DNA, 12548 bp, Artificial Sequence
  Synthetic Oligonucleotide
  misc_feature (1)..(2588): n is a, c, g, or t
nnnnnnnnnnnnnnnnnnnnnnnnnnnnnnnnnnnnnnnnnnnnnnnnnnnnnnnnnnnnnnnnnnnnnnnnnnnnnnnnnnnnnnnnnnnnnnnnnnnnnnnnnnnnnnnnnnnnnnnnnnnnnnnnnnnnnnnnnnnnnnnnnnnnnnnnnnnnnnnnnnnnnnnnnnnnnnnnnnnnnnnnnnnnnnnnnnnnnnnnnnnnnnnnnnnnnnnnnnnnnnnnnnnnnnnnnnnnnnnnnnnnnnnnnnnnnnnnnnnnnnnnnnnnnnnnnnnnnnnnnnnnnnnnnnnnnnnnnnnnnnnnnnnnnnnnnnnnnnnnnnnnnnnnnnnnnnnnnnnnnnnnnnnnnnnnnnnnnnnnnnnnnnnnnnnnnnnnnnnnnnnnnnnnnnnnnnnnnnnnnnnnnnnnnnnnnnnnnnnnnnnnnnnnnnnnnnnnnnnnnnnnnnnnnnnnnnnnnnnnnnnnnnnnnnnnnnnnnnnnnnnnnnnnnnnnnnnnnnnnnnnnnnnnnnnnnnnnnnnnnnnnnnnnnnnnnnnnnnnnnnnnnnnnnnnnnnnnnnnnnnnnnnnnnnnnnnnnnnnnnnnnnnnnnnnnnnnnnnnnnnnnnnnnnnnnnnnnnnnnnnnnnnnnnnnnnnnnnnnnnnnnnnnnnnnnnnnnnnnnnnnnnnnnnnnnnnnnnnnnnnnnnnnnnnnnnnnnnnnnnnnnnnnnnnnnnnnnnnnnnnnnnnnnnnnnnnnnnnnnnnnnnnnnnnnnnnnnnnnnnnnnnnnnnnnnnnnnnnnnnnnnnnnnnnnnnnnnnnnnnnnnnnnnnnnnnnnnnnnnnnnnnnnnnnnnnnnnnnnnnnnnnnnnnnnnnnnnnnnnnnnnnnnnnnnnnnnnnnnnnnnnnnnnnnnnnnnnnnnnnnnnnnnnnnnnnnnnnnnnnnnnnnnnnnnnnnnnnnnnnnnnnnnnnnnnnnnnnnnnnnnnnnnnnnnnnnnnnnnnnnnnnnnnnnnnnnnnnnnnnnnnnnnnnnnnnnnnnnnnnnnnnnnnnnnnnnnnnnnnnnnnnnnnnnnnnnnnnnnnnnnnnnnnnnnnnnnnnnnnnnnnnnnnnnnnnnnnnnnnnnnnnnnnnnnnnnnnnnnnnnnnnnnnnnnnnnnnnnnnnnnnnnnnnnnnnnnnnnnnnnnnnnnnnnnnnnnnnnnnnnnnnnnnnnnnnnnnnnnnnnnnnnnnnnnnnnnnnnnnnnnnnnnnnnnnnnnnnnnnnnnnnnnnnnnnnnnnnnnnnnnnnnnnnnnnnnnnnnnnnnnnnnnnnnnnnnnnnnnnnnnnnnnnnnnnnnnnnnnnnnnnnnnnnnnnnnnnnnnnnnnnnnnnnnnnnnnnnnnnnnnnnnnnnnnnnnnnnnnnnnnnnnnnnnnnnnnnnnnnnnnnnnnnnnnnnnnnnnnnnnnnnnnnnnnnnnnnnnnnnnnnnnnnnnnnnnnnnnnnnnnnnnnnnnnnnnnnnnnnnnnnnnnnnnnnnnnnnnnnnnnnnnnnnnnnnnnnnnnnnnnnnnnnnnnnnnnnnnnnnnnnnnnnnnnnnnnnnnnnnnnnnnnnnnnnnnnnnnnnnnnnnnnnnnnnnnnnnnnnnnnnnnnnnnnnnnnnnnnnnnnnnnnnnnnnnnnnnnnnnnnnnnnnnnnnnnnnnnnnnnnnnnnnnnnnnnnnnnnnnnnnnnnnnnnnnnnnnnnnnnnnnnnnnnnnnnnnnnnnnnnnnnnnnnnnnnnnnnnnnnnnnnnnnnnnnnnnnnnnnnnnnnnnnnnnnnnnnnnnnnnnnnnnnnnnnnnnnnnnnnnnnnnnnnnnnnnnnnnnnnnnnnnnnnnnnnnnnnnnnnnnnnnnnnnnnnnnnnnnnnnnnnnnnnnnnnnnnnnnnnnnnnnnnnnnnnnnnnnnnnnnnnnnnnnnnnnnnnnnnnnnnnnnnnnnnnnnnnnnnnnnnnnnnnnnnnnnnnnnnnnnnnnnnnnnnnnnnnnnnnnnnnnnnnnnnnnnnnnnnnnnnnnnnnnnnnnnnnnnnnnnnnnnnnnnnnnnnnnnnnnnnnnnnnnnnnnnnnnnnnnnnnnnnnnnnnnnnnnnnnnnnnnnnnnnnnnnnnnnnnnnnnnnnnnnnnnnnnnnnnnnnnnnnnnnnnnnnnnnnnnnnnnnnnnnnnnnnnnnnnnnnnnnnnnnnnnnnnnnnnnnnnnnnnnnnnnnnnnnnnnnnnnnnnnnnnnnnnnnnnnnnnnnnnnnnnnnnnnnnnnnnnnnnnnnnnnnnnnnnnnnnnnnnnnnnnnnnnnnnnnnnnnnnnnnnnnnnnnnnnnnnnnnnnnnnnnnnnnnnnnnnnnnnnnnnnnnnnnnnnnnnnnnnnnnnnnnnnnnnnnnnnnnnnnnnnnnnnnnnnnnnnnnnnnnnnnnnnnnnnnnnnnnnnnnnnnnnnnnnnnnnnnnnnnnnnnnnnnnnnnnnnnnnnnnnnnnnnnnnnnnnnnnnnnnnnnnnnnnnnnnnnnnnnnnnnnnnnnnnnnnnnnnnnnnnnnnnnnnnnnnnnnnnnnnnnnnnnnnnnnnnnnnnnnnnnnnnnnnnnnnnnnnnnnnnnnnnnnnnnnnnnnngcctcctcgcatgggggcgcggccaaccgggtcagatcgggaacgaagcagccctaaccgaatgcctccagtgccggggtcaggctcgtcacctttttcagggatgccctttatccatgggaatcccagccagatagggccttttgagcagcgaagtgtgtcactctgatgtgtcacttcgcgcagctcacgaggtgtcccgatggcaaaacttacaggtctgatgaagcgcggtggaacctaccacctgcgcgtaatggtcccgcttgacctccgcccagctcacgaggggcgcagcaaaatcatcagagccttgaacacctccaatcggcacgaagcgtcactcaaaggccacgccttgagggctcaatggcttgcacgcttcgaggacctgcgaggacgacccacggacgcgcacagcgttgcgctaccgagcagcgaacctgtcgcgacgcctccctctgccaaacaacaccatcccagccttcgacaggtcttcaatgcttggcaaagcgtgggggagcgaacacgagacagtgttcaggcttgcaacagggcgctaaagcagtttgagtccacggagggagagttgcccgtcaaggacattgcgtatgagcacggtgctcgatttcgcacacacctcctcggcagcggcttggcccagaagaccgctcgcgactacttcgtttgggtccatgcccttctacgtttcgcgaagaccgacatggccaccctcgcccgcgacccttgggctcgcttgaacatcgagaagcctcggaacacgcctcgtcgcccttggcggacagacgaacttcagcgcttgtttgcgcaggacctgttcaccagctatcggttgcccacggacccgaaggcaggcaaacacgcagcctactggattccactccttggcctcttcaccggggcgcgggtgagcgagctagcgcagcttcggattggtgacgtatgccggggcccatcttccacatggctggccatcaccgatgaaggcgacggtcagcagctcaagacctccagcagcaagcgtcaagtacccatccacccggagctgatacgcctggggttcatgtcgtacgtcaccgatgttggcgggcgccctgaggaccctctatggccccacctcccactccggaagggtaagcctggaggctacttcagccagtggttcggtgaattccgccgcaaggtgattgatgagcgctacccggacttccactgcttcagacacacggtcaggacacaactggcagaggctcgttacccagagtcggtcaaggaccgaatcacaggacatgccgtaaaaggcagcgtgggcacacgcacctatgagcacaccactcacctcatcgaggaggcagtccgttcagtgcagtacccagacctcagcctcccaagaatctatcgtccgtagcccgtatattcgctgcccatgaaatgcgacgcgccatctgaagaacaagcaggcccgagaggcccatccacgtccaccgaagtccacccagtcgtgggtcaggtgaacgtcatgaagctcgcgcttcgcgcccttgagattgtggtcagcgacttgacgggctatggcaacacggtgtcagagtggcatcgcgcttcgctcctggagctgctacagaccttcgcgtcgtattgctcaggcagcgagacagggcgtcacacctttgggctcccgaccggcatggggaagacatccgccattgcagcctttgtgacggcgctgcacgaactcggttacgaggttccggtggccatcgctgcctcgcgtgtgcaagcaatcactgacctcaaacagaagctgattgcgcacggcatccctgaagaatggattggaataaagcacgagtcttgggacgcggaagaaccatcgacgggtaacgactctcgactgattcagcttgtgacgcatgcccgtgtgcgtagcggagccgatttcaacttgtacggcgagcacaaaggcaggccgcgccccctcatgatttgggatgagagcctgctacgttcgaatgccaaggtgttcccactcacagcacttcggcaaggcgaagcgaccttgttcattgaactggagggtaagactgacgctgtgtcgctcggcctccaccagcgcatccgcgatacggtccaagctgtacagaatcggtgcgcggaactcgacctacaaggcgaccccgaaaagacgggactgccactcacgctgcagccactggagcaacccgttttagaggcgtacacatcagcgctcaggcgcaccgctcgaacactcaaagaccgtgccctactcctttccgacttcattgaggccgcacaggggcccatgcaggccatcaaggtcgagcaaggggcaggcgcagtggccatctctgaagccatccctcctaagctgcgaaacatcgtcatcctcgatgcatcgaccgctgttcggaagatcgttcatgcggaccgctcggtacgtcccgtagagaacttccgaccagaacaccagaagaacttttctcaggtgcgaattcaccagattctctctggcggggggcgctcgacgatagaggcgtacttcaaaggtggtgaagcatcaccggtgagcatggaggtcattgacatcgttcgtgaacacatcgccaccgctcgggccttcctcatcttcacattcaagaaggcacgcatcgacctcgtggatgccttgggccgggacatgacccgcgcaggcatcaacttgagggagacaaccacagagggcaaggctcgattcgagttcctcacttgggggaaccatgagggtatcaacggcttcgagcactgcgatattgtcatcatggtgggaacaatccaccgtggtcacctcgacctcgcgggcacactcaaggcgcagctgcacgacctctctgcgcccaccccatccgagcgactgcacgaactggctgagagcgaagtggcccatgccatctatcaaggagccagccgcggaagctgccgcagagtcaataacggtctagcaggggcaatggacctttacatcatccatcgatctaaagagcttgctcaaaccctggcacccgttatgccgaacgccatctggtcgtacagggagcctaagcacattagacgagcgcatgaggacgccaagacccaagtgatgcttgagcaggtcgttgtgttccttcatagcttgcctgaccatgtgcacaaagtgagcacaacagaggccaagaagcagatgggcctgaccggctcaaccaaagctgagacgatgctttttacgagggcgtgcaggcttctgcatatcgatgagcacggatgggagcatgaaggccgctcgttcgttagagcggcaagcgacgcactctctgggcacacctaagcgacatgcatccttatatttagggttgatgtggtttagacactagtgatgccgcgctgcagtcctcagttgatgtggacacttcattggtcatgctggaagtggacaccaatgggggaactgggctcaatcagcgagccacctgtatacccttcaacgcagcctctcaggctgcatcccgagctccaccctcgcatcccgaaggcgtacctccctcatccacctgggcagccctgtctgggtaagcgtgtctggcggaaccgggccacggcataggaacgtcacaggttgacagtcgattgttccgtactcgtgccaagaagccgatacggccgaaggttgctcgttcaacatgaggcgcctgagcgctgccctgagccttcgtgtcatgttcggatgctggaggaggtcccaaaaatcgctacaaatttgtcaggtgccatctgaccgctccgtgtgtctagccttcccccgtgcccccccttcgacagctctgcaagggcctatgacatgccgagagccggcgcccttttgggcccgcaaacggcgcactctggacgagacgactcgcgccctccttagcaacggcacccagaatcacaatccgggtctcgctggttcgttttaggtacacctttgtggatgttcagccacatggttcgctttccgttgattgacaactcaaacggaaccaatatcatgcgaaccatcctaacgaaaccagcaccaaaccatgaccttcctccgtgcgtacctcagagcctccacagaggaccaagacgcctcccgtgcccgcgctgacctggagcacttcgcctctgagcggggcctgaaggtggccgcttggtacgtggagaacgagtcaggggccaagctggagcgccccgagttgttccgcctcatcgctgacgcccacgagggggatgtgctgctggtggagcaggtggaccggctctcccggttgaacacccaggactgggacacactcaagcagcgcttgagcgataagcgcattcgggtggtggccttggacctgcccacttcctggatgggcgcaggggcgaacctggatgaaaccacacaggccctcctgggcgccgtgaaccggatgctcctggacgtgctggcagttgtggcacgcaaggactacaccgaccgccgcaggcgtcaggcccaaggcatcgagaaggccaagacagcggggctctacaaagggcgcaaggcagacaccgagaggcacgcagtcatcgcggacatgctggacaggggaatgtcctggtcccaggtgtgcgccgctacgggggccagtcggtccacggtcaagcgggtggtggatgggcagaaagctcaagcctgacgcccccggagcgccctcgcccccccatctgtcccctttcgaggttcgccagcgcaccaccgcgccgccacaaaggctccctatacttggtggatacagggagaggcgagtcacaagcgattcgtcatgaataaatcgtggagaaatttaccctccgggccacgctacgttcgcccatcatccgcagggggtttgtgacgctggatgcgttgctcatggccttgctcgaacgtggggacgtttcagacctgattcgttgtgagaacgagctttacttcgctagcgcaggattcgcgtcagcacaggggttgaagcaacaagcatcgtttgtggccagcctccgtcctgagcacaccaccgagtggctggaggtcatcaagccaaacacaagcaccccaggcatcgcctcccagcctgggagcaagctcaatgatgtgaagattggcttgtctcggcagagggaaggcggcaacgtcctgaacggctacgaggccatagtcacaccgaccatcgagtggtacggcacgggacacccccaagcgattctgggtgttgtcagcgagacgcctttcattggcaagaagcgcacggcaggatatggcgaggtcgtggaatgggccatcgagcccggagacctcgacggtatctgcggccactttggcgaaccgctacgacctatcccgacagaacgatggtcacacgggggagactggatacccgtggaggcagcttggaaggccccctactgggatgtcaggaacaggaccaagtgctacgttccggaggctgcatgaacggcgcggagttcttcatgcagcatgccgggtacaggctactccccccggacaggaaaaccgacgatgcagtccacgatgcggatgtgttgtttggtttgtctttaccactcaacacaggcgccacgctccggctgtcgagttgctggatggtggtcaccccctcgtgggtcgagaccagcttcaaggcaccaacctccacggcattccgtgtggggggtgagcgtgcagtcgccatcctcgccgcgctgaaatcggaagagccatgcctgctgcttgcgctcggtaaaaggacccttgcggcacgcgacctgttcgtgacctacgacccacgggcaacccgactctgtagcgagggattcacaaagacctttgacgcaaccaaggagcgctggtggacatcctgatagacaagcctcctcgcctgcggggctacgcactgcatcgcatcgttgaacaacaccaacagggcaagcctgctctatgggcagacgaaggcgacaagctgcgcatacgaccaagagacgcagtcccacccgtttactccgaaggaacgctgcttgggttcatcaccaaggcctgtgtcgcattcggcagcaagcatcgctacttgccgctggacgactggcaggggaggaagcagtggctggagcagcagggctcccgaagagggttcgaggtcgtgggcgtgcacgtcaggagcggcatggaacgcgtgcaaacccacgatggccggaacttcaccatcgatgcgaccgagttcacaggcctgctacgagtcaccgacagcgaggcgttcgcaaagtgtctggtcaatggggtgggcaaggttggcaaggcatttggcctcaacctgcttctggtccagtaagtcaaacagggagagcatatgaacgagaaaacttcatacatcgttgccgagctggtggtaagcaccctccaaccgctgacgttcacccatcacggcatcaaagacctgccgatgatgattcgtggagtggataccgagggccgtccacaaagaaccgtcttcctaccagcaggccaactgaggggacgtatccgccacgaggccgctttggcgaagatgcgtgcgatgcccgacaaggtcaaattggaagaggcctacatgctcgcgctgggtcaggacctgaggcccgaggaggaggacgaacctgaatcggtccgactcggtgagcaggtcaagttccgccaagcgaacccgtttctggacctgttcggcacctggaaggtggcgagtcgattgttcgtttctcaccttctccccgaagtgaatgtcatgcctgaccgcatggcgcatatccgtcgggacctcgacacgaacgaggacatcatgcaggagcttggcgagattgaagaagaccgattctatgaccgacaggagaagcagtcactcgcgtctaaggcgggagccattatcaaaatcgttgaggctgaactaaagtccgccaaaaaggccaaggaccaagccaaggtggaccaactggaagcaaagctggcggagctactggagttgaagaagagccacaagggcagcgacgagagcgagaacaccaagcatttggttgaaatccaggccatccctgctggaatcgacctacatggcaagctcaccatcaaacatccactcccatctgacgtgggtttgctggtcgatgcattgaacggcatcagtcagtcgccctacatgggcgcacagcgcgcgcgcggatgcggagaggtgttggggaaggccacattcaagaccaccgatggcgaggtgctggtcaaagtcacctttgggggccatacgcccgcatccatcgagtggacagaggcgggcaaagccttcatggacgcgcaaccagtggtggcatgacctaccgcagccctgaacaagcggcttacgccaagctcatccaaggggccacgagacccggcccaccattgcttgctggagctgccgcaggcctcgggaaaacgcacggctacaccatcccacttgtgaagtctggtctgcgggttgctgtggccatgagcacccgacaactcatcacgcagtacctggagagcgacgccgtcagaactgctcaggccatacgtccgttcagcatcatcgctctacaggcacgacgagaatttaaaacggacaaggcatacagggaacacaaagctcaggccatcgctgccgaagttttggtggtcacacacgccgcagcatgcatcgacagttatgcaccaagctacgcacatcttcgagaacgtgacgttgtgttgtttgacgaagccgaccttctcgcagatgctgcagacctgaggagcacatgttccatttcggccgacgatttggtggcactccatgcggagcgcctgcctcacctagaggcagcgcaacgggcggtctccacaagcgatgaccaagaactcaagggagtcgccaaagccatcctgggtgccctggagcggcccgcttggtacaaagaggttgggaaggaggaggacggcacactcaccctcaagcaccgactaccgggtcgaatgttgaaggccttgattgacgagtgcccccgatgcatctttaccagcggcaccctgcaggtttctggacgcttcgaccattttgtccaagcactgggactgagtgccatcgcccctgagagccgtcacattgacccgaaacatcatgggagattacatgtggaagtcgcttcagacgagctgactccacaggctgtggtcgagcgcatcgtggctgcacaacgccctgtgctggtcctgacgacaagccatgccctcagccagcaactgagccagttgtgcccagaggctgcctgccgcgctccggatgagccgctgtccagcgccgtcggtcgatgcccagacgaaggcatcctgattgcagccggtgcgtggtctggattggacgagccacggctgcgctggaagactgtcgtgattccaaagactccctacctgcggccaactgtccttgatggaaggcacgtcactcgttaccttgacagcgaggtggtggccatacgccgaaccaatcaagggctacatcgagggctcaggacaccggacgctgaatgcactctgctgctgcttgacccacgaagctcccgcgacgcgctgcgaactgccatcccaagcaggtttcacgttgaatgggaggccttcgaggaaggttcactagttgtgcgcagccacgtccaagccgaacgacatcgagacgccagcctgcgcaatttcgcgattcgcaagctcggtcaaaagtgctcggcaccaggatgcaccgagacagccatgcaccggctggatgtccaccacctgaaacccattgccgaggggcaacgcatcacgaccctgagcgatgtcgttgtcctgtgcaaaaaccatcatgccgacgctcaccatcagatgaggatggcagccatttcggagatggatgcccttgaatcctgcggttcgacagctacttagttgccccctgctcaagccacccttcacctgggtggttactggaacccaagccggagccgatgacggatgagcagggctcaagccacccttcacctgggtggttactggaactacaagaagctccaagcgatgtccggcgtggctcaagccacccttcacctgggtggttactggaacgttagcaccacggggcccaccaaacgaggagctcaagccacccttcacctgggtggttactggaacaacatgaactacaccgtgtacctgccggtggctcaagccacccttcacctgggtggttactggaactcgaagcagcaaaggaagccaaatgaccctgctcaagccacccttcacctgggtggttactggaacttgtagcccatccggtgcagcaggtagagcagctcaagccacccttcacctgggtggttactggaacatcagcaccacaaaccgcaaagcaggccccgctcaagccacccttcacctgggtggttactggaacaccccaccaaggacaccaagcaatgaccacgctcagccacccttgacctgggtggttactggaactcgaagaccttgaacgagcgccgcgcgccagctcaagccacccttcacatgggtggttactgaggctacgctgagcagtcagtgtttcctcaccaagctcaaggcactccaaacgcgtggttactgggcctattggtccaagcagttctgccatcacggatgacgccgattgggcgatgctatagtgatgtttggtgtgtcacttcggtgtgtcactcctgctcaggacaagactgagcttcagcactggaatcaatcagttgcctcgggcctcctcgcatgggggcgcggccaaccgggtcagatcgggaacgaagcagccctaaccgaatgcctccagtgccggggtcaggctcgtcacctttttc

SEQ ID NO: 182 - DNA, 12545 bp, Artificial Sequence
  Synthetic Oligonucleotide
  misc_feature (1)..(8071): n is a, c, g, or t
nnnnnnnnnnnnnnnnnnnnnnnnnnnnnnnnnnnnnnnnnnnnnnnnnnnnnnnnnnnnnnnnnnnnnnnnnnnnnnnnnnnnnnnnnnnnnnnnnnnnnnnnnnnnnnnnnnnnnnnnnnnnnnnnnnnnnnnnnnnnnnnnnnnnnnnnnnnnnnnnnnnnnnnnnnnnnnnnnnnnnnnnnnnnnnnnnnnnnnnnnnnnnnnnnnnnnnnnnnnnnnnnnnnnnnnnnnnnnnnnnnnnnnnnnnnnnnnnnnnnnnnnnnnnnnnnnnnnnnnnnnnnnnnnnnnnnnnnnnnnnnnnnnnnnnnnnnnnnnnnnnnnnnnnnnnnnnnnnnnnnnnnnnnnnnnnnnnnnnnnnnnnnnnnnnnnnnnnnnnnnnnnnnnnnnnnnnnnnnnnnnnnnnnnnnnnnnnnnnnnnnnnnnnnnnnnnnnnnnnnnnnnnnnnnnnnnnnnnnnnnnnnnnnnnnnnnnnnnnnnnnnnnnnnnnnnnnnnnnnnnnnnnnnnnnnnnnnnnnnnnnnnnnnnnnnnnnnnnnnnnnnnnnnnnnnnnnnnnnnnnnnnnnnnnnnnnnnnnnnnnnnnnnnnnnnnnnnnnnnnnnnnnnnnnnnnnnnnnnnnnnnnnnnnnnnnnnnnnnnnnnnnnnnnnnnnnnnnnnnnnnnnnnnnnnnnnnnnnnnnnnnnnnnnnnnnnnnnnnnnnnnnnnnnnnnnnnnnnnnnnnnnnnnnnnnnnnnnnnnnnnnnnnnnnnnnnnnnnnnnnnnnnnnnnnnnnnnnnnnnnnnnnnnnnnnnnnnnnnnnnnnnnnnnnnnnnnnnnnnnnnnnnnnnnnnnnnnnnnnnnnnnnnnnnnnnnnnnnnnnnnnnnnnnnnnnnnnnnnnnnnnnnnnnnnnnnnnnnnnnnnnnnnnnnnnnnnnnnnnnnnnnnnnnnnnnnnnnnnnnnnnnnnnnnnnnnnnnnnnnnnnnnnnnnnnnnnnnnnnnnnnnnnnnnnnnnnnnnnnnnnnnnnnnnnnnnnnnnnnnnnnnnnnnnnnnnnnnnnnnnnnnnnnnnnnnnnnnnnnnnnnnnnnnnnnnnnnnnnnnnnnnnnnnnnnnnnnnnnnnnnnnnnnnnnnnnnnnnnnnnnnnnnnnnnnnnnnnnnnnnnnnnnnnnnnnnnnnnnnnnnnnnnnnnnnnnnnnnnnnnnnnnnnnnnnnnnnnnnnnnnnnnnnnnnnnnnnnnnnnnnnnnnnnnnnnnnnnnnnnnnnnnnnnnnnnnnnnnnnnnnnnnnnnnnnnnnnnnnnnnnnnnnnnnnnnnnnnnnnnnnnnnnnnnnnnnnnnnnnnnnnnnnnnnnnnnnnnnnnnnnnnnnnnnnnnnnnnnnnnnnnnnnnnnnnnnnnnnnnnnnnnnnnnnnnnnnnnnnnnnnnnnnnnnnnnnnnnnnnnnnnnnnnnnnnnnnnnnnnnnnnnnnnnnnnnnnnnnnnnnnnnnnnnnnnnnnnnnnnnnnnnnnnnnnnnnnnnnnnnnnnnnnnnnnnnnnnnnnnnnnnnnnnnnnnnnnnnnnnnnnnnnnnnnnnnnnnnnnnnnnnnnnnnnnnnnnnnnnnnnnnnnnnnnnnnnnnnnnnnnnnnnnnnnnnnnnnnnnnnnnnnnnnnnnnnnnnnnnnnnnnnnnnnnnnnnnnnnnnnnnnnnnnnnnnnnnnnnnnnnnnnnnnnnnnnnnnnnnnnnnnnnnnnnnnnnnnnnnnnnnnnnnnnnnnnnnnnnnnnnnnnnnnnnnnnnnnnnnnnnnnnnnnnnnnnnnnnnnnnnnnnnnnnnnnnnnnnnnnnnnnnnnnnnnnnnnnnnnnnnnnnnnnnnnnnnnnnnnnnnnnnnnnnnnnnnnnnnnnnnnnnnnnnnnnnnnnnnnnnnnnnnnnnnnnnnnnnnnnnnnnnnnnnnnnnnnnnnnnnnnnnnnnnnnnnnnnnnnnnnnnnnnnnnnnnnnnnnnnnnnnnnnnnnnnnnnnnnnnnnnnnnnnnnnnnnnnnnnnnnnnnnnnnnnnnnnnnnnnnnnnnnnnnnnnnnnnnnnnnnnnnnnnnnnnnnnnnnnnnnnnnnnnnnnnnnnnnnnnnnnnnnnnnnnnnnnnnnnnnnnnnnnnnnnnnnnnnnnnnnnnnnnnnnnnnnnnnnnnnnnnnnnnnnnnnnnnnnnnnnnnnnnnnnnnnnnnnnnnnnnnnnnnnnnnnnnnnnnnnnnnnnnnnnnnnnnnnnnnnnnnnnnnnnnnnnnnnnnnnnnnnnnnnnnnnnnnnnnnnnnnnnnnnnnnnnnnnnnnnnnnnnnnnnnnnnnnnnnnnnnnnnnnnnnnnnnnnnnnnnnnnnnnnnnnnnnnnnnnnnnnnnnnnnnnnnnnnnnnnnnnnnnnnnnnnnnnnnnnnnnnnnnnnnnnnnnnnnnnnnnnnnnnnnnnnnnnnnnnnnnnnnnnnnnnnnnnnnnnnnnnnnnnnnnnnnnnnnnnnnnnnnnnnnnnnnnnnnnnnnnnnnnnnnnnnnnnnnnnnnnnnnnnnnnnnnnnnnnnnnnnnnnnnnnnnnnnnnnnnnnnnnnnnnnnnnnnnnnnnnnnnnnnnnnnnnnnnnnnnnnnnnnnnnnnnnnnnnnnnnnnnnnnnnnnnnnnnnnnnnnnnnnnnnnnnnnnnnnnnnnnnnnnnnnnnnnnnnnnnnnnnnnnnnnnnnnnnnnnnnnnnnnnnnnnnnnnnnnnnnnnnnnnnnnnnnnnnnnnnnnnnnnnnnnnnnnnnnnnnnnnnnnnnnnnnnnnnnnnnnnnnnnnnnnnnnnnnnnnnnnnnnnnnnnnnnnnnnnnnnnnnnnnnnnnnnnnnnnnnnnnnnnnnnnnnnnnnnnnnnnnnnnnnnnnnnnnnnnnnnnnnnnnnnnnnnnnnnnnnnnnnnnnnnnnnnnnnnnnnnnnnnnnnnnnnnnnnnnnnnnnnnnnnnnnnnnnnnnnnnnnnnnnnnnnnnnnnnnnnnnnnnnnnnnnnnnnnnnnnnnnnnnnnnnnnnnnnnnnnnnnnnnnnnnnnnnnnnnnnnnnnnnnnnnnnnnnnnnnnnnnnnnnnnnnnnnnnnnnnnnnnnnnnnnnnnnnnnnnnnnnnnnnnnnnnnnnnnnnnnnnnnnnnnnnnnnnnnnnnnnnnnnnnnnnnnnnnnnnnnnnnnnnnnnnnnnnnnnnnnnnnnnnnnnnnnnnnnnnnnnnnnnnnnnnnnnnnnnnnnnnnnnnnnnnnnnnnnnnnnnnnnnnnnnnnnnnnnnnnnnnnnnnnnnnnnnnnnnnnnnnnnnnnnnnnnnnnnnnnnnnnnnnnnnnnnnnnnnnnnnnnnnnnnnnnnnnnnnnnnnnnnnnnnnnnnnnnnnnnnnnnnnnnnnnnnnnnnnnnnnnnnnnnnnnnnnnnnnnnnnnnnnnnnnnnnnnnnnnnnnnnnnnnnnnnnnnnnnnnnnnnnnnnnnnnnnnnnnnnnnnnnnnnnnnnnnnnnnnnnnnnnnnnnnnnnnnnnnnnnnnnnnnnnnnnnnnnnnnnnnnnnnnnnnnnnnnnnnnnnnnnnnnnnnnnnnnnnnnnnnnnnnnnnnnnnnnnnnnnnnnnnnnnnnnnnnnnnnnnnnnnnnnnnnnnnnnnnnnnnnnnnnnnnnnnnnnnnnnnnnnnnnnnnnnnnnnnnnnnnnnnnnnnnnnnnnnnnnnnnnnnnnnnnnnnnnnnnnnnnnnnnnnnnnnnnnnnnnnnnnnnnnnnnnnnnnnnnnnnnnnnnnnnnnnnnnnnnnnnnnnnnnnnnnnnnnnnnnnnnnnnnnnnnnnnnnnnnnnnnnnnnnnnnnnnnnnnnnnnnnnnnnnnnnnnnnnnnnnnnnnnnnnnnnnnnnnnnnnnnnnnnnnnnnnnnnnnnnnnnnnnnnnnnnnnnnnnnnnnnnnnnnnnnnnnnnnnnnnnnnnnnnnnnnnnnnnnnnnnnnnnnnnnnnnnnnnnnnnnnnnnnnnnnnnnnnnnnnnnnnnnnnnnnnnnnnnnnnnnnnnnnnnnnnnnnnnnnnnnnnnnnnnnnnnnnnnnnnnnnnnnnnnnnnnnnnnnnnnnnnnnnnnnnnnnnnnnnnnnnnnnnnnnnnnnnnnnnnnnnnnnnnnnnnnnnnnnnnnnnnnnnnnnnnnnnnnnnnnnnnnnnnnnnnnnnnnnnnnnnnnnnnnnnnnnnnnnnnnnnnnnnnnnnnnnnnnnnnnnnnnnnnnnnnnnnnnnnnnnnnnnnnnnnnnnnnnnnnnnnnnnnnnnnnnnnnnnnnnnnnnnnnnnnnnnnnnnnnnnnnnnnnnnnnnnnnnnnnnnnnnnnnnnnnnnnnnnnnnnnnnnnnnnnnnnnnnnnnnnnnnnnnnnnnnnnnnnnnnnnnnnnnnnnnnnnnnnnnnnnnnnnnnnnnnnnnnnnnnnnnnnnnnnnnnnnnnnnnnnnnnnnnnnnnnnnnnnnnnnnnnnnnnnnnnnnnnnnnnnnnnnnnnnnnnnnnnnnnnnnnnnnnnnnnnnnnnnnnnnnnnnnnnnnnnnnnnnnnnnnnnnnnnnnnnnnnnnnnnnnnnnnnnnnnnnnnnnnnnnnnnnnnnnnnnnnnnnnnnnnnnnnnnnnnnnnnnnnnnnnnnnnnnnnnnnnnnnnnnnnnnnnnnnnnnnnnnnnnnnnnnnnnnnnnnnnnnnnnnnnnnnnnnnnnnnnnnnnnnnnnnnnnnnnnnnnnnnnnnnnnnnnnnnnnnnnnnnnnnnnnnnnnnnnnnnnnnnnnnnnnnnnnnnnnnnnnnnnnnnnnnnnnnnnnnnnnnnnnnnnnnnnnnnnnnnnnnnnnnnnnnnnnnnnnnnnnnnnnnnnnnnnnnnnnnnnnnnnnnnnnnnnnnnnnnnnnnnnnnnnnnnnnnnnnnnnnnnnnnnnnnnnnnnnnnnnnnnnnnnnnnnnnnnnnnnnnnnnnnnnnnnnnnnnnnnnnnnnnnnnnnnnnnnnnnnnnnnnnnnnnnnnnnnnnnnnnnnnnnnnnnnnnnnnnnnnnnnnnnnnnnnnnnnnnnnnnnnnnnnnnnnnnnnnnnnnnnnnnnnnnnnnnnnnnnnnnnnnnnnnnnnnnnnnnnnnnnnnnnnnnnnnnnnnnnnnnnnnnnnnnnnnnnnnnnnnnnnnnnnnnnnnnnnnnnnnnnnnnnnnnnnnnnnnnnnnnnnnnnnnnnnnnnnnnnnnnnnnnnnnnnnnnnnnnnnnnnnnnnnnnnnnnnnnnnnnnnnnnnnnnnnnnnnnnnnnnnnnnnnnnnnnnnnnnnnnnnnnnnnnnnnnnnnnnnnnnnnnnnnnnnnnnnnnnnnnnnnnnnnnnnnnnnnnnnnnnnnnnnnnnnnnnnnnnnnnnnnnnnnnnnnnnnnnnnnnnnnnnnnnnnnnnnnnnnnnnnnnnnnnnnnnnnnnnnnnnnnnnnnnnnnnnnnnnnnnnnnnnnnnnnnnnnnnnnnnnnnnnnnnnnnnnnnnnnnnnnnnnnnnnnnnnnnnnnnnnnnnnnnnnnnnnnnnnnnnnnnnnnnnnnnnnnnnnnnnnnnnnnnnnnnnnnnnnnnnnnnnnnnnnnnnnnnnnnnnnnnnnnnnnnnnnnnnnnnnnnnnnnnnnnnnnnnnnnnnnnnnnnnnnnnnnnnnnnnnnnnnnnnnnnnnnnnnnnnnnnnnnnnnnnnnnnnnnnnnnnnnnnnnnnnnnnnnnnnnnnnnnnnnnnnnnnnnnnnnnnnnnnnnnnnnnnnnnnnnnnnnnnnnnnnnnnnnnnnnnnnnnnnnnnnnnnnnnnnnnnnnnnnnnnnnnnnnnnnnnnnnnnnnnnnnnnnnnnnnnnnnnnnnnnnnnnnnnnnnnnnnnnnnnnnnnnnnnnnnnnnnnnnnnnnnnnnnnnnnnnnnnnnnnnnnnnnnnnnnnnnnnnnnnnnnnnnnnnnnnnnnnnnnnnnnnnnnnnnnnnnnnnnnnnnnnnnnnnnnnnnnnnnnnnnnnnnnnnnnnnnnnnnnnnnnnnnnnnnnnnnnnnnnnnnnnnnnnnnnnnnnnnnnnnnnnnnnnnnnnnnnnnnnnnnnnnnnnnnnnnnnnnnnnnnnnnnnnnnnnnnnnnnnnnnnnnnnnnnnnnnnnnnnnnnnnnnnnnnnnnnnnnnnnnnnnnnnnnnnnnnnnnnnnnnnnnnnnnnnnnnnnnnnnnnnnnnnnnnnnnnnnnnnnnnnnnnnnnnnnnnnnnnnnnnnnnnnnnnnnnnnnnnnnnnnnnnnnnnnnnnnnnnnnnnnnnnnnnnnnnnnnnnnnnnnnnnnnnnnnnnnnnnnnnnnnnnnnnnnnnnnnnnnnnnnnnnnnnnnnnnnnnnnnnnnnnnnnnnnnnnnnnnnnnnnnnnnnnnnnnnnnnnnnnnnnnnnnnnnnnnnnnnnnnnnnnnnnnnnnnnnnnnnnnnnnnnnnnnnnnnnnnnnnnnnnnnnnnnnnnnnnnnnnnnnnnnnnnnnnnnnnnnnnnnnnnnnnnnnnnnnnnnnnnnnnnnnnnnnnnnnnnnnnnnnnnnnnnnnnnnnnnnnnnnnnnnnnnnnnnnnnnnnnnnnnnnnnnnnnnnnnnnnnnnnnnnnnnnnnnnnnnnnnnnnnnnnnnnnnnnnnnnnnnnnnnnnnnnnnnnnnnnnnnnnnnnnnnnnnnnnnnnnnnnnnnnnnnnnnnnnnnnnnnnnnnnnnnnnnnnnnnnnnnnnnnnnnnnnnnnnnnnnnnnnnnnnnnnnnnnnnnnnnnnnnnnnnnnnnnnnnnnnnnnnnnnnnnnnnnnnnnnnnnnnnnnnnnnnnnnnnnnnnnnnnnnnnnnnnnnnnnnnnnnnnnnnnnnnnnnnnnnnnnnnnnnnnnnnnnnnnnnnnnnnnnnnnnnnnnnnnnnnnnnnnnnnnnnnnnnnnnnnnnnnnnnnnnnnnnnnnnnnnnnnnnnnnnnnnnnnnnnnnnnnnnnnnnnnnnnnnnnnnnnnnnnnnnnnnnnnnnnnnnnnnnnnnnnnnnnnnnnnnnnnnnnnnnnnnnnnnnnnnnnnnnnnnnnnnnnnnnnnnnnnnnnnnnnnnnnnnnnnnnnnnnnnnnnnnnnnnnnnnnnnnnnnnnnnnnnnnnnnnnnnnnnnnnnnnnnnnnnnnnnnnnnnnnnnnnnnnnnnnnnnnnnnnnnnnnnnnnnnnnnnnnnnnnnnnnnnnnnnnnnnnnnnnnnnnnnnnnnnnnnnnnnnnnnnnnnnnnnnnnnnnnnnnnnnnnnnnnnnnnnnnnnnnnnnnnnnnnnnnnnnnnnnnnnnnnnnnnnnnnnnnnnnnnnnnnnnnnnnnnnnnnnnnnnnnnnnnnnnnnnnnnnnnnnnnnnnnnnnnnnnnnnnnnnnnnnnnnnnnnnnnnnnnnnnnnnnnnnnnnnnnnnnnnnnnnnnnnnnnnnnnnnnnnnnnnnnnnnnnnnnnnnnnnnnnnnnnnnnnnnnnnnnnnnnnnnnnnnnnnnnnnnnnnnnnnnnnnnnnnnnnnnnnnnnnnnnnnnnnnnnnnnnnnnnnnnnnnnnnnnnnnnnnnnnnnnnnnnnnnnnnnnnnnnnnnnnnnnnnnnnnnnnnnnnnnnnnnnnnnnnnnnnnnnnnnnnnnnnnnnnnnnnnnnnnnnnnnnnnnnnnnnnnnnnnnnnnnnnnnnnnnnnnnnnnnnnnnnnnnnnnnnnnnnnnnnnnnnnnnnnnnnnnnnnnnnnnnnnnnnnnnnnnnnnnnnnnnnnnnnnnnnnnnnnnnnnnnnnnnnnnnnnnnnnnnnnnnnnnnnnnnnnnnnnnnnnnnnnnnnnnnnnnnnnnnnnnnnnnnnnnnnnnnnnnnnnnnnnnnnnnnnnnnnnnnnnnnnnnnnnnnnnnnnnnnnnnnnnnnnnnnnnnnnnnnnnnnnnnnnnnnnnnnnnnnnnnnnnnnnnnnnnnnnnnnnnnnnnnnnnnnnnnnnnnnnnnnnnnnnnnnnnnnnnnnnnnnnnnnnnnnnnnnnnnnnnnnnnnnnnnnnnnnnnnnnnnnnnnnnnnnnnnnnnnnnnnnnnnnnnnnnnnnnnnnnnnnnnnnnnnnnnnnnnnnnnnnnnnnnnnnnnnnnnnnnnnnnnnnnnnnnnnnnnnnnnnnnnnnnnnnnnnnnnnnnnnnnnnnnnnnnnnngcggtaatgccgcggcttctcgcagatgcggaaaatggcagcccctgggctttgcaggatgtttatgaaaggctgatcggccagaacgccgcttccgaagcgaagatggaagaagaaaccattgacctggccgccattgcgcaaagacgcgaagccgaaccggtgctggatttattcggctccggcttggggctgaaaagccgccttttggtcagccatttcctgccggaagaaaacatcatgccggtcaagctttccggcgtgcggacagatttggatgcgaccgatggcgcggtggaaagcctgcccgaagcggacaggcagcgcttttatcagcgtgaagcaagcaaccgaattcgttcccagtcaaaagaggcgatcaaggagattgaacggcagatacgcttccaggaacagggccgcgccgcgaaagccctatcggcggaagaaatcgccgggctgaaacgcgagaaagaggtgctggtggaacgcgaacgcgcagcgcgtgaagcgatgggcgggatggaggtttccagccttatgccccacgcctatttcgccctgccggcggggctgaagcttgtcggccggttggtggtggatcatcccaaggaaagggatgtggctttgctgaccagtgccttggatatgatgtcccggcgcccgttattgggtgcgcatgttgcgcgcggggcgggagagttttcggcgagcttcgatttcaggcgcgaaggggcgattttccgtcgcgtgacgattggcggttatgcgcccgcccaggtggtggatctatcggctgaggcagcctgatagggtttttgggagtggttttgccacgaaccagaggcgatttcggaattgtattcagcgctttaggtctacatcgggtgcggccacccggatttcgggtggtcattgcaagatgaaaggcgaaagcaccacatcgccggggggtgcggccacccggatttcgggtggtcattgcaagaatcgcgcgcgatctgttcccaagacaaccggtgcggccacccggatttcgggtggtcattgcaagaggcatcagccattcggcccaacgcatcccggtgcggccacccggatttcgggtggtcattgcaagtgaaagcacggtgacggaaccccgcatgagggtgcggccacccggatttcgggtggtcattgcaagttgctgaccgtgactgattgcgtctgcaaggtgcggccacccggatttcgggtggtcattgcaagacgcttgccgatgtggatgcgtgcgtgactggtgcggccacccggatttcgggtggtcattgcaagtaaagcttcatgacgaaaggcgccaagcgcggtgcggccacccggatttcgggtggtcattgcaagtcctgcccgtcaatcatcgcgagcggccgcggtgcggccacccggatttcgggtggtcattgcaagtcgcaacgcattggcaaccgccgccgctacggtgcggccatccggatttcgggtggtcattgcaagtggcaaaggcagcggcaagcgcgcgttgcaggtgcggccacccggatttcgggtggtcattgcaaggtgctggtaagcgggctggcttccacctctggtgcggccacccggatttcgggtggtcattgcaagatatcttccggtgcgttctcattgcccccggtgcggccacccggatttcgggtggtcattgcaagcaaaatggcgatgcgcggcgcgtgtcaatcggtgcggccacccggatttcgggtggtcattgcaagtgataacgccacatgtgaacggaatgcgggggtgcggccacccggatttcgggtggtcattgcaacgtcggatcaggcaaaaccaccacgggccttggtgcggccacccggatttcgggtggtcattgcaacagctcgccaaggttggccatgcccatggcgggtgcggccacccggatttcgggtggtcaatgtagaatatcatcagacttattgttgtcctcgtccatcaggccatgttcgaagaacgtggtcaggagtcttcgcacccaacatcatgtagttctttccttcggctcccaaaaggatttaccccagatgtttcgcagcagcgaacagcggctattccatgaaattgtcgcgcggcattttgccgcccccatccggcctttgctcgcccaggcggcgaccgggcttgggaagacgcgtgcctatcttgccgccgccgcgcaggccgccagccaaggccagcgcatcgccatcgccctgccaagctgggcgctgattgatcaattgctggcctcggaagatttcgcgctcacgcgcggtacattgaacatcgccaccttccggccacgccggcgttgcgacaatgcggctgaatatgaagcccaagcggaagcggcgcgttccagccacatcatgctttgtactgctgcggcggtgttgattgataacgccgcgaagggcgcctattgcggtgccattgaacgcagcattatttttgatgaggcggatcaattgccggatgcggctgccttgcgcgcggatgtggaaatcacccccgtcgaattgcgcgacctgaatattgccgccaaaacgactgaggctattgccgctgccgttttggcgcatcctcgcgccaccacggaacaacgcgccatcgccaggctagtgcagcaatacgttactgaagcacccggctatgcgctggtcggcagaacagaccaagatggcatcgccgtaaatcatccaagaccggggcgaatgctgaaacgcatcagcaacctgcccagcagcattttcatctccgccacccttcaaattcgcggcagcttcgacgcctttcggcgcgccatggcgattgaggagatctctcccctctcgacagccattgaaccaaaacgccacggggacctgtccttcatctatcaacccagggcgcccgatacggaagactggttcactgaggttatcagcagcatcgcaaccgcgccccgcccctgcttggtgctggtgccaagccatgacttggccgagcgtattggcgccgcggccggtgggcgcgtgcgtggccacgatgaacctttgcgggaagccgccgcggaagctgaaagccagggacttttcatcgcggccggtgcttgggccgggctggatacgccgacacactgggccagcctggtcattccccgcgcgcctttccccaggctgcgggttctggagggggaagctgtggaccattacctggatagtcacgcaacaaccgtgcggcgccttgggcagggtcttggccgcgtactgcgctttcctgaagcgcgcgccaaggtgattattcttgaccagcgcctggtcactcacggcctggagagctgcataccggaacgcttccgctccgcttgggaggaagccaagcgcgccgccctttctcagggtttcgaggaaggcacgcggtttgagctgaccttgagccgggcggaacgcgaccctgcgctgcgcaaggcggcgctcagccattacgggctgcgctgcaccgaatgcgggttcgtgccgcaggtttcatcgcaactggaagttcaccacctgaacccaatcgctgagggcaagcggaggacagtgctgacggacgtgacggttctctgcgccaattgccaccggctggtgcacgcgcgccttcgcgccgcttcagccgagggggaggcggtttgacgcgtctaagcatgctgtctgcagtggcccaaggccgacccgatgcccggagcgggcagggccttctcaaccgaccaggcggcgttactgctcacttttccccgctttatttcttggcgagcatgcgcggccctgcgcctacgactcctagcctccgccaacgccaaaggtgagtataggcagcgattttccgctcccggtcaccctacgccccccattgaaatctccaacttccgaagcggtccgcgaaaatttatcaagctttttcaattactttcgtctggctggaaaatcactcaagtcgccagccttggagagaactcgccccggagagagcattttcgcgcaatattccggcaccgcaccagccacgcgaatttgagaacccttgcgataacacgggaatttcggagggccatcagcggcggagagcgtgtttgtgctgtagggaatggcgtaggaaaggaaaccgcaaaggcgaacgtctctgacctctacttttcattattttcaatattttaatcgaatgcgagcctttccagagcaacaccgattttgtcatcgacggattggtggttgcgcgcggcgaatatcgcagaccagcttttcggctagagcatgttgcgttcacatgggttcacgcaacccgctctagatcgttgtttttcgagcatcttcacacgttcagatgcttccatctgaacgtgatctgctctcgcacccgggtggctcatgcaaaggacttctgggatgtcttcattcttcgt

SEQ ID NO: 183 - DNA, 12516 bp, Artificial Sequence
  Synthetic Oligonucleotide
  misc_feature (1)..(4945): n is a, c, g, or t
  misc_feature (5389)..(5389): n is a, c, g, or t
nnnnnnnnnnnnnnnnnnnnnnnnnnnnnnnnnnnnnnnnnnnnnnnnnnnnnnnnnnnnnnnnnnnnnnnnnnnnnnnnnnnnnnnnnnnnnnnnnnnnnnnnnnnnnnnnnnnnnnnnnnnnnnnnnnnnnnnnnnnnnnnnnnnnnnnnnnnnnnnnnnnnnnnnnnnnnnnnnnnnnnnnnnnnnnnnnnnnnnnnnnnnnnnnnnnnnnnnnnnnnnnnnnnnnnnnnnnnnnnnnnnnnnnnnnnnnnnnnnnnnnnnnnnnnnnnnnnnnnnnnnnnnnnnnnnnnnnnnnnnnnnnnnnnnnnnnnnnnnnnnnnnnnnnnnnnnnnnnnnnnnnnnnnnnnnnnnnnnnnnnnnnnnnnnnnnnnnnnnnnnnnnnnnnnnnnnnnnnnnnnnnnnnnnnnnnnnnnnnnnnnnnnnnnnnnnnnnnnnnnnnnnnnnnnnnnnnnnnnnnnnnnnnnnnnnnnnnnnnnnnnnnnnnnnnnnnnnnnnnnnnnnnnnnnnnnnnnnnnnnnnnnnnnnnnnnnnnnnnnnnnnnnnnnnnnnnnnnnnnnnnnnnnnnnnnnnnnnnnnnnnnnnnnnnnnnnnnnnnnnnnnnnnnnnnnnnnnnnnnnnnnnnnnnnnnnnnnnnnnnnnnnnnnnnnnnnnnnnnnnnnnnnnnnnnnnnnnnnnnnnnnnnnnnnnnnnnnnnnnnnnnnnnnnnnnnnnnnnnnnnnnnnnnnnnnnnnnnnnnnnnnnnnnnnnnnnnnnnnnnnnnnnnnnnnnnnnnnnnnnnnnnnnnnnnnnnnnnnnnnnnnnnnnnnnnnnnnnnnnnnnnnnnnnnnnnnnnnnnnnnnnnnnnnnnnnnnnnnnnnnnnnnnnnnnnnnnnnnnnnnnnnnnnnnnnnnnnnnnnnnnnnnnnnnnnnnnnnnnnnnnnnnnnnnnnnnnnnnnnnnnnnnnnnnnnnnnnnnnnnnnnnnnnnnnnnnnnnnnnnnnnnnnnnnnnnnnnnnnnnnnnnnnnnnnnnnnnnnnnnnnnnnnnnnnnnnnnnnnnnnnnnnnnnnnnnnnnnnnnnnnnnnnnnnnnnnnnnnnnnnnnnnnnnnnnnnnnnnnnnnnnnnnnnnnnnnnnnnnnnnnnnnnnnnnnnnnnnnnnnnnnnnnnnnnnnnnnnnnnnnnnnnnnnnnnnnnnnnnnnnnnnnnnnnnnnnnnnnnnnnnnnnnnnnnnnnnnnnnnnnnnnnnnnnnnnnnnnnnnnnnnnnnnnnnnnnnnnnnnnnnnnnnnnnnnnnnnnnnnnnnnnnnnnnnnnnnnnnnnnnnnnnnnnnnnnnnnnnnnnnnnnnnnnnnnnnnnnnnnnnnnnnnnnnnnnnnnnnnnnnnnnnnnnnnnnnnnnnnnnnnnnnnnnnnnnnnnnnnnnnnnnnnnnnnnnnnnnnnnnnnnnnnnnnnnnnnnnnnnnnnnnnnnnnnnnnnnnnnnnnnnnnnnnnnnnnnnnnnnnnnnnnnnnnnnnnnnnnnnnnnnnnnnnnnnnnnnnnnnnnnnnnnnnnnnnnnnnnnnnnnnnnnnnnnnnnnnnnnnnnnnnnnnnnnnnnnnnnnnnnnnnnnnnnnnnnnnnnnnnnnnnnnnnnnnnnnnnnnnnnnnnnnnnnnnnnnnnnnnnnnnnnnnnnnnnnnnnnnnnnnnnnnnnnnnnnnnnnnnnnnnnnnnnnnnnnnnnnnnnnnnnnnnnnnnnnnnnnnnnnnnnnnnnnnnnnnnnnnnnnnnnnnnnnnnnnnnnnnnnnnnnnnnnnnnnnnnnnnnnnnnnnnnnnnnnnnnnnnnnnnnnnnnnnnnnnnnnnnnnnnnnnnnnnnnnnnnnnnnnnnnnnnnnnnnnnnnnnnnnnnnnnnnnnnnnnnnnnnnnnnnnnnnnnnnnnnnnnnnnnnnnnnnnnnnnnnnnnnnnnnnnnnnnnnnnnnnnnnnnnnnnnnnnnnnnnnnnnnnnnnnnnnnnnnnnnnnnnnnnnnnnnnnnnnnnnnnnnnnnnnnnnnnnnnnnnnnnnnnnnnnnnnnnnnnnnnnnnnnnnnnnnnnnnnnnnnnnnnnnnnnnnnnnnnnnnnnnnnnnnnnnnnnnnnnnnnnnnnnnnnnnnnnnnnnnnnnnnnnnnnnnnnnnnnnnnnnnnnnnnnnnnnnnnnnnnnnnnnnnnnnnnnnnnnnnnnnnnnnnnnnnnnnnnnnnnnnnnnnnnnnnnnnnnnnnnnnnnnnnnnnnnnnnnnnnnnnnnnnnnnnnnnnnnnnnnnnnnnnnnnnnnnnnnnnnnnnnnnnnnnnnnnnnnnnnnnnnnnnnnnnnnnnnnnnnnnnnnnnnnnnnnnnnnnnnnnnnnnnnnnnnnnnnnnnnnnnnnnnnnnnnnnnnnnnnnnnnnnnnnnnnnnnnnnnnnnnnnnnnnnnnnnnnnnnnnnnnnnnnnnnnnnnnnnnnnnnnnnnnnnnnnnnnnnnnnnnnnnnnnnnnnnnnnnnnnnnnnnnnnnnnnnnnnnnnnnnnnnnnnnnnnnnnnnnnnnnnnnnnnnnnnnnnnnnnnnnnnnnnnnnnnnnnnnnnnnnnnnnnnnnnnnnnnnnnnnnnnnnnnnnnnnnnnnnnnnnnnnnnnnnnnnnnnnnnnnnnnnnnnnnnnnnnnnnnnnnnnnnnnnnnnnnnnnnnnnnnnnnnnnnnnnnnnnnnnnnnnnnnnnnnnnnnnnnnnnnnnnnnnnnnnnnnnnnnnnnnnnnnnnnnnnnnnnnnnnnnnnnnnnnnnnnnnnnnnnnnnnnnnnnnnnnnnnnnnnnnnnnnnnnnnnnnnnnnnnnnnnnnnnnnnnnnnnnnnnnnnnnnnnnnnnnnnnnnnnnnnnnnnnnnnnnnnnnnnnnnnnnnnnnnnnnnnnnnnnnnnnnnnnnnnnnnnnnnnnnnnnnnnnnnnnnnnnnnnnnnnnnnnnnnnnnnnnnnnnnnnnnnnnnnnnnnnnnnnnnnnnnnnnnnnnnnnnnnnnnnnnnnnnnnnnnnnnnnnnnnnnnnnnnnnnnnnnnnnnnnnnnnnnnnnnnnnnnnnnnnnnnnnnnnnnnnnnnnnnnnnnnnnnnnnnnnnnnnnnnnnnnnnnnnnnnnnnnnnnnnnnnnnnnnnnnnnnnnnnnnnnnnnnnnnnnnnnnnnnnnnnnnnnnnnnnnnnnnnnnnnnnnnnnnnnnnnnnnnnnnnnnnnnnnnnnnnnnnnnnnnnnnnnnnnnnnnnnnnnnnnnnnnnnnnnnnnnnnnnnnnnnnnnnnnnnnnnnnnnnnnnnnnnnnnnnnnnnnnnnnnnnnnnnnnnnnnnnnnnnnnnnnnnnnnnnnnnnnnnnnnnnnnnnnnnnnnnnnnnnnnnnnnnnnnnnnnnnnnnnnnnnnnnnnnnnnnnnnnnnnnnnnnnnnnnnnnnnnnnnnnnnnnnnnnnnnnnnnnnnnnnnnnnnnnnnnnnnnnnnnnnnnnnnnnnnnnnnnnnnnnnnnnnnnnnnnnnnnnnnnnnnnnnnnnnnnnnnnnnnnnnnnnnnnnnnnnnnnnnnnnnnnnnnnnnnnnnnnnnnnnnnnnnnnnnnnnnnnnnnnnnnnnnnnnnnnnnnnnnnnnnnnnnnnnnnnnnnnnnnnnnnnnnnnnnnnnnnnnnnnnnnnnnnnnnnnnnnnnnnnnnnnnnnnnnnnnnnnnnnnnnnnnnnnnnnnnnnnnnnnnnnnnnnnnnnnnnnnnnnnnnnnnnnnnnnnnnnnnnnnnnnnnnnnnnnnnnnnnnnnnnnnnnnnnnnnnnnnnnnnnnnnnnnnnnnnnnnnnnnnnnnnnnnnnnnnnnnnnnnnnnnnnnnnnnnnnnnnnnnnnnnnnnnnnnnnnnnnnnnnnnnnnnnnnnnnnnnnnnnnnnnnnnnnnnnnnnnnnnnnnnnnnnnnnnnnnnnnnnnnnnnnnnnnnnnnnnnnnnnnnnnnnnnnnnnnnnnnnnnnnnnnnnnnnnnnnnnnnnnnnnnnnnnnnnnnnnnnnnnnnnnnnnnnnnnnnnnnnnnnnnnnnnnnnnnnnnnnnnnnnnnnnnnnnnnnnnnnnnnnnnnnnnnnnnnnnnnnnnnnnnnnnnnnnnnnnnnnnnnnnnnnnnnnnnnnnnnnnnnnnnnnnnnnnnnnnnnnnnnnnnnnnnnnnnnnnnnnnnnnnnnnnnnnnnnnnnnnnnnnnnnnnnnnnnnnnnnnnnnnnnnnnnnnnnnnnnnnnnnnnnnnnnnnnnnnnnnnnnnnnnnnnnnnnnnnnnnnnnnnnnnnnnnnnnnnnnnnnnnnnnnnnnnnnnnnnnnnnnnnnnnnnnnnnnnnnnnnnnnnnnnnnnnnnnnnnnnnnnnnnnnnnnnnnnnnnnnnnnnnnnnnnnnnnnnnnnnnnnnnnnnnnnnnnnnnnnnnnnnnnnnnnnnnnnnnnnnnnnnnnnnnnnnnnnnnnnnnnnnnnnnnnnnnnnnnnnnnnnnnnnnnnnnnnnnnnnnnnnnnnnnnnnnnnnnnnnnnnnnnnnnnnnnnnnnnnnnnnnnnnnnnnnnnnnnnnnnnnnnnnnnnnnnnnnnnnnnnnnnnnnnnnnnnnnnnnnnnnnnnnnnnnnnnnnnnnnnnnnnnnnnnnnnnnnnnnnnnnnnnnnnnnnnnnnnnnnnnnnnnnnnnnnnnnnnnnnnnnnnnnnnnnnnnnnnnnnnnnnnnnnnnnnnnnnnnnnnnnnnnnnnnnnnnnnnnnnnnnnnnnnnnnnnnnnnnnnnnnnnnnnnnnnnnnnnnnnnnnnnnnnnnnnnnnnnnnnnnnnnnnnnnnnnnnnnnnnnnnnnnnnnnnnnnnnnnnnnnnnnnnnnnnnnnnnnnnnnnnnnnnnnnnnnnnnnnnnnnnnnnnnnnnnnnnnnnnnnnnnnnnnnnnnnnnnnnnnnnnnnnnnnnnnnnnnnnnnnnnnnnnnnnnnnnnnnnnnnnnnnnnnnnnnnnnnnnnnnnnnnnnnnnnnnnngtcctaaatcctcgcccagtgcccctatagctcagctggtagagcaactgatttgtaatcagtaggtccgcggttcgagtccgtgtgggggcaccataaaatcaaagacttacgttaaatcaattattagtgctgtccgctggggaaactcaggggaaacaattgcgtttgttaagcctcttcccaatcctatttagatgatcataacttaacgttgagcagggggctagaatggaaaaaatattgaaactgtttggccaaaaactttttattatgtccatcttcatttttagtctgaatgtttcaatggctcataccaaatccttggacgaaattaagttgcttccaccagataggattaccgagctcgccaagatgggaaacccagatgctcagtactggcttggggaattaatttacaatggtgccatatcaaattggcangacttaaggcatttaatgatgccctattgggaggatgcgatgcggcaggggcatgcaatggctacctacagattacttgagtgggtcaggggcggtgctgtgccagatgatatggctaaacttaagtcatcagagattaaattatatctcagtaaactcgctaatgcaggtgaagccaaagctaacatgatattgtttcgggatacgttatccgattttgtaaataaacgaaatacttctggtgagactgataatcttttaaaaagaactgcagataaatatctaattcgtgcttacgaaattggatcgagagacgctgcatatcggtatgcgatcatgttgtcttatggcagcatatctataccgcaggatcattctttagctgtaacaatttttgaagaagcctacgcaatggagccagatgaaccaaaaagagacgatggcagtttatcctgttcaatattaattatactttctgattattatggaggtcagtttctagttgatggtgaaaattactctggcgaagcggacgatgcatcttaccttcatacattatctaaaagcgtgaaagattcttgtccgatcttgatgttccgttactccacttacttaatggaaaacggggaggctgatgattatttcgacgcttatctcgtagctctagatgctttagatatcgctaaagctgatcatcttgctaccgattatatgtacgatttactgggaacgctagctctgaaactaaatgagccgctcaaagcgaaagagcatttttcaaaaatgaaagatgagcagtatattgaatggttatttaatgaatatttgggtggtggtctaaaactttgtagcgcgctggatgtttcaaaaaatgagtgcagggcttttatttttaattgagaaattcagcatagttatttttgtgtaaaaaatttcaaacaaagatgttaaacatttaaatgaaatattagacgtagtcgtattttaatctaattgctctgctagttgtgaagtgaagggtgccagtaaatattagatcctttacacgggtaactccgatatcgcggtggatggggctggggttcgttagggaaaaattactttggcagattctcaatggtagagggggggcaaaaaacagccgcccctttctagtgatgggtgttgctctcacatttttgactgagaatgctctatgaaataattaatacgattttcaaataaatttttagtagatttctagtatcttgtcgatactctctaataacctgagcaccagctgtaacaatcaaatcttgcggtgaattttatttatgtttgaacaagtgaaaattgaggcaacccttcgtactccgattattattcaggggtatatgacatttgatgcgctattaggtgcattactgtttgagcggctacaggatgtcgacaaaacgcactccagcattccaattcaatgtgatgatgggctgttttatgcttctgcagctcaggttgaagtcattgatcgtggtggtttggcaattgctgctaatctgagggcccagcatgacttgaacccaaatcatgtaaagaaaagtcgtgatggctcaaaactgcacaaaagtttaggattgaagcgccgtagacagtttggagcagttctaaataaatacagaacaatcactgtaaattctatcagttgggatgtgactggcgatattaaccagattgaagacttgcttaatgatgctttttttatcggcaaaaaaagaacagcaggttatggtgaagttataagttgggacttcaagaacagtgaaacagacggtctcatagatgcgcaaggacaggcactaaggcctattccggtagaacgttttaatggtgataagtctttgccaataattgataccgcttggaagcctgcttattggaatcctgagaacaggtcagcctgttatgctcctgagcctgtctcatgaatacatttgtttttctccgggagcattttgctagatatgttttgcctgatcttagcaatgacgcagtcgcagactgcaaacgtgcactcacgatgaaccatctccttgttaccggaaagtcggggaggttaagcggttgggtaatggttaaaaaagataaaacctatatccaagccaaaattgcagcaaagcatgcaaaccttataaccgccgatccacgtacccggtatgaagcatggtatgaggagctcgaaaatttttcaggacctacctgctttatagaatttacaaagagtacctttaatattggcaatatctttttgacccatgatgcgcgagttgtaaaaatttgtgggccagcttcgtctcaaacattcaattataccgatgaaccaaacgaagcttctggtgtagcacataaagtgctcgccaagatgcggagaaaaaatgctgtttgattataaaatattaaaatctgatgcaaaaaatgcctatgacttgcatcagcttgtcgctgccacctttaagggtgagagtggcagaaatttgttctgtgattacggcgaccacatacgtgtgcggagcacaaagcacactctaaatgcgaaacaaggtgtcgccgttactgtgcctgccgtcggcgcaatagctttcattgaattgcgagcatcctgttatgtgtctgggggaggaaaaaaatatttcctgatgcaaggtgattggagagccaggcatacctggcttgaaaaaaagagcgcccaaagtggcttttcggttttaaatgtaacctgtcaatcagaactgatgaaaatcccaaagccaggtgcacagttcacgcttgattgcaccgactttgctgcaaccatcaagatcaatgacatagaaaaattcgaaactgccttgcgcgatggaattggatcgaaaggcagagcgtttggttttggaatgcttgttttatgaataatatggagacaatgaaatggtaaatacgatctttaatatggttctaacatctgagcagcctttgagtatcacgctacccgtggccgagtacactcgggcaaataaatttgctaactctccagttatgacccgagggctcgacgcggaaggtgcgaagcaagaaacatgttacattcctgctacgacttttcgcggaatgctcaggcgtcatgtggttgtcccgctgatggaggagcgagccagaaacggtgatcactatactttggatgaagcctaccgtgatttgattgggcaggatgctgccagcgaacaacagccagatgaaattgatctgatggctttaaaaaatatgcgtgcacaaaatccaattgtcgatttgtttggtctcggtttgggtgttcaatcacgcctaaaagtcagtcactttcttccagagcataatattttgccagaggtatttaccaccgctcgaaaggacttaggcgatgcagacgatggtgcaatactggacttggttcgcgatgaagagagagaaaaatatctcaaaagagccaacgcaaattcaaagagatctgctgcagaaagccttctggcgcggctggtgaagcagaagaaaaaggacggttcatcagcagacttggatgctcaaatagttgcgacagaaagtaaggttgaagagtaccgtgatgcgatggatggcatgaccaattcttctcggaccatacttacgcattacgccatgcctgcgggtgtacagtggacgggacgtttaattattacaaactccactgaaaaagatatcgatgctctgtgtggagccttagatcgtttcagtagctatccgatgattggtgcccagcatgcccgtggatgcggtgagattagtggtattgctaatatagaaacagatagaaggctggttaaaagaattagttttggtggctttgcgccagcacaaatagacaacgtagcctaggatgaaggagctaatcatacattttttatattggaaatgcggttaaagttaacttttctaaatggttatgaaaactctgttgtggcccccattaatttgtggggcaactgaaactcgaaggtctgtattgtacggtcatagaaggttgtggcccccatttatttgtggggcaactgaaaccataaccctgacaccttctattggactaatgctgcggcccccagtagtttgaggggcaactgaaacatggagcaacaactaataaaaacactactggttgtggcccccattaatttgtggggcaactgaaacaagtcggtggccagttgggtgttgtaggatgttgtggcccccattaatttgtggggcaactgaaacgatggcttcacgcaagttatagcagccgatgttgtggcccccattaatttgtggggcaactgaaactctgcaccgaagcggatcttttgccgccccgttgtggcccccattaatttgtggggcaactgaaaccgccgcgtacccggccttatttctgcgatgttgtggcccccattaatttgtggggcaactgaaacaagatggcttgcccaggtgcgccagcctgccgttgtggcccccatcgatatgtggggcaaaataaagagagccaagcatgctagttttggctctctttaacgtaacgcaccatatgaagttggatttaactagtgtttaattcacacttttggttaggtttactgattcaaagtggaaaatgggggatgatcagaatttttagatcggaagagcaagatcagttttttaagctgatccaaaaacatatagaaacccctgatgcacctttactgctggaaggagccactggactgggtaaaacgctgccgttccttgttgccgcagcggtaagtggtaaaaaggttgcgatagttttcccaacccatcagctgatcaatcaggctttggatagctgggacttaaaagcaacacttgcggcctatcccgcagtgattgtgaaggcctttagacctaggtcatatttcgaagcctcacctgcagattacgcggcacacaaacaagaagcgttagacgcagacataatgttctgcacctcggtatccgtgatcatagaccaaagactcaatggcgattataatggctcaacagacagagatgtgattatctttgatgaggcagatcagcttcctcaatttgctgctttgacctctgatatttcactcagcagaattgatctaagaagcctcagaattaatgaatcttcgccaaaagagaccattgatgcaatcttcaaaaagaagacattgccgtcagaaatcagggcaaaggcgcgcttgatagaagaagcgttaggccttggcgatgtttggtttattaaggtgggttttgcggatgatggagccttagaggtgcgctcacgcttgcctggaaggctgttaaaacgcgtatccaaccgagcatcgacaatttttataagcgcaaccctgtctgtaaatggtacatttaaagacttttgtcgtgcgatgggaatagaagagaagagtagactgtctgcaatagttgagcccaagaaacatggggacctacaatttgattttataactgatgaagagcttggaagcgatgcttggctggacgcagtttgtgaagcaattgaatatgccgatcatcctgtactggtcgctacaccgtcgcattctttagctcaacagattgcaagtaatgctactcaggcgaccttaagagccgcggatgaaacaacgtcgcaagctgctgcgcgtatgggagatacaaaggttctcatagcagcgggtgcatgggcagggcttgatacgccggtacaatggaaaacggttgtggtacctagaataccctacactgggccaaacaatctcagagagttttggtatgatgatgaagaggactttggcgtccagaagccagatccgatgtcatcttttatagattcaaaaaatgctgcggctcgtaggctgaagcaggtctttggcagaggcttaagaacacccgatgccgaatgctcaataatactttgcgacccgcgaattgatcgttttaataagattgcaccagccagatttcagaaaacgtattttgagggaatggccatttcagttaatgcaacaaaatctgaacgttcgcctctgcttagaaaagcagcactcgctcattatggtgaaacctgcatggcctgtgactttattcctgagtctttaaggcaattagaaatccaccatcttgagccccttgctgatcgtgggccaagccacacgaccctgaatgacgtcgtggtattgtgcagaaactgccacggtttggcacatgacactaatccgcccatacagttgccagagcttaaattacgatctcaaaagttgaaaaagaaaagacctggattgtccatgatttaaagatttcgattttcctgtacgctggtatccattaagttaaccagtcaatttggctgatcccaaacaacaattgtttgatgaatagccccagttttttgccgtactgacataccactgacacgtgactgcgcatacgcactggctaagtaactaggttttaacgaaattggatagaattttgttaaaacggaatgtcgtcgttatcaaacgaattaatatccgcaattggtggagtgttggcgttttggaaattaactgactgcgagctgttagcgtcgttaccattgcgtgaaactttccacgccttaacatccgtgtaccaacgcccattatattctcggctctccagatcgattgaaacctcaacggtttctccctgctggatattaaactgatcaatcttatcaccccaagccatgaagcagactttcttggggtattgggcctcagtctccagaacatactcttgcttgcgccattctccattcgctgactgtccggatttaacttccaatatttcaacaatcttccctgaaatttccaaagtcattacctttcctgcatccattgtccctagttactttcgtatcaaactaggcgatctgaataaaaggccaagcgtattcttctgaatcttgtggattgagttgaagctacgcatgtgcagtaaattgtaggtatggatattcagtttgccaaatacaaagagcttatcgagcagcaattagaggggcttactgcagaggatgtgctgggccagagcgcacagaagactgtcga

SEQ ID NO: 184 - DNA, 12515 bp, Artificial Sequence
  Synthetic Oligonucleotide
  misc_feature (1)..(3647): n is a, c, g, or t
nnnnnnnnnnnnnnnnnnnnnnnnnnnnnnnnnnnnnnnnnnnnnnnnnnnnnnnnnnnnnnnnnnnnnnnnnnnnnnnnnnnnnnnnnnnnnnnnnnnnnnnnnnnnnnnnnnnnnnnnnnnnnnnnnnnnnnnnnnnnnnnnnnnnnnnnnnnnnnnnnnnnnnnnnnnnnnnnnnnnnnnnnnnnnnnnnnnnnnnnnnnnnnnnnnnnnnnnnnnnnnnnnnnnnnnnnnnnnnnnnnnnnnnnnnnnnnnnnnnnnnnnnnnnnnnnnnnnnnnnnnnnnnnnnnnnnnnnnnnnnnnnnnnnnnnnnnnnnnnnnnnnnnnnnnnnnnnnnnnnnnnnnnnnnnnnnnnnnnnnnnnnnnnnnnnnnnnnnnnnnnnnnnnnnnnnnnnnnnnnnnnnnnnnnnnnnnnnnnnnnnnnnnnnnnnnnnnnnnnnnnnnnnnnnnnnnnnnnnnnnnnnnnnnnnnnnnnnnnnnnnnnnnnnnnnnnnnnnnnnnnnnnnnnnnnnnnnnnnnnnnnnnnnnnnnnnnnnnnnnnnnnnnnnnnnnnnnnnnnnnnnnnnnnnnnnnnnnnnnnnnnnnnnnnnnnnnnnnnnnnnnnnnnnnnnnnnnnnnnnnnnnnnnnnnnnnnnnnnnnnnnnnnnnnnnnnnnnnnnnnnnnnnnnnnnnnnnnnnnnnnnnnnnnnnnnnnnnnnnnnnnnnnnnnnnnnnnnnnnnnnnnnnnnnnnnnnnnnnnnnnnnnnnnnnnnnnnnnnnnnnnnnnnnnnnnnnnnnnnnnnnnnnnnnnnnnnnnnnnnnnnnnnnnnnnnnnnnnnnnnnnnnnnnnnnnnnnnnnnnnnnnnnnnnnnnnnnnnnnnnnnnnnnnnnnnnnnnnnnnnnnnnnnnnnnnnnnnnnnnnnnnnnnnnnnnnnnnnnnnnnnnnnnnnnnnnnnnnnnnnnnnnnnnnnnnnnnnnnnnnnnnnnnnnnnnnnnnnnnnnnnnnnnnnnnnnnnnnnnnnnnnnnnnnnnnnnnnnnnnnnnnnnnnnnnnnnnnnnnnnnnnnnnnnnnnnnnnnnnnnnnnnnnnnnnnnnnnnnnnnnnnnnnnnnnnnnnnnnnnnnnnnnnnnnnnnnnnnnnnnnnnnnnnnnnnnnnnnnnnnnnnnnnnnnnnnnnnnnnnnnnnnnnnnnnnnnnnnnnnnnnnnnnnnnnnnnnnnnnnnnnnnnnnnnnnnnnnnnnnnnnnnnnnnnnnnnnnnnnnnnnnnnnnnnnnnnnnnnnnnnnnnnnnnnnnnnnnnnnnnnnnnnnnnnnnnnnnnnnnnnnnnnnnnnnnnnnnnnnnnnnnnnnnnnnnnnnnnnnnnnnnnnnnnnnnnnnnnnnnnnnnnnnnnnnnnnnnnnnnnnnnnnnnnnnnnnnnnnnnnnnnnnnnnnnnnnnnnnnnnnnnnnnnnnnnnnnnnnnnnnnnnnnnnnnnnnnnnnnnnnnnnnnnnnnnnnnnnnnnnnnnnnnnnnnnnnnnnnnnnnnnnnnnnnnnnnnnnnnnnnnnnnnnnnnnnnnnnnnnnnnnnnnnnnnnnnnnnnnnnnnnnnnnnnnnnnnnnnnnnnnnnnnnnnnnnnnnnnnnnnnnnnnnnnnnnnnnnnnnnnnnnnnnnnnnnnnnnnnnnnnnnnnnnnnnnnnnnnnnnnnnnnnnnnnnnnnnnnnnnnnnnnnnnnnnnnnnnnnnnnnnnnnnnnnnnnnnnnnnnnnnnnnnnnnnnnnnnnnnnnnnnnnnnnnnnnnnnnnnnnnnnnnnnnnnnnnnnnnnnnnnnnnnnnnnnnnnnnnnnnnnnnnnnnnnnnnnnnnnnnnnnnnnnnnnnnnnnnnnnnnnnnnnnnnnnnnnnnnnnnnnnnnnnnnnnnnnnnnnnnnnnnnnnnnnnnnnnnnnnnnnnnnnnnnnnnnnnnnnnnnnnnnnnnnnnnnnnnnnnnnnnnnnnnnnnnnnnnnnnnnnnnnnnnnnnnnnnnnnnnnnnnnnnnnnnnnnnnnnnnnnnnnnnnnnnnnnnnnnnnnnnnnnnnnnnnnnnnnnnnnnnnnnnnnnnnnnnnnnnnnnnnnnnnnnnnnnnnnnnnnnnnnnnnnnnnnnnnnnnnnnnnnnnnnnnnnnnnnnnnnnnnnnnnnnnnnnnnnnnnnnnnnnnnnnnnnnnnnnnnnnnnnnnnnnnnnnnnnnnnnnnnnnnnnnnnnnnnnnnnnnnnnnnnnnnnnnnnnnnnnnnnnnnnnnnnnnnnnnnnnnnnnnnnnnnnnnnnnnnnnnnnnnnnnnnnnnnnnnnnnnnnnnnnnnnnnnnnnnnnnnnnnnnnnnnnnnnnnnnnnnnnnnnnnnnnnnnnnnnnnnnnnnnnnnnnnnnnnnnnnnnnnnnnnnnnnnnnnnnnnnnnnnnnnnnnnnnnnnnnnnnnnnnnnnnnnnnnnnnnnnnnnnnnnnnnnnnnnnnnnnnnnnnnnnnnnnnnnnnnnnnnnnnnnnnnnnnnnnnnnnnnnnnnnnnnnnnnnnnnnnnnnnnnnnnnnnnnnnnnnnnnnnnnnnnnnnnnnnnnnnnnnnnnnnnnnnnnnnnnnnnnnnnnnnnnnnnnnnnnnnnnnnnnnnnnnnnnnnnnnnnnnnnnnnnnnnnnnnnnnnnnnnnnnnnnnnnnnnnnnnnnnnnnnnnnnnnnnnnnnnnnnnnnnnnnnnnnnnnnnnnnnnnnnnnnnnnnnnnnnnnnnnnnnnnnnnnnnnnnnnnnnnnnnnnnnnnnnnnnnnnnnnnnnnnnnnnnnnnnnnnnnnnnnnnnnnnnnnnnnnnnnnnnnnnnnnnnnnnnnnnnnnnnnnnnnnnnnnnnnnnnnnnnnnnnnnnnnnnnnnnnnnnnnnnnnnnnnnnnnnnnnnnnnnnnnnnnnnnnnnnnnnnnnnnnnnnnnnnnnnnnnnnnnnnnnnnnnnnnnnnnnnnnnnnnnnnnnnnnnnnnnnnnnnnnnnnnnnnnnnnnnnnnnnnnnnnnnnnnnnnnnnnnnnnnnnnnnnnnnnnnnnnnnnnnnnnnnnnnnnnnnnnnnnnnnnnnnnnnnnnnnnnnnnnnnnnnnnnnnnnnnnnnnnnnnnnnnnnnnnnnnnnnnnnnnnnnnnnnnnnnnnnnnnnnnnnnnnnnnnnnnnnnnnnnnnnnnnnnnnnnnnnnnnnnnnnnnnnnnnnnnnnnnnnnnnnnnnnnnnnnnnnnnnnnnnnnnnnnnnnnnnnnnnnnnnnnnnnnnnnnnnnnnnnnnnnnnnnnnnnnnnnnnnnnnnnnnnnnnnnnnnnnnnnnnnnnnnnnnnnnnnnnnnnnnnnnnnnnnnnnnnnnnnnnnnnnnnnnnnnnnnnnnnnnnnnnnnnnnnnnnnnnnnnnnnnnnnnnnnnnnnnnnnnnnnnnnnnnnnnnnnnnnnnnnnnnnnnnnnnnnnnnnnnnnnnnnnnnnnnnnnnnnnnnnnnnnnnnnnnnnnnnnnnnnnnnnnnnnnnnnnnnnnnnnnnnnnnnnnnnnnnnnnnnnnnnnnnnnnnnnnnnnnnnnnnnnnnnnnnnnnnnnnnnnnnnnnnnnnnnnnnnnnnnnnnnnnnnnnnnnnnnnnnnnnnnnnnnnnnnnnnnnnnnnnnnnnnnnnnnnnnnnnnnnnnnnnnnnnnnnnnnnnnnnnnnnnnnnnnnncttacggtagcaatcttgggtagcgagaccgacgaagcgtcgggggttgaaaagttggttttactcactgtggtcaacagcgaaaccgcgctcgccgatgtactcgatagcctcaaggactagggttccaataagggtgggcgagaagaccccgcaagtagttgattcttggtgcgacgcgaaggggtttttcagcgttccacaagtagtagatttggtttaggcaccgtacgataaagaataaaaattttgtcaccaagcgtatctctaggattaggaggttcccgatgttcggaatcacagtgattgagcgcaggcttcgcgatgagcgtgatgacgagtgacgcaatagcaatggcgcgtgttggaggatctatgcgtagttatattctcgtaacaataaactccctaatcctaatatctcttgccgcttgtggcactcaggagtccgtctctccgccgaaacttgaggcggctgaaaacagcgataagccatcgacggaaactactagctcttcgacgaatacttgcgatggcttatcaggcgccaagtacaacgattgcgttgtaaagaattctcccgatactgcggcagcgatcctaacgcctagcgttacgtcaaaatggaatgtggttgagaataaagacgagatgactggggcatcagaggtcgtatccgtttacggcgagggcgatacggagcaaacgcaactagtacttcgatgtaacgataaaaaaatactgcttttcgaggtagtcattggaaatggcgaccttgttgatcaaaccgaacagcaggtgcgctcgactaatatatggaatgacgacgcgccaaaatattgggaagccgtcgtatactcggctgcacgaataaaaatgtctgaaaatgatggcgttgcgaatattatgcttcgtgaaagtaatgagtttagtaatcagtatatttggggattgcaaataacaagcgaaaacaaggcgttgataaatctaagcactttcatgcttgaaatgacgcttagtaatggccaaaaaagattaataaaaggggatgcggtagtcggagactggttcgagaagttctgtactactccagagagcgaacttccttagtgtaaagctccgacggctcaggatcgttttgttaccgctcggtgtgcttcagcttgaggtacatattcctgcgtttgtttcacatgaactcgcggagggacgtcaggtccgtttgctcttctctgccacaatccaagcatggtcgctctgaagcagtgcttttcgctgtcgctcgctgagggtccgagcgtcgtagacctcaaggtcgcgggagtggcgccgaaaggtttccatcaatgccttggtttctgtggaggtgagtggcttgccaggcttcatcaggcaactcttgctctgagcagctcagccgcttgtgggttggtgtagatggcaatttcgagctctttggcggcttcacggcagaactcaccgtcagtcattcccacaaactcagcagctttgcgaatgcggctcttgaggtcgttggtggtgcggaaggcaatttgttcattcttgatcagcgtgtgttgtcttggcatttgtcaggctccatcaggtgcgttgtcgactatttagcgtgtagggcgagggcaaggcggtagaggtgagtgggtctcactcgaacaggtgcgcaaggttgtggcgaacgggttccgcagccgcagaaggcgactgaggagcactggttgaaacagttccaccgcgtggcacctcaatacccacattgatttcattcgtatcagcgtcgcgccaagcgcagaagaacaactcaggctcagcatttccgcggttgaactcgcgagcgatgtgcgccgcaattcgccaatcgagcttttcgacgcctcggtgtttcgcatagtgcgtgggtgatccccgtttgggactgtcagactgcgacggcacgagtgaaataaagtagtgactattgttgtttttgctcattgttgaaagatctcgttttggctaaagcactgcttctatttagcgtttctgtgcttttcgaattttgcgtatctcagccaattgctcaccgcgtcgcctccgcaatcgttgtgagtggtaagttcagagggagtgtttgcgattcgagtcacctcgaaccgtttgactcgagttggtctgatattgcgttcgttgcgtgaccaagagcgcagagtgtttgtgagacgcttgttcagcgacccattcacccacaccttgtgcgcgtaatctttcttgatacaaacgattccgtgaaaatgaatcgttggctcatagtgaagagagtacttagacgcgattaggtaatgccgcttgctcttaggtagaaactgctgaaacgcttggagtagaaacttgctccatagctcgtggaagtcttgggttctagagtattggtttccttggtcatcattcggcactagcgttaccaatgtgacggcgagtaaaagatgaccgttctcagagtggtttgtgaactctctgatgtcagactccagggtgtcattagtgctagaaggtttagatccttcaggtaagtttgtaaggttctcttttgctctgcgtcttggaccaaaaccaagtaatccattggctagttcctctttatgtcgtgactcatacgcttgcttgtcttgggtctctttgactttccaccaaattaagcagtagtagaggaatagtgtttgtagcgttggatctgtcagtctcatcggtcgttctcagtgtttcttgggcaatagttagtcaattgggctcagcaccctcgttgtaaaactgaatacacgctaacgagcttcttgggggtggttgttcttttgccaccaagagtcagttagcctgagcactcccacaggactatttcggtgtacctgtgggttgaaccttcagaggagacgacaccctatctcccatagatatatataaaaaaaagcactgaaaacgccctactgaacgctttttttcgaaaaaagtttcgcttgttcttgccgtcagatagcagagggtcaatttctgacactgcgacctgtcagaggattgtcagggctgcgtaaaagcaatagggtgggcggatatggatcgctttgctgtcacgctgcgtctcgcctcccccttggttacgggtgggggctatatgacgctagacgcactcctggcggcggtactatttgattcaggggaaaccgtcgaggctgctcacgcgaaagtgcctctcaagaatactcaagggctttggcacggaagtgccgctgtttacgaaactcttgaagtgggacgccaagcgttcgttgccaatctgcgtgccactcacgatctgactcctgaccttatcgccaagaacaagcacggagcactccacgcaaaaatcagtttaggacgccgtcgtgacttcggacctgtaatgaatgggtaccaatacttggtggcggagtcgttgacgtggtacggcgagggggactcagccgccgtagaacgcttgctccgcaccgtgagatttattggaaaacgtcgagcgagtggctttggtgaggtgagcggggtcgaaatgtcgccgtctgatgtggatggtgtagtgggaatgcttggcgatcccttgcgtcctgttcccttagagctattcacgggggacaagagcgcgatacgaggtgacgctgcgtggaaacctgcctattggcgtcctgagaatcgtgcgatttgttatttaccgtcacaaaactaaatgaatacttacgaattttttatggagcactttgggcgtcatctcattgacgcagaggggctgaccgcagcacagggaacagagaaagcgctgagtagcaactacactacgctgaagggaactcctagtcgtcttcagtctggttgggcagttgttcgccctggtgtttcttctcttcaattgaagattaccgctaaaggtattgcttacgacaaccgcactgcgatggaagcatttatagacgagctgaccacgtgggacggcgactcgccaaggatattccttcaatttgagaaggcacccgtcccgatatctaatctctttatcacggttgatcgtcggttgattcgtatttgttcgccaaaaggcgtcgcatcgtttgatatgaacgtggaccctgactcctccgccacgattgttcaacgcgcaatttggaagcggttgccaaaatgatttgcgactacaccatttctaaacctgagagcctcggtctgtacgcggtccatcggtttgtcgcgcagctttgtgatggtgtgccgtgcctgtttgtggatcgtggtgatcgcgtggtgattcgtaccgccaagcctttgtgtgatcgcgtgacagaggtttccgtgccttccgtgggcgatgtgattgcgttttccttgcgatctgccgtgtcgaagcgtcaaaaaggcaagaatgtctatgcgccacttaacgattggcgagcgcgtcaccaatggctagagaagcgtgccgtaaagaatggctttgcgcttcttgcgcttcacgcaacaagcaagagcgtgaaagtagagcgcgagggcggtcagtactttcaaatggattcaaccgattttacaggggtgctcaaggtgaccgatgagcagctctttgtggcgtgtctgactcgcggaattgggcgggtgggcaagccttacggaatgggaatgctcgtaatctagcaacggtttggaggctttatggctaacagagtgattgtcaaagtgacgctacggaccaagggaccgttgtcgctcaagatgcctgtggcggaaggtgctcgtgaaaacgagtttgataactttcctgtgatgacgcgaggagtagacgcggagggagccaagcagcgtacaggctatcttcctgcgactactattcgtggatttttgcgaagggcggtcacgctgaagcgaatgcgagatgccgcagcgcaaggcaagccctacaggttgccgcaaatttataatgaaatgatcggtcaagacgccgagagcgagaagaaagcagaggaaatcgatttaatcgaaattcagaaagcacgcgacagcagtcctgtcgtggatctgtttggatcaggactcaatgtgaagtcacggctcttggtgagtcacttttgccctgcgctcaatattcttcctgaggcgttcacaggtgttcgtaaggacattgacgatacagaagacgccttagagttgatggaccctaaagagatggaagggttcgtgcggcgtacagagcgcaatcgtgagcgagctgcggcggctgcgatcgtgaagcagcttgagggaaaaatacggcgcgatgaaagaaaaaacggcgcgtcagaagacgataaaaaagcacttgaggcggcgcggacgaaggagaccgcagcggagggggggatgggtgaaatgaaggtgagcacccgccaactcacaacctactacgcgcttcccgctgagattgagctacacggacgcctcgtgattgaacgggcaaagccacgagacctagagctgttggagtatgcgctgagtgaattgagtcttgcgcctgttcttggtgcgcaatcggcacgaggatgcggcgagattgcgggaacctttgagttcacaaacgaagagggaaagctgatcaagaatgtggtggtaggcggttacagcgcagcaaatatcacgaatttctgagagtgaaaggttgttatttcaaagggaaatcatacggttacagagtatcgatcgcagctcctctgaatttgaggagctactgaaaccgaacaaacctcctatcctgctttcgcagcatcgcagctcctctgaatttgaggagctactgaaacttcgccgagatctggaatgcgggatacggtatcgcagctcctctgaatttgaggagctactgaaacatctcagcagcagcgcggacgatggctcggatcgcagctcctctgaatttgaggagctactgaaagggccagtcgtggcgggcagctatgcgtaccatcgcagctcctctgaatttgaggagctactgaaacaaccttgcgactgaccccgccatctggcatatcgcagctcctctgaatttgaggagctactgaaacagcggttccacggcattagggggagcaagtatcgcagctcctctgaatttgaggagctactgaaactgagcgacaacatcaccctgccccgcgctgagcgcagctcctctgaatttgaggagctactgaaacacaaggtagccgccgacggcggccacgacgatcgcagctcctctgaatttgaggagctattttctatagcgccactttaatgtggcgctttttttctgtaccgatagaatcagactatgtttcgttccgttgagcagtccaatttttctgcgcgccttgctgcgcatattcagcaggctgatgcgcctttactgcttgaaggaacaacggggcttggaaaaacaagagcctatctagctgcgctcaacaccgcgattcagcagggcaagcgtgtcgctatcgtcgttccaacgcacgcgctgatcgagcagcttcttgcttcttctgatctcgcgttgattgttccgtcgacagtcactcgcgcagcgttcaagcccaagtcgttctatccatcagctcaggagtttaaagacgcaaaagccttatcgcttgagtcgtcgctgatgatttgtactagctcttcagtgattgttgatcaacgcgccaagggcaactataacggcgtgactactcgcgactatattttatttgacgaagcggatcagctccctcagtacgctgctctgtctagagaccgagaaattcgtggcgcagaactcagggaactcggtgttcgaggctcgactacgaaagagatcgcggagcaggtgatcgcgcacaaaggtgcggaaacggagacccgcgccgcagcggtgatgatcttggaggctcttgatgagcctgcttggtatcacaacgcaggcaagaccgacgatggcgggattgcgctttttcacaaaatgccaggaaggctgcttaagaaagtcgctaaccgctctaatgtcgccttcatcagcgcaacgctctctattggggggaagttcgatgactttaatcgcgcaatgggcattggagagcagagtgcgctctcatcgatcatcgagcctgcgcatcacgggacgctgaaattctttcacgaaccgcacccagttctatcgcaagaatggctcaccgcgacaaccgaagcgatcaccaaggcgaaaaagccaacgcttgtggttacgccaagcaatgaattgtctcagaccttgggtgcgcttttccctgacgccattgttcgtgcggcagaggaaaagacttcagacgcgattttgcggctgacagacaagcagaacatcctgatcgcgtcagccgcgtgggcgggacttgacacgcccattgagtggaaaagcatcgtcattccgcgcattccgttcctgcgccctcaagtgatagacggcaatattgaaagcagcttctttgattcgcggaatagcgctatccgccgaatgcgtcaggtgattgggcgagggctcaggaaacctgaggcggagtgcgaggtgtacattttggatgaccgtttggcgatgattgagtcgttcattccaacgcgattcagagagttgtgggcgaatagacagcgtcttgtggggtcatcgtatgttgaagggcgtgactatgagaaaggcggaaggggagtagagcgtcatccgctggtcagaaaaaacgccctgaagcattttggtagacggtgtatgtcgtgtgacttcgttcccaaagtggacagtcagttagaggttcaccatttgttcccgcttgctgatggcggtgagcgggttacgaagattcaaaccgatgtggcggtgctttgcgccaactgtcaccgtttggcgcattcggcgtcgccgccgctgcctcttggggtcctgagaggacttcaccaagacggcgggttatcagggtagggtgaatacagcgagagggcggttccataagggttccgcaatcgaccccatacctgcgcttacctcacccctcaagccgccaatagccccttggacttgagcgtatggaaggctgtcccaacgccacaacgaagggtctgactgatcttcttgggtgacatacccttcttgtagagttcgacgatggcggctcgagtgctgtcagtcacgctagagggtcgaccgagtttcttcccttccttacgagcgcgttccacgcctaacttgatccgctcgcggatgaggtcgcgttcgaattcagcgaaggacgagaacacaccgaacatcagcttccctgaagggctcgtggtgtctaaagcctgttggtggaagtagagctgaacgcctgaagcgtgaagatcgttcacagtggtgacaaggtgctgtagagagcgtccaaggcggtcgatgctccaaacggcgatgaggtcgaactcacggcgagtggcggcttttaagagggcatcgagggcagggcgaccatcgcgacccttggctcctgagatcccatcgtcgcggtaagtagcgacgatgttccatcccctagcggcggcgacacgctcaagctcgtggagttggttgtcggcggtttggtgagcggtggagactcgaagatagagtgcggttttcatagcgacctcttgagctgtacaaatgtacagttattttacctgtcgagatcctaaaaactagcaatttactgaataaaaacagtcgtttacgaaggctgaggaccgtcgctatctcccgatttagccgccttggaactcctcttcgctctcttggcgagagggggttctttgccctccacccatgagtggagcttcctg

SEQ ID NO: 185 - DNA, 12509 bp, Artificial Sequence
  Synthetic Oligonucleotide
  misc_feature (1)..(8952): n is a, c, g, or t
nnnnnnnnnnnnnnnnnnnnnnnnnnnnnnnnnnnnnnnnnnnnnnnnnnnnnnnnnnnnnnnnnnnnnnnnnnnnnnnnnnnnnnnnnnnnnnnnnnnnnnnnnnnnnnnnnnnnnnnnnnnnnnnnnnnnnnnnnnnnnnnnnnnnnnnnnnnnnnnnnnnnnnnnnnnnnnnnnnnnnnnnnnnnnnnnnnnnnnnnnnnnnnnnnnnnnnnnnnnnnnnnnnnnnnnnnnnnnnnnnnnnnnnnnnnnnnnnnnnnnnnnnnnnnnnnnnnnnnnnnnnnnnnnnnnnnnnnnnnnnnnnnnnnnnnnnnnnnnnnnnnnnnnnnnnnnnnnnnnnnnnnnnnnnnnnnnnnnnnnnnnnnnnnnnnnnnnnnnnnnnnnnnnnnnnnnnnnnnnnnnnnnnnnnnnnnnnnnnnnnnnnnnnnnnnnnnnnnnnnnnnnnnnnnnnnnnnnnnnnnnnnnnnnnnnnnnnnnnnnnnnnnnnnnnnnnnnnnnnnnnnnnnnnnnnnnnnnnnnnnnnnnnnnnnnnnnnnnnnnnnnnnnnnnnnnnnnnnnnnnnnnnnnnnnnnnnnnnnnnnnnnnnnnnnnnnnnnnnnnnnnnnnnnnnnnnnnnnnnnnnnnnnnnnnnnnnnnnnnnnnnnnnnnnnnnnnnnnnnnnnnnnnnnnnnnnnnnnnnnnnnnnnnnnnnnnnnnnnnnnnnnnnnnnnnnnnnnnnnnnnnnnnnnnnnnnnnnnnnnnnnnnnnnnnnnnnnnnnnnnnnnnnnnnnnnnnnnnnnnnnnnnnnnnnnnnnnnnnnnnnnnnnnnnnnnnnnnnnnnnnnnnnnnnnnnnnnnnnnnnnnnnnnnnnnnnnnnnnnnnnnnnnnnnnnnnnnnnnnnnnnnnnnnnnnnnnnnnnnnnnnnnnnnnnnnnnnnnnnnnnnnnnnnnnnnnnnnnnnnnnnnnnnnnnnnnnnnnnnnnnnnnnnnnnnnnnnnnnnnnnnnnnnnnnnnnnnnnnnnnnnnnnnnnnnnnnnnnnnnnnnnnnnnnnnnnnnnnnnnnnnnnnnnnnnnnnnnnnnnnnnnnnnnnnnnnnnnnnnnnnnnnnnnnnnnnnnnnnnnnnnnnnnnnnnnnnnnnnnnnnnnnnnnnnnnnnnnnnnnnnnnnnnnnnnnnnnnnnnnnnnnnnnnnnnnnnnnnnnnnnnnnnnnnnnnnnnnnnnnnnnnnnnnnnnnnnnnnnnnnnnnnnnnnnnnnnnnnnnnnnnnnnnnnnnnnnnnnnnnnnnnnnnnnnnnnnnnnnnnnnnnnnnnnnnnnnnnnnnnnnnnnnnnnnnnnnnnnnnnnnnnnnnnnnnnnnnnnnnnnnnnnnnnnnnnnnnnnnnnnnnnnnnnnnnnnnnnnnnnnnnnnnnnnnnnnnnnnnnnnnnnnnnnnnnnnnnnnnnnnnnnnnnnnnnnnnnnnnnnnnnnnnnnnnnnnnnnnnnnnnnnnnnnnnnnnnnnnnnnnnnnnnnnnnnnnnnnnnnnnnnnnnnnnnnnnnnnnnnnnnnnnnnnnnnnnnnnnnnnnnnnnnnnnnnnnnnnnnnnnnnnnnnnnnnnnnnnnnnnnnnnnnnnnnnnnnnnnnnnnnnnnnnnnnnnnnnnnnnnnnnnnnnnnnnnnnnnnnnnnnnnnnnnnnnnnnnnnnnnnnnnnnnnnnnnnnnnnnnnnnnnnnnnnnnnnnnnnnnnnnnnnnnnnnnnnnnnnnnnnnnnnnnnnnnnnnnnnnnnnnnnnnnnnnnnnnnnnnnnnnnnnnnnnnnnnnnnnnnnnnnnnnnnnnnnnnnnnnnnnnnnnnnnnnnnnnnnnnnnnnnnnnnnnnnnnnnnnnnnnnnnnnnnnnnnnnnnnnnnnnnnnnnnnnnnnnnnnnnnnnnnnnnnnnnnnnnnnnnnnnnnnnnnnnnnnnnnnnnnnnnnnnnnnnnnnnnnnnnnnnnnnnnnnnnnnnnnnnnnnnnnnnnnnnnnnnnnnnnnnnnnnnnnnnnnnnnnnnnnnnnnnnnnnnnnnnnnnnnnnnnnnnnnnnnnnnnnnnnnnnnnnnnnnnnnnnnnnnnnnnnnnnnnnnnnnnnnnnnnnnnnnnnnnnnnnnnnnnnnnnnnnnnnnnnnnnnnnnnnnnnnnnnnnnnnnnnnnnnnnnnnnnnnnnnnnnnnnnnnnnnnnnnnnnnnnnnnnnnnnnnnnnnnnnnnnnnnnnnnnnnnnnnnnnnnnnnnnnnnnnnnnnnnnnnnnnnnnnnnnnnnnnnnnnnnnnnnnnnnnnnnnnnnnnnnnnnnnnnnnnnnnnnnnnnnnnnnnnnnnnnnnnnnnnnnnnnnnnnnnnnnnnnnnnnnnnnnnnnnnnnnnnnnnnnnnnnnnnnnnnnnnnnnnnnnnnnnnnnnnnnnnnnnnnnnnnnnnnnnnnnnnnnnnnnnnnnnnnnnnnnnnnnnnnnnnnnnnnnnnnnnnnnnnnnnnnnnnnnnnnnnnnnnnnnnnnnnnnnnnnnnnnnnnnnnnnnnnnnnnnnnnnnnnnnnnnnnnnnnnnnnnnnnnnnnnnnnnnnnnnnnnnnnnnnnnnnnnnnnnnnnnnnnnnnnnnnnnnnnnnnnnnnnnnnnnnnnnnnnnnnnnnnnnnnnnnnnnnnnnnnnnnnnnnnnnnnnnnnnnnnnnnnnnnnnnnnnnnnnnnnnnnnnnnnnnnnnnnnnnnnnnnnnnnnnnnnnnnnnnnnnnnnnnnnnnnnnnnnnnnnnnnnnnnnnnnnnnnnnnnnnnnnnnnnnnnnnnnnnnnnnnnnnnnnnnnnnnnnnnnnnnnnnnnnnnnnnnnnnnnnnnnnnnnnnnnnnnnnnnnnnnnnnnnnnnnnnnnnnnnnnnnnnnnnnnnnnnnnnnnnnnnnnnnnnnnnnnnnnnnnnnnnnnnnnnnnnnnnnnnnnnnnnnnnnnnnnnnnnnnnnnnnnnnnnnnnnnnnnnnnnnnnnnnnnnnnnnnnnnnnnnnnnnnnnnnnnnnnnnnnnnnnnnnnnnnnnnnnnnnnnnnnnnnnnnnnnnnnnnnnnnnnnnnnnnnnnnnnnnnnnnnnnnnnnnnnnnnnnnnnnnnnnnnnnnnnnnnnnnnnnnnnnnnnnnnnnnnnnnnnnnnnnnnnnnnnnnnnnnnnnnnnnnnnnnnnnnnnnnnnnnnnnnnnnnnnnnnnnnnnnnnnnnnnnnnnnnnnnnnnnnnnnnnnnnnnnnnnnnnnnnnnnnnnnnnnnnnnnnnnnnnnnnnnnnnnnnnnnnnnnnnnnnnnnnnnnnnnnnnnnnnnnnnnnnnnnnnnnnnnnnnnnnnnnnnnnnnnnnnnnnnnnnnnnnnnnnnnnnnnnnnnnnnnnnnnnnnnnnnnnnnnnnnnnnnnnnnnnnnnnnnnnnnnnnnnnnnnnnnnnnnnnnnnnnnnnnnnnnnnnnnnnnnnnnnnnnnnnnnnnnnnnnnnnnnnnnnnnnnnnnnnnnnnnnnnnnnnnnnnnnnnnnnnnnnnnnnnnnnnnnnnnnnnnnnnnnnnnnnnnnnnnnnnnnnnnnnnnnnnnnnnnnnnnnnnnnnnnnnnnnnnnnnnnnnnnnnnnnnnnnnnnnnnnnnnnnnnnnnnnnnnnnnnnnnnnnnnnnnnnnnnnnnnnnnnnnnnnnnnnnnnnnnnnnnnnnnnnnnnnnnnnnnnnnnnnnnnnnnnnnnnnnnnnnnnnnnnnnnnnnnnnnnnnnnnnnnnnnnnnnnnnnnnnnnnnnnnnnnnnnnnnnnnnnnnnnnnnnnnnnnnnnnnnnnnnnnnnnnnnnnnnnnnnnnnnnnnnnnnnnnnnnnnnnnnnnnnnnnnnnnnnnnnnnnnnnnnnnnnnnnnnnnnnnnnnnnnnnnnnnnnnnnnnnnnnnnnnnnnnnnnnnnnnnnnnnnnnnnnnnnnnnnnnnnnnnnnnnnnnnnnnnnnnnnnnnnnnnnnnnnnnnnnnnnnnnnnnnnnnnnnnnnnnnnnnnnnnnnnnnnnnnnnnnnnnnnnnnnnnnnnnnnnnnnnnnnnnnnnnnnnnnnnnnnnnnnnnnnnnnnnnnnnnnnnnnnnnnnnnnnnnnnnnnnnnnnnnnnnnnnnnnnnnnnnnnnnnnnnnnnnnnnnnnnnnnnnnnnnnnnnnnnnnnnnnnnnnnnnnnnnnnnnnnnnnnnnnnnnnnnnnnnnnnnnnnnnnnnnnnnnnnnnnnnnnnnnnnnnnnnnnnnnnnnnnnnnnnnnnnnnnnnnnnnnnnnnnnnnnnnnnnnnnnnnnnnnnnnnnnnnnnnnnnnnnnnnnnnnnnnnnnnnnnnnnnnnnnnnnnnnnnnnnnnnnnnnnnnnnnnnnnnnnnnnnnnnnnnnnnnnnnnnnnnnnnnnnnnnnnnnnnnnnnnnnnnnnnnnnnnnnnnnnnnnnnnnnnnnnnnnnnnnnnnnnnnnnnnnnnnnnnnnnnnnnnnnnnnnnnnnnnnnnnnnnnnnnnnnnnnnnnnnnnnnnnnnnnnnnnnnnnnnnnnnnnnnnnnnnnnnnnnnnnnnnnnnnnnnnnnnnnnnnnnnnnnnnnnnnnnnnnnnnnnnnnnnnnnnnnnnnnnnnnnnnnnnnnnnnnnnnnnnnnnnnnnnnnnnnnnnnnnnnnnnnnnnnnnnnnnnnnnnnnnnnnnnnnnnnnnnnnnnnnnnnnnnnnnnnnnnnnnnnnnnnnnnnnnnnnnnnnnnnnnnnnnnnnnnnnnnnnnnnnnnnnnnnnnnnnnnnnnnnnnnnnnnnnnnnnnnnnnnnnnnnnnnnnnnnnnnnnnnnnnnnnnnnnnnnnnnnnnnnnnnnnnnnnnnnnnnnnnnnnnnnnnnnnnnnnnnnnnnnnnnnnnnnnnnnnnnnnnnnnnnnnnnnnnnnnnnnnnnnnnnnnnnnnnnnnnnnnnnnnnnnnnnnnnnnnnnnnnnnnnnnnnnnnnnnnnnnnnnnnnnnnnnnnnnnnnnnnnnnnnnnnnnnnnnnnnnnnnnnnnnnnnnnnnnnnnnnnnnnnnnnnnnnnnnnnnnnnnnnnnnnnnnnnnnnnnnnnnnnnnnnnnnnnnnnnnnnnnnnnnnnnnnnnnnnnnnnnnnnnnnnnnnnnnnnnnnnnnnnnnnnnnnnnnnnnnnnnnnnnnnnnnnnnnnnnnnnnnnnnnnnnnnnnnnnnnnnnnnnnnnnnnnnnnnnnnnnnnnnnnnnnnnnnnnnnnnnnnnnnnnnnnnnnnnnnnnnnnnnnnnnnnnnnnnnnnnnnnnnnnnnnnnnnnnnnnnnnnnnnnnnnnnnnnnnnnnnnnnnnnnnnnnnnnnnnnnnnnnnnnnnnnnnnnnnnnnnnnnnnnnnnnnnnnnnnnnnnnnnnnnnnnnnnnnnnnnnnnnnnnnnnnnnnnnnnnnnnnnnnnnnnnnnnnnnnnnnnnnnnnnnnnnnnnnnnnnnnnnnnnnnnnnnnnnnnnnnnnnnnnnnnnnnnnnnnnnnnnnnnnnnnnnnnnnnnnnnnnnnnnnnnnnnnnnnnnnnnnnnnnnnnnnnnnnnnnnnnnnnnnnnnnnnnnnnnnnnnnnnnnnnnnnnnnnnnnnnnnnnnnnnnnnnnnnnnnnnnnnnnnnnnnnnnnnnnnnnnnnnnnnnnnnnnnnnnnnnnnnnnnnnnnnnnnnnnnnnnnnnnnnnnnnnnnnnnnnnnnnnnnnnnnnnnnnnnnnnnnnnnnnnnnnnnnnnnnnnnnnnnnnnnnnnnnnnnnnnnnnnnnnnnnnnnnnnnnnnnnnnnnnnnnnnnnnnnnnnnnnnnnnnnnnnnnnnnnnnnnnnnnnnnnnnnnnnnnnnnnnnnnnnnnnnnnnnnnnnnnnnnnnnnnnnnnnnnnnnnnnnnnnnnnnnnnnnnnnnnnnnnnnnnnnnnnnnnnnnnnnnnnnnnnnnnnnnnnnnnnnnnnnnnnnnnnnnnnnnnnnnnnnnnnnnnnnnnnnnnnnnnnnnnnnnnnnnnnnnnnnnnnnnnnnnnnnnnnnnnnnnnnnnnnnnnnnnnnnnnnnnnnnnnnnnnnnnnnnnnnnnnnnnnnnnnnnnnnnnnnnnnnnnnnnnnnnnnnnnnnnnnnnnnnnnnnnnnnnnnnnnnnnnnnnnnnnnnnnnnnnnnnnnnnnnnnnnnnnnnnnnnnnnnnnnnnnnnnnnnnnnnnnnnnnnnnnnnnnnnnnnnnnnnnnnnnnnnnnnnnnnnnnnnnnnnnnnnnnnnnnnnnnnnnnnnnnnnnnnnnnnnnnnnnnnnnnnnnnnnnnnnnnnnnnnnnnnnnnnnnnnnnnnnnnnnnnnnnnnnnnnnnnnnnnnnnnnnnnnnnnnnnnnnnnnnnnnnnnnnnnnnnnnnnnnnnnnnnnnnnnnnnnnnnnnnnnnnnnnnnnnnnnnnnnnnnnnnnnnnnnnnnnnnnnnnnnnnnnnnnnnnnnnnnnnnnnnnnnnnnnnnnnnnnnnnnnnnnnnnnnnnnnnnnnnnnnnnnnnnnnnnnnnnnnnnnnnnnnnnnnnnnnnnnnnnnnnnnnnnnnnnnnnnnnnnnnnnnnnnnnnnnnnnnnnnnnnnnnnnnnnnnnnnnnnnnnnnnnnnnnnnnnnnnnnnnnnnnnnnnnnnnnnnnnnnnnnnnnnnnnnnnnnnnnnnnnnnnnnnnnnnnnnnnnnnnnnnnnnnnnnnnnnnnnnnnnnnnnnnnnnnnnnnnnnnnnnnnnnnnnnnnnnnnnnnnnnnnnnnnnnnnnnnnnnnnnnnnnnnnnnnnnnnnnnnnnnnnnnnnnnnnnnnnnnnnnnnnnnnnnnnnnnnnnnnnnnnnnnnnnnnnnnnnnnnnnnnnnnnnnnnnnnnnnnnnnnnnnnnnnnnnnnnnnnnnnnnnnnnnnnnnnnnnnnnnnnnnnnnnnnnnnnnnnnnnnnnnnnnnnnnnnnnnnnnnnnnnnnnnnnnnnnnnnnnnnnnnnnnnnnnnnnnnnnnnnnnnnnnnnnnnnnnnnnnnnnnnnnnnnnnnnnnnnnnnnnnnnnnnnnnnnnnnnnnnnnnnnnnnnnnnnnnnnnnnnnnnnnnnnnnnnnnnnnnnnnnnnnnnnnnnnnnnnnnnnnnnnnnnnnnnnnnnnnnnnnnnnnnnnnnnnnnnnnnnnnnnnnnnnnnnnnnnnnnnnnnnnnnnnnnnnnnnnnnnnnnnnnnnnnnnnnnnnnnnnnnnnnnnnnnnnnnnnnnnnnnnnnnnnnnnnnnnnnnnnnnnnnnnnnnnnnnnnnnnnnnnnnnnnnnnnnnnnnnnnnnnnnnnnnnnnnnnnnnnnnnnnnnnnnnnnnnnnnnnnnnnnnnnnnnnnnnnnnnnnnnnnnnnnnnnnnnnnnnnnnnnnnnnnnnnnnnnnnnnnnnnnnnnnnnnnnnnnnnnnnnnnnnnnnnnnnnnnnnnnnnnnnnnnnnnnnnnnnnnnnnnnnnnnnnnnnnnnnnnnnnnnnnnnnnnnnnnnnnnnnnnnnnnnnnnnnnnnnnnnnnnnnnnnnnnnnnnnnnnnnnnnnnnnnnnnnnnnnnnnnnnnnnnnnnnnnnnnnnnnnnnnnnnnnnnnnnnnnnnnnnnnnnnnnnnnnnnnnnnnnnnnnnnnnnnnnnnnnnnnnnnnnnnnnnnnnnnnnnnnnnnnnnnnnnnnnnnnnnnnnnnnnnnnnnnnnnnnnnnnnnnnnnnnnnnnnnnnnnnnnnnnnnnnnnnnnnnnnnnnnnnnnnnnnnnnnnnnnnnnnnnnnnnnnnnnnnnnnnnnnnnnnnnnnnnnnnnnnnnnnnnnnnnnnnnnnnnnnnnnnnnnnnnnnnnnnnnnnnnnnnnnnnnnnnnnnnnnnnnnnnnnnnnnnnnnnnnnnnnnnnnnnnnnnnnnnnnnnnnnnnnnnnnnnnnnnnnnnnnnnnnnnnnnnnnnnnnnnnnnnnnnnnnnnnnnnnnnnnnnnnnnnnnnnnnnnnnnnnnnnnnnnnnnnnnnnnnnnnnnnnnnnnnnnnnnnnnnnnnnnnnnnnnnnnnnnnnnnnnnnnnnnnnnnnnnnnnnnnnnnnnnnnnnnnnnnnnnnnnnnnnnnnnnnnnnnnnnnnnnnnnnnnnnnnnnnnnnnnnnnnnnnnnnnnnnnnnnnnnnnnnnnnnnnnnnnnnnnnnnnnnnnnnnnnnnnnnnnnnnnnnnnnnnnnnnnnnnnnnnnnnnnnnnnnnnnnnnnnnnnnnnnnnnnnnnnnnnnnnnnnnnnnnnnnnnnnnnnnnnnnnnnnnnnnnnnnnnnnnnnnnnnnnnnnnnnnnnnnnnnnnnnnnnnnnnnnnnnnnnnnnnnnnnnnnnnnnnnnnnnnnnnnnnnnnnnnnnnnnnnnnnnnnnnnnnnnnnnnnnnnnnnnnnnnnnnnnnnnnnnnnnnnnnnnnnnnnnnnnnnnnnnnnnnnnnnnnnnnnnnnnnnnnnnnnnnnnnnnnnnnnnnnnnnnnnnnnnnnnnnnnnnnnnnnnnnnnnnnnnnnnnnnnnnnnnnnnnnnnnnnnnnnnnnnnnnnnnnnnnnnnnnnnnnnnnnnnnnnnnnnnnnnnnnnnnnnnnnnnnnnnnnnnnnnnnnnnnnnnnnnnnnnnnnnnnnnnnnnnnnnnnnnnnnnnnnnnnnnnnnnnnnnnnnnnnnnnnnnnnnnnnnnnnnnnnnnnnnnnnnnnnnnnnnnnnnnnnnnnnnnnnnnnnnnnnnnnnnnnnnnnnnnnnnnnnnnnnnnnnnnnnnnnnnnnnnnnnnnnnnnnnnnnnnnnnnnnnnnnnnnnnnnnnnnnnnnnnnnnnnnnnnnnnnnnnnnnnnnnnnnnnnnnnnnnnnnnnnnnnnnnnnnnnnnnnnnnnnnnnnnnnnnnnnnnnnnnnnnnnnnnnnnnnnnnnnnnnnnnnnnnnnnnnnnnnnnnnnnnnnnnnnnnnnnnnnnnnnnnnnnnnnnnnnnnnnnnnnnnnnnnnnnnnnnnnnnnnnnnnnnnnnnnnnnnnnnnnnnnnnnnnnnnnnnnnnnnnnnnnnnnnnnnnnnnnnnnnnnnnnnnnnnnnngtgaccgtcacgcggggtgaagccaccccggaattgggtggctactgaaacagtagcgggccaggtgtctcgcagtcagcgggtgaagccaccccggaattgggtggctactgaaaccgtgacaggctgaattctcgcgcgctaggaggtgaagccaccccggaattgggtggctactgaaacctcgactactctgtccatgagttcgagtggggtgaagccaccccggaattgggtggctactgaaacaggaactgtgtctcacccatgctcccgtctggtgaagccaccccggaattgggtggctactgaaacctcgatgccgattacgaggccaagcgcgctggtgaagccaccccggaattgggtggctactgaaacccgccgccgcgctgcgatgattgccccgagggtgaagccaccccggaattgggtggctactgaaacagcatcatgcgttccccatggtcttgatgtggtgaagccaccccggaattgggtggctactgaaacttcgttgttagagagggaagaaccgggcgaggtgaagccaccccggaattgggtggctactgaaaccacgccaagatcgccatggagtcgatcgccggtgaagccaccccggaattgggtggctactgaaacagcacgcgctcgacgcggtcgtaatcggccggtaaagccacccccaaattgggtggctactgaaactcgggtgttcggaaaggatggcgtcgatcatggtgaagccacccccaaattgggtggctactgaaacatcaagtcttgcgcgaggcgcttgtgaaggtgaagccacctccgaattgggtggttactgaaacggcgcttgcgagtgatcccgcggcaccaggggtgaagccacccccaaactgggtggctactgaaacatcacgaggttgttttcgagttgcgccagaggtgaagccacccctcaattgggtggcaaatgaaacgacagatcgcaaagcatgtcgcgcgctctggtgaagccacccctgttttgggtggttactggaaggacgtctgatgttccgatcatccgaacagcaaaacttcgccgcgatggtcgccgcccacatctccaaggccgacggcccgttgctgctcgaaggtggcaccggcatcgggaagacgcgcgcctatctgtcggcgctcatcggctccggcaaacgggtcgcgattgtgttgccgacccaccagctcatcgagcagctgcttgcttccaccgatctcgcagaggccaatgccagaggcatcaccgtcgccgcttttcgaccggcgtcgaagttcgataccagggccgactacttggcgaaccgtgaagtcgcggccagtgcgcaactcatgttgtgcactgccgccagtgtcatcatcgaccgccgtctggacggcaaatacaacggcgcgaccgaacgggattatcttctcttcgatgaggctgaccagttgccggcgatggccgctcttcagtccgacatggaggttaccggcgaggccctcaagacgctggggatcgaaggcgaaacgacccgtaatctggccgacgccgtcgtcgcgtccaagaaggccgagccggaacagcgcgccgccgccaagatgatcctcgaagtcctgggcgagcccgcgtggtttcatgtggcaggcaaggccgacgatggtggcatccgcctctggcatcggctaccggggcggctactgcgcgagatcgccaaccaaccaaacgtcgcctttgtcagcgccaccctgactgtcggaggtctgtttaacgacttcaagtgtgcgctcggcatccagagtgaaagcgagctgtcgggtgtcgtcgaacctgagcgacacggcacggtcgagttccggaccgttgtgtcgcaagccgtggacgccgacggctggctcgaaaaggtggcggcgaccgtcaggcaggcagaggctcccgtgctggtcgtaacgccctcgttcgaccgtgctgagaagattggcgcgctggtggaaggcgcgacggtgcggcagcgcgaggaagccgttggcgacgccatggctcgaatgggcggctcccgaaccctgattggggcagccgcctgggccggcctcgacacgcccatccagtggcggtcaattgtcgtgcctgttgtgcctttcgagcgcctgacggagatcgaagggcaagtcgagagccactacatcgatgcgcgcaacacggccgtgcgacgcctgcgccaggtgatcggtcggggactgcggtcgcccgatgcccgctgcaccgtctacttcctcgatcctcgtgtcttgaagctaccggccttctggcccagccggttttcctcggcctgggtggcccgccctcgcgatccgggtgtcctcgaaggggcgcgaggcgaggtggtcctgtccaaagccgagcgcgacacgtctcttagaaagcgcgcccttgcccactacggtctgcattgtcgggcgtgtggtctggtacccaaggtcgccgcccagatcgaggtacatcacctcgaccccatctcggaaggcatccggcgcacgacgttagcggacctgtgccccctttgtcggaactgtcactcacttgcccactccacgagcccgcctatgccggtcgaggaggttgcgaagatcgtgggggcctagggtccgaatgcaattggacgtaacgcgttgccttcaagcttcggcaatccggcaggcagcactagtctaggccgcctgttcgagcgtcgaggcgacgtcgcgcgtggtcacgcggcgcaggtcgcgcaccttggtcgtgtcgaacggccgcgcacgatgcatggtgcagcgattgtcccagatcacgaggtcgcccttcgcccagcgatggacatgcacgaagcgcggctgggtcgcgtgctcgatcaggtcgaggatgatcaggcgcccgtcggccaccggcaggcccaggatgtgcgaggcgtgcgcggcgagatagagcgtcctgcgatgcgagccgggatgggttcgcaccacccgctgcggcaccggcggcagcgaggcgcgttcctcgtcggtgtactgcacgacgcccagctgctcgcgcgaccgccagatcgaatgttcggcgaccagcccttccagctccttcttcttcgtctccggcagcgcgtcgtacgccgcgcgcaagtcggcgaactcggtgtcgccgccttcctcgggaatgacgtgcgcgtagagcatcgagagaccgccgggcacggcgcggaacgaggcgtcggtgtgccagagccggttggccaggccgtcgagccggcgccgcgcgtcgggcttcatgacgttgccgtcgccgtcgaggttggagatgtcggcgacctggctcgatgcgatccggtgcttgatgtcgcgatgccgaagcttcagcgccgacgattcgatcgggccgaaattgctggcaaaggccacctgccgctcgtcgtcgagcgtctgcccgcggaacaccacgaccgcgtagcggttgatggcgtcctcgatggcctgccggtcggtcgggctcagcggtcgtgccacgtcgacac

SEQ ID NO: 186 - DNA, 12462 bp, Artificial Sequence
  Synthetic Oligonucleotide
  misc_feature (1)..(9351): n is a, c, g, or t
nnnnnnnnnnnnnnnnnnnnnnnnnnnnnnnnnnnnnnnnnnnnnnnnnnnnnnnnnnnnnnnnnnnnnnnnnnnnnnnnnnnnnnnnnnnnnnnnnnnnnnnnnnnnnnnnnnnnnnnnnnnnnnnnnnnnnnnnnnnnnnnnnnnnnnnnnnnnnnnnnnnnnnnnnnnnnnnnnnnnnnnnnnnnnnnnnnnnnnnnnnnnnnnnnnnnnnnnnnnnnnnnnnnnnnnnnnnnnnnnnnnnnnnnnnnnnnnnnnnnnnnnnnnnnnnnnnnnnnnnnnnnnnnnnnnnnnnnnnnnnnnnnnnnnnnnnnnnnnnnnnnnnnnnnnnnnnnnnnnnnnnnnnnnnnnnnnnnnnnnnnnnnnnnnnnnnnnnnnnnnnnnnnnnnnnnnnnnnnnnnnnnnnnnnnnnnnnnnnnnnnnnnnnnnnnnnnnnnnnnnnnnnnnnnnnnnnnnnnnnnnnnnnnnnnnnnnnnnnnnnnnnnnnnnnnnnnnnnnnnnnnnnnnnnnnnnnnnnnnnnnnnnnnnnnnnnnnnnnnnnnnnnnnnnnnnnnnnnnnnnnnnnnnnnnnnnnnnnnnnnnnnnnnnnnnnnnnnnnnnnnnnnnnnnnnnnnnnnnnnnnnnnnnnnnnnnnnnnnnnnnnnnnnnnnnnnnnnnnnnnnnnnnnnnnnnnnnnnnnnnnnnnnnnnnnnnnnnnnnnnnnnnnnnnnnnnnnnnnnnnnnnnnnnnnnnnnnnnnnnnnnnnnnnnnnnnnnnnnnnnnnnnnnnnnnnnnnnnnnnnnnnnnnnnnnnnnnnnnnnnnnnnnnnnnnnnnnnnnnnnnnnnnnnnnnnnnnnnnnnnnnnnnnnnnnnnnnnnnnnnnnnnnnnnnnnnnnnnnnnnnnnnnnnnnnnnnnnnnnnnnnnnnnnnnnnnnnnnnnnnnnnnnnnnnnnnnnnnnnnnnnnnnnnnnnnnnnnnnnnnnnnnnnnnnnnnnnnnnnnnnnnnnnnnnnnnnnnnnnnnnnnnnnnnnnnnnnnnnnnnnnnnnnnnnnnnnnnnnnnnnnnnnnnnnnnnnnnnnnnnnnnnnnnnnnnnnnnnnnnnnnnnnnnnnnnnnnnnnnnnnnnnnnnnnnnnnnnnnnnnnnnnnnnnnnnnnnnnnnnnnnnnnnnnnnnnnnnnnnnnnnnnnnnnnnnnnnnnnnnnnnnnnnnnnnnnnnnnnnnnnnnnnnnnnnnnnnnnnnnnnnnnnnnnnnnnnnnnnnnnnnnnnnnnnnnnnnnnnnnnnnnnnnnnnnnnnnnnnnnnnnnnnnnnnnnnnnnnnnnnnnnnnnnnnnnnnnnnnnnnnnnnnnnnnnnnnnnnnnnnnnnnnnnnnnnnnnnnnnnnnnnnnnnnnnnnnnnnnnnnnnnnnnnnnnnnnnnnnnnnnnnnnnnnnnnnnnnnnnnnnnnnnnnnnnnnnnnnnnnnnnnnnnnnnnnnnnnnnnnnnnnnnnnnnnnnnnnnnnnnnnnnnnnnnnnnnnnnnnnnnnnnnnnnnnnnnnnnnnnnnnnnnnnnnnnnnnnnnnnnnnnnnnnnnnnnnnnnnnnnnnnnnnnnnnnnnnnnnnnnnnnnnnnnnnnnnnnnnnnnnnnnnnnnnnnnnnnnnnnnnnnnnnnnnnnnnnnnnnnnnnnnnnnnnnnnnnnnnnnnnnnnnnnnnnnnnnnnnnnnnnnnnnnnnnnnnnnnnnnnnnnnnnnnnnnnnnnnnnnnnnnnnnnnnnnnnnnnnnnnnnnnnnnnnnnnnnnnnnnnnnnnnnnnnnnnnnnnnnnnnnnnnnnnnnnnnnnnnnnnnnnnnnnnnnnnnnnnnnnnnnnnnnnnnnnnnnnnnnnnnnnnnnnnnnnnnnnnnnnnnnnnnnnnnnnnnnnnnnnnnnnnnnnnnnnnnnnnnnnnnnnnnnnnnnnnnnnnnnnnnnnnnnnnnnnnnnnnnnnnnnnnnnnnnnnnnnnnnnnnnnnnnnnnnnnnnnnnnnnnnnnnnnnnnnnnnnnnnnnnnnnnnnnnnnnnnnnnnnnnnnnnnnnnnnnnnnnnnnnnnnnnnnnnnnnnnnnnnnnnnnnnnnnnnnnnnnnnnnnnnnnnnnnnnnnnnnnnnnnnnnnnnnnnnnnnnnnnnnnnnnnnnnnnnnnnnnnnnnnnnnnnnnnnnnnnnnnnnnnnnnnnnnnnnnnnnnnnnnnnnnnnnnnnnnnnnnnnnnnnnnnnnnnnnnnnnnnnnnnnnnnnnnnnnnnnnnnnnnnnnnnnnnnnnnnnnnnnnnnnnnnnnnnnnnnnnnnnnnnnnnnnnnnnnnnnnnnnnnnnnnnnnnnnnnnnnnnnnnnnnnnnnnnnnnnnnnnnnnnnnnnnnnnnnnnnnnnnnnnnnnnnnnnnnnnnnnnnnnnnnnnnnnnnnnnnnnnnnnnnnnnnnnnnnnnnnnnnnnnnnnnnnnnnnnnnnnnnnnnnnnnnnnnnnnnnnnnnnnnnnnnnnnnnnnnnnnnnnnnnnnnnnnnnnnnnnnnnnnnnnnnnnnnnnnnnnnnnnnnnnnnnnnnnnnnnnnnnnnnnnnnnnnnnnnnnnnnnnnnnnnnnnnnnnnnnnnnnnnnnnnnnnnnnnnnnnnnnnnnnnnnnnnnnnnnnnnnnnnnnnnnnnnnnnnnnnnnnnnnnnnnnnnnnnnnnnnnnnnnnnnnnnnnnnnnnnnnnnnnnnnnnnnnnnnnnnnnnnnnnnnnnnnnnnnnnnnnnnnnnnnnnnnnnnnnnnnnnnnnnnnnnnnnnnnnnnnnnnnnnnnnnnnnnnnnnnnnnnnnnnnnnnnnnnnnnnnnnnnnnnnnnnnnnnnnnnnnnnnnnnnnnnnnnnnnnnnnnnnnnnnnnnnnnnnnnnnnnnnnnnnnnnnnnnnnnnnnnnnnnnnnnnnnnnnnnnnnnnnnnnnnnnnnnnnnnnnnnnnnnnnnnnnnnnnnnnnnnnnnnnnnnnnnnnnnnnnnnnnnnnnnnnnnnnnnnnnnnnnnnnnnnnnnnnnnnnnnnnnnnnnnnnnnnnnnnnnnnnnnnnnnnnnnnnnnnnnnnnnnnnnnnnnnnnnnnnnnnnnnnnnnnnnnnnnnnnnnnnnnnnnnnnnnnnnnnnnnnnnnnnnnnnnnnnnnnnnnnnnnnnnnnnnnnnnnnnnnnnnnnnnnnnnnnnnnnnnnnnnnnnnnnnnnnnnnnnnnnnnnnnnnnnnnnnnnnnnnnnnnnnnnnnnnnnnnnnnnnnnnnnnnnnnnnnnnnnnnnnnnnnnnnnnnnnnnnnnnnnnnnnnnnnnnnnnnnnnnnnnnnnnnnnnnnnnnnnnnnnnnnnnnnnnnnnnnnnnnnnnnnnnnnnnnnnnnnnnnnnnnnnnnnnnnnnnnnnnnnnnnnnnnnnnnnnnnnnnnnnnnnnnnnnnnnnnnnnnnnnnnnnnnnnnnnnnnnnnnnnnnnnnnnnnnnnnnnnnnnnnnnnnnnnnnnnnnnnnnnnnnnnnnnnnnnnnnnnnnnnnnnnnnnnnnnnnnnnnnnnnnnnnnnnnnnnnnnnnnnnnnnnnnnnnnnnnnnnnnnnnnnnnnnnnnnnnnnnnnnnnnnnnnnnnnnnnnnnnnnnnnnnnnnnnnnnnnnnnnnnnnnnnnnnnnnnnnnnnnnnnnnnnnnnnnnnnnnnnnnnnnnnnnnnnnnnnnnnnnnnnnnnnnnnnnnnnnnnnnnnnnnnnnnnnnnnnnnnnnnnnnnnnnnnnnnnnnnnnnnnnnnnnnnnnnnnnnnnnnnnnnnnnnnnnnnnnnnnnnnnnnnnnnnnnnnnnnnnnnnnnnnnnnnnnnnnnnnnnnnnnnnnnnnnnnnnnnnnnnnnnnnnnnnnnnnnnnnnnnnnnnnnnnnnnnnnnnnnnnnnnnnnnnnnnnnnnnnnnnnnnnnnnnnnnnnnnnnnnnnnnnnnnnnnnnnnnnnnnnnnnnnnnnnnnnnnnnnnnnnnnnnnnnnnnnnnnnnnnnnnnnnnnnnnnnnnnnnnnnnnnnnnnnnnnnnnnnnnnnnnnnnnnnnnnnnnnnnnnnnnnnnnnnnnnnnnnnnnnnnnnnnnnnnnnnnnnnnnnnnnnnnnnnnnnnnnnnnnnnnnnnnnnnnnnnnnnnnnnnnnnnnnnnnnnnnnnnnnnnnnnnnnnnnnnnnnnnnnnnnnnnnnnnnnnnnnnnnnnnnnnnnnnnnnnnnnnnnnnnnnnnnnnnnnnnnnnnnnnnnnnnnnnnnnnnnnnnnnnnnnnnnnnnnnnnnnnnnnnnnnnnnnnnnnnnnnnnnnnnnnnnnnnnnnnnnnnnnnnnnnnnnnnnnnnnnnnnnnnnnnnnnnnnnnnnnnnnnnnnnnnnnnnnnnnnnnnnnnnnnnnnnnnnnnnnnnnnnnnnnnnnnnnnnnnnnnnnnnnnnnnnnnnnnnnnnnnnnnnnnnnnnnnnnnnnnnnnnnnnnnnnnnnnnnnnnnnnnnnnnnnnnnnnnnnnnnnnnnnnnnnnnnnnnnnnnnnnnnnnnnnnnnnnnnnnnnnnnnnnnnnnnnnnnnnnnnnnnnnnnnnnnnnnnnnnnnnnnnnnnnnnnnnnnnnnnnnnnnnnnnnnnnnnnnnnnnnnnnnnnnnnnnnnnnnnnnnnnnnnnnnnnnnnnnnnnnnnnnnnnnnnnnnnnnnnnnnnnnnnnnnnnnnnnnnnnnnnnnnnnnnnnnnnnnnnnnnnnnnnnnnnnnnnnnnnnnnnnnnnnnnnnnnnnnnnnnnnnnnnnnnnnnnnnnnnnnnnnnnnnnnnnnnnnnnnnnnnnnnnnnnnnnnnnnnnnnnnnnnnnnnnnnnnnnnnnnnnnnnnnnnnnnnnnnnnnnnnnnnnnnnnnnnnnnnnnnnnnnnnnnnnnnnnnnnnnnnnnnnnnnnnnnnnnnnnnnnnnnnnnnnnnnnnnnnnnnnnnnnnnnnnnnnnnnnnnnnnnnnnnnnnnnnnnnnnnnnnnnnnnnnnnnnnnnnnnnnnnnnnnnnnnnnnnnnnnnnnnnnnnnnnnnnnnnnnnnnnnnnnnnnnnnnnnnnnnnnnnnnnnnnnnnnnnnnnnnnnnnnnnnnnnnnnnnnnnnnnnnnnnnnnnnnnnnnnnnnnnnnnnnnnnnnnnnnnnnnnnnnnnnnnnnnnnnnnnnnnnnnnnnnnnnnnnnnnnnnnnnnnnnnnnnnnnnnnnnnnnnnnnnnnnnnnnnnnnnnnnnnnnnnnnnnnnnnnnnnnnnnnnnnnnnnnnnnnnnnnnnnnnnnnnnnnnnnnnnnnnnnnnnnnnnnnnnnnnnnnnnnnnnnnnnnnnnnnnnnnnnnnnnnnnnnnnnnnnnnnnnnnnnnnnnnnnnnnnnnnnnnnnnnnnnnnnnnnnnnnnnnnnnnnnnnnnnnnnnnnnnnnnnnnnnnnnnnnnnnnnnnnnnnnnnnnnnnnnnnnnnnnnnnnnnnnnnnnnnnnnnnnnnnnnnnnnnnnnnnnnnnnnnnnnnnnnnnnnnnnnnnnnnnnnnnnnnnnnnnnnnnnnnnnnnnnnnnnnnnnnnnnnnnnnnnnnnnnnnnnnnnnnnnnnnnnnnnnnnnnnnnnnnnnnnnnnnnnnnnnnnnnnnnnnnnnnnnnnnnnnnnnnnnnnnnnnnnnnnnnnnnnnnnnnnnnnnnnnnnnnnnnnnnnnnnnnnnnnnnnnnnnnnnnnnnnnnnnnnnnnnnnnnnnnnnnnnnnnnnnnnnnnnnnnnnnnnnnnnnnnnnnnnnnnnnnnnnnnnnnnnnnnnnnnnnnnnnnnnnnnnnnnnnnnnnnnnnnnnnnnnnnnnnnnnnnnnnnnnnnnnnnnnnnnnnnnnnnnnnnnnnnnnnnnnnnnnnnnnnnnnnnnnnnnnnnnnnnnnnnnnnnnnnnnnnnnnnnnnnnnnnnnnnnnnnnnnnnnnnnnnnnnnnnnnnnnnnnnnnnnnnnnnnnnnnnnnnnnnnnnnnnnnnnnnnnnnnnnnnnnnnnnnnnnnnnnnnnnnnnnnnnnnnnnnnnnnnnnnnnnnnnnnnnnnnnnnnnnnnnnnnnnnnnnnnnnnnnnnnnnnnnnnnnnnnnnnnnnnnnnnnnnnnnnnnnnnnnnnnnnnnnnnnnnnnnnnnnnnnnnnnnnnnnnnnnnnnnnnnnnnnnnnnnnnnnnnnnnnnnnnnnnnnnnnnnnnnnnnnnnnnnnnnnnnnnnnnnnnnnnnnnnnnnnnnnnnnnnnnnnnnnnnnnnnnnnnnnnnnnnnnnnnnnnnnnnnnnnnnnnnnnnnnnnnnnnnnnnnnnnnnnnnnnnnnnnnnnnnnnnnnnnnnnnnnnnnnnnnnnnnnnnnnnnnnnnnnnnnnnnnnnnnnnnnnnnnnnnnnnnnnnnnnnnnnnnnnnnnnnnnnnnnnnnnnnnnnnnnnnnnnnnnnnnnnnnnnnnnnnnnnnnnnnnnnnnnnnnnnnnnnnnnnnnnnnnnnnnnnnnnnnnnnnnnnnnnnnnnnnnnnnnnnnnnnnnnnnnnnnnnnnnnnnnnnnnnnnnnnnnnnnnnnnnnnnnnnnnnnnnnnnnnnnnnnnnnnnnnnnnnnnnnnnnnnnnnnnnnnnnnnnnnnnnnnnnnnnnnnnnnnnnnnnnnnnnnnnnnnnnnnnnnnnnnnnnnnnnnnnnnnnnnnnnnnnnnnnnnnnnnnnnnnnnnnnnnnnnnnnnnnnnnnnnnnnnnnnnnnnnnnnnnnnnnnnnnnnnnnnnnnnnnnnnnnnnnnnnnnnnnnnnnnnnnnnnnnnnnnnnnnnnnnnnnnnnnnnnnnnnnnnnnnnnnnnnnnnnnnnnnnnnnnnnnnnnnnnnnnnnnnnnnnnnnnnnnnnnnnnnnnnnnnnnnnnnnnnnnnnnnnnnnnnnnnnnnnnnnnnnnnnnnnnnnnnnnnnnnnnnnnnnnnnnnnnnnnnnnnnnnnnnnnnnnnnnnnnnnnnnnnnnnnnnnnnnnnnnnnnnnnnnnnnnnnnnnnnnnnnnnnnnnnnnnnnnnnnnnnnnnnnnnnnnnnnnnnnnnnnnnnnnnnnnnnnnnnnnnnnnnnnnnnnnnnnnnnnnnnnnnnnnnnnnnnnnnnnnnnnnnnnnnnnnnnnnnnnnnnnnnnnnnnnnnnnnnnnnnnnnnnnnnnnnnnnnnnnnnnnnnnnnnnnnnnnnnnnnnnnnnnnnnnnnnnnnnnnnnnnnnnnnnnnnnnnnnnnnnnnnnnnnnnnnnnnnnnnnnnnnnnnnnnnnnnnnnnnnnnnnnnnnnnnnnnnnnnnnnnnnnnnnnnnnnnnnnnnnnnnnnnnnnnnnnnnnnnnnnnnnnnnnnnnnnnnnnnnnnnnnnnnnnnnnnnnnnnnnnnnnnnnnnnnnnnnnnnnnnnnnnnnnnnnnnnnnnnnnnnnnnnnnnnnnnnnnnnnnnnnnnnnnnnnnnnnnnnnnnnnnnnnnnnnnnnnnnnnnnnnnnnnnnnnnnnnnnnnnnnnnnnnnnnnnnnnnnnnnnnnnnnnnnnnnnnnnnnnnnnnnnnnnnnnnnnnnnnnnnnnnnnnnnnnnnnnnnnnnnnnnnnnnnnnnnnnnnnnnnnnnnnnnnnnnnnnnnnnnnnnnnnnnnnnnnnnnnnnnnnnnnnnnnnnnnnnnnnnnnnnnnnnnnnnnnnnnnnnnnnnnnnnnnnnnnnnnnnnnnnnnnnnnnnnnnnnnnnnnnnnnnnnnnnnnnnnnnnnnnnnnnnnnnnnnnnnnnnnnnnnnnnnnnnnnnnnnnnnnnnnnnnnnnnnnnnnnnnnnnnnnnnnnnnnnnnnnnnnnnnnnnnnnnnnnnnnnnnnnnnnnnnnnnnnnnnnnnnnnnnnnnnnnnnnnnnnnnnnnnnnnnnnnnnnnnnnnnnnnnnnnnnnnnnnnnnnnnnnnnnnnnnnnnnnnnnnnnnnnnnnnnnnnnnnnnnnnnnnnnnnnnnnnnnnnnnnnnnnnnnnnnnnnnnnnnnnnnnnnnnnnnnnnnnnnnnnnnnnnnnnnnnnnnnnnnnnnnnnnnnnnnnnnnnnnnnnnnnnnnnnnnnnnnnnnnnnnnnnnnnnnnnnnnnnnnnnnnnnnnnnnnnnnnnnnnnnnnnnnnnnnnnnnnnnnnnnnnnnnnnnnnnnnnnnnnnnnnnnnnnnnnnnnnnnnnnnnnnnnnnnnnnnnnnnnnnnnnnnnnnnnnnnnnnnnnnnnnnnnnnnnnnnnnnnnnnnnnnnnnnnnnnnnnnnnnnnnnnnnnnnnnnnnnnnnnnnnnnnnnnnnnnnnnnnnnnnnnnnnnnnnnnnnnnnnnnnnnnnnnnnnnnnnnnnnnnnnnnnnnnnnnnnnnnnnnnnnnnnnnnnnnnnnnnnnnnnnnnnnnnnnnnnnnnnnnnnnnnnnnnnnnnnnnnnnnnnnnnnnnnnnnnnnnnnnnnnnnnnnnnnnnnnnnnnnnnnnnnnnnnnnnnnnnnnnnnnnnnnnnnnnnnnnnnnnnnnnnnnnnnnnnnnnnnnnnnnnnnnnnnnnnnnnnnnnnnnnnnnnnnnnnnnnnnnnnnnnnnnnnnnnnnnnnnnnnnnnnnnnnnnnnnnnnnnnnnnnnnnnnnnnnnnnnnnnnnnnnnnnnnnnnnnnnnnnnnnnnnnnnnnnnnnnnnnnnnnnnnnnnnnnnnnnnnnnnnnnnnnnnnnnnnnnnnnnnnnnnnnnnnnnnnnnnnnnnnnnnnnnnnnnnnnnnnnnnnnnnnnnnnnnnnnnnnnnnnnnnnnnnnnnnnnnnnnnnnnnnnnnnnnnnnnnnnnnnnnnnnnnnnnnnnnnnnnnnnnnnnnnnnnnnnnnnnnnnnnnnnnnnnnnnnnnnnnnnnnnnnnnnnnnnnnnnnnnnnnnnnnnnnnnnnnnnnnnnnnnnnnnnnnnnnnnnnnnnnnnnnnnnnnnnnnnnnnnnnnnnnnnnnnnnnnnnnnnnnnnnnnnnnnnnnnnnnnnnnnnnnnnnnnnnnnnnnnnnnnnnnnnnnnnnnnnnnnnnnnnnnnnnnnnnnnnnnnnnnnnnnnnnnnnnnnnnnnnnnnnnnnnnnnnnnnnnnnnnnnnnnnnnnnnnnnnnnnnnnnnnnnnnnnnnnnnnnnnnnnnnnnnnnnnnnnnnnnnnnnnnnnnnnnnnnnnnnnnnnnnnnnnnnnnnnnnnnnnnnnnnnnnnnnnnnnnnnnnnnnnnnnnnnnnnnnnnnnnnnnnnnnnnnnnnnnnnnnnnnnnnnnnnnnnnnnnnnnnnnnnnnnnnnnnnnnnnnnnnnnnnnnnnnnnnnnnnnnnnnnnnnnnnnnnnnnnnnnnnnnnnnnnnnnnnnnnnnnnnnnnnnnnnnnnnnnnnnnnnnnnnnnnnnnnnnnnnnnnnnnnnnnnnnnnnnnnnnnnnnnnnnnnnnnnnnnnnnnnnnnnnnnnnnnnnnnnnnnnnnnnnnnnnntggtgcggccacccggatttcgggtggtcattgcaagtaaagcttcatgacgaaaggcgccaagcgcggtgcggccacccggatttcgggtggtcattgcaagtcctgcccgtcaatcatcgcgagcggccgcggtgcggccacccggatttcgggtggtcattgcaagtcgcaacgcattggcaaccgccgccgctacggtgcggccatccggatttcgggtggtcattgcaagtggcaaaggcagcggcaagcgcgcgttgcaggtgcggccacccggatttcgggtggtcattgcaaggtgctggtaagcgggctggcttccacctctggtgcggccacccggatttcgggtggtcattgcaagatatcttccggtgcgttctcattgcccccggtgcggccacccggatttcgggtggtcattgcaagcaaaatggcgatgcgcggcgcgtgtcaatcggtgcggccacccggatttcgggtggtcattgcaagtgataacgccacatgtgaacggaatgcgggggtgcggccacccggatttcgggtggtcattgcaacgtcggatcaggcaaaaccaccacgggccttggtgcggccacccggatttcgggtggtcattgcaacagctcgccaaggttggccatgcccatggcgggtgcggccacccggatttcgggtggtcaatgtagaatatcatcagacttattgttgtcctcgtccatcaggccatgttcgaagaacgtggtcaggagtcttcgcacccaacatcatgtagttctttccttcggctcccaaaaggatttaccccagatgtttcgcagcagcgaacagcggctattccatgaaattgtcgcgcggcattttgccgcccccatccggcctttgctcgcccaggcggcgaccgggcttgggaagacgcgtgcctatcttgccgccgccgcgcaggccgccagccaaggccagcgcatcgccatcgccctgccaagctgggcgctgattgatcaattgctggcctcggaagatttcgcgctcacgcgcggtacattgaacatcgccaccttccggccacgccggcgttgcgacaatgcggctgaatatgaagcccaagcggaagcggcgcgttccagccacatcatgctttgtactgctgcggcggtgttgattgataacgccgcgaagggcgcctattgcggtgccattgaacgcagcattatttttgatgaggcggatcaattgccggatgcggctgccttgcgcgcggatgtggaaatcacccccgtcgaattgcgcgacctgaatattgccgccaaaacgactgaggctattgccgctgccgttttggcgcatcctcgcgccaccacggaacaacgcgccatcgccaggctagtgcagcaatacgttactgaagcacccggctatgcgctggtcggcagaacagaccaagatggcatcgccgtaaatcatccaagaccggggcgaatgctgaaacgcatcagcaacctgcccagcagcattttcatctccgccacccttcaaattcgcggcagcttcgacgcctttcggcgcgccatggcgattgaggagatctctcccctctcgacagccattgaaccaaaacgccacggggacctgtccttcatctatcaacccagggcgcccgatacggaagactggttcactgaggttatcagcagcatcgcaaccgcgccccgcccctgcttggtgctggtgccaagccatgacttggccgagcgtattggcgccgcggccggtgggcgcgtgcgtggccacgatgaacctttgcgggaagccgccgcggaagctgaaagccagggacttttcatcgcggccggtgcttgggccgggctggatacgccgacacactgggccagcctggtcattccccgcgcgcctttccccaggctgcgggttctggagggggaagctgtggaccattacctggatagtcacgcaacaaccgtgcggcgccttgggcagggtcttggccgcgtactgcgctttcctgaagcgcgcgccaaggtgattattcttgaccagcgcctggtcactcacggcctggagagctgcataccggaacgcttccgctccgcttgggaggaagccaagcgcgccgccctttctcagggtttcgaggaaggcacgcggtttgagctgaccttgagccgggcggaacgcgaccctgcgctgcgcaaggcggcgctcagccattacgggctgcgctgcaccgaatgcgggttcgtgccgcaggtttcatcgcaactggaagttcaccacctgaacccaatcgctgagggcaagcggaggacagtgctgacggacgtgacggttctctgcgccaattgccaccggctggtgcacgcgcgccttcgcgccgcttcagccgagggggaggcggtttgacgcgtctaagcatgctgtctgcagtggcccaaggccgacccgatgcccggagcgggcagggccttctcaaccgaccaggcggcgttactgctcacttttccccgctttatttcttggcgagcatgcgcggccctgcgcctacgactcctagcctccgccaacgccaaaggtgagtataggcagcgattttccgctcccggtcaccctacgccccccattgaaatctccaacttccgaagcggtccgcgaaaatttatcaagctttttcaattactttcgtctggctggaaaatcactcaagtcgccagccttggagagaactcgccccggagagagcattttcgcgcaatagtccggcaccgcactagccgcgcgaatttgagaaccctggcgataacacgggaatttcggagggccatcagcggcggagagcgtgtttgtaccataggaatggcgtaggaaaggggaccggaaaggcaaccgtctctgccttttagtttttaatatattcaatgcgttaatcgaatgcgagcccttccaggacgacgcggatcttgtcctcggcagaatggtgcttgcgcgtggcgcggcgaatatcgcgaaccagtttttcggttggcgcccgcgtgggtggggcaaatgatttctggctgatcttcactctccttggggttaagatgagcc

SEQ ID NO: 187 - DNA, 12436 bp, Artificial Sequence
  Synthetic Oligonucleotide
  misc_feature (1)..(6071): n is a, c, g, or t
nnnnnnnnnnnnnnnnnnnnnnnnnnnnnnnnnnnnnnnnnnnnnnnnnnnnnnnnnnnnnnnnnnnnnnnnnnnnnnnnnnnnnnnnnnnnnnnnnnnnnnnnnnnnnnnnnnnnnnnnnnnnnnnnnnnnnnnnnnnnnnnnnnnnnnnnnnnnnnnnnnnnnnnnnnnnnnnnnnnnnnnnnnnnnnnnnnnnnnnnnnnnnnnnnnnnnnnnnnnnnnnnnnnnnnnnnnnnnnnnnnnnnnnnnnnnnnnnnnnnnnnnnnnnnnnnnnnnnnnnnnnnnnnnnnnnnnnnnnnnnnnnnnnnnnnnnnnnnnnnnnnnnnnnnnnnnnnnnnnnnnnnnnnnnnnnnnnnnnnnnnnnnnnnnnnnnnnnnnnnnnnnnnnnnnnnnnnnnnnnnnnnnnnnnnnnnnnnnnnnnnnnnnnnnnnnnnnnnnnnnnnnnnnnnnnnnnnnnnnnnnnnnnnnnnnnnnnnnnnnnnnnnnnnnnnnnnnnnnnnnnnnnnnnnnnnnnnnnnnnnnnnnnnnnnnnnnnnnnnnnnnnnnnnnnnnnnnnnnnnnnnnnnnnnnnnnnnnnnnnnnnnnnnnnnnnnnnnnnnnnnnnnnnnnnnnnnnnnnnnnnnnnnnnnnnnnnnnnnnnnnnnnnnnnnnnnnnnnnnnnnnnnnnnnnnnnnnnnnnnnnnnnnnnnnnnnnnnnnnnnnnnnnnnnnnnnnnnnnnnnnnnnnnnnnnnnnnnnnnnnnnnnnnnnnnnnnnnnnnnnnnnnnnnnnnnnnnnnnnnnnnnnnnnnnnnnnnnnnnnnnnnnnnnnnnnnnnnnnnnnnnnnnnnnnnnnnnnnnnnnnnnnnnnnnnnnnnnnnnnnnnnnnnnnnnnnnnnnnnnnnnnnnnnnnnnnnnnnnnnnnnnnnnnnnnnnnnnnnnnnnnnnnnnnnnnnnnnnnnnnnnnnnnnnnnnnnnnnnnnnnnnnnnnnnnnnnnnnnnnnnnnnnnnnnnnnnnnnnnnnnnnnnnnnnnnnnnnnnnnnnnnnnnnnnnnnnnnnnnnnnnnnnnnnnnnnnnnnnnnnnnnnnnnnnnnnnnnnnnnnnnnnnnnnnnnnnnnnnnnnnnnnnnnnnnnnnnnnnnnnnnnnnnnnnnnnnnnnnnnnnnnnnnnnnnnnnnnnnnnnnnnnnnnnnnnnnnnnnnnnnnnnnnnnnnnnnnnnnnnnnnnnnnnnnnnnnnnnnnnnnnnnnnnnnnnnnnnnnnnnnnnnnnnnnnnnnnnnnnnnnnnnnnnnnnnnnnnnnnnnnnnnnnnnnnnnnnnnnnnnnnnnnnnnnnnnnnnnnnnnnnnnnnnnnnnnnnnnnnnnnnnnnnnnnnnnnnnnnnnnnnnnnnnnnnnnnnnnnnnnnnnnnnnnnnnnnnnnnnnnnnnnnnnnnnnnnnnnnnnnnnnnnnnnnnnnnnnnnnnnnnnnnnnnnnnnnnnnnnnnnnnnnnnnnnnnnnnnnnnnnnnnnnnnnnnnnnnnnnnnnnnnnnnnnnnnnnnnnnnnnnnnnnnnnnnnnnnnnnnnnnnnnnnnnnnnnnnnnnnnnnnnnnnnnnnnnnnnnnnnnnnnnnnnnnnnnnnnnnnnnnnnnnnnnnnnnnnnnnnnnnnnnnnnnnnnnnnnnnnnnnnnnnnnnnnnnnnnnnnnnnnnnnnnnnnnnnnnnnnnnnnnnnnnnnnnnnnnnnnnnnnnnnnnnnnnnnnnnnnnnnnnnnnnnnnnnnnnnnnnnnnnnnnnnnnnnnnnnnnnnnnnnnnnnnnnnnnnnnnnnnnnnnnnnnnnnnnnnnnnnnnnnnnnnnnnnnnnnnnnnnnnnnnnnnnnnnnnnnnnnnnnnnnnnnnnnnnnnnnnnnnnnnnnnnnnnnnnnnnnnnnnnnnnnnnnnnnnnnnnnnnnnnnnnnnnnnnnnnnnnnnnnnnnnnnnnnnnnnnnnnnnnnnnnnnnnnnnnnnnnnnnnnnnnnnnnnnnnnnnnnnnnnnnnnnnnnnnnnnnnnnnnnnnnnnnnnnnnnnnnnnnnnnnnnnnnnnnnnnnnnnnnnnnnnnnnnnnnnnnnnnnnnnnnnnnnnnnnnnnnnnnnnnnnnnnnnnnnnnnnnnnnnnnnnnnnnnnnnnnnnnnnnnnnnnnnnnnnnnnnnnnnnnnnnnnnnnnnnnnnnnnnnnnnnnnnnnnnnnnnnnnnnnnnnnnnnnnnnnnnnnnnnnnnnnnnnnnnnnnnnnnnnnnnnnnnnnnnnnnnnnnnnnnnnnnnnnnnnnnnnnnnnnnnnnnnnnnnnnnnnnnnnnnnnnnnnnnnnnnnnnnnnnnnnnnnnnnnnnnnnnnnnnnnnnnnnnnnnnnnnnnnnnnnnnnnnnnnnnnnnnnnnnnnnnnnnnnnnnnnnnnnnnnnnnnnnnnnnnnnnnnnnnnnnnnnnnnnnnnnnnnnnnnnnnnnnnnnnnnnnnnnnnnnnnnnnnnnnnnnnnnnnnnnnnnnnnnnnnnnnnnnnnnnnnnnnnnnnnnnnnnnnnnnnnnnnnnnnnnnnnnnnnnnnnnnnnnnnnnnnnnnnnnnnnnnnnnnnnnnnnnnnnnnnnnnnnnnnnnnnnnnnnnnnnnnnnnnnnnnnnnnnnnnnnnnnnnnnnnnnnnnnnnnnnnnnnnnnnnnnnnnnnnnnnnnnnnnnnnnnnnnnnnnnnnnnnnnnnnnnnnnnnnnnnnnnnnnnnnnnnnnnnnnnnnnnnnnnnnnnnnnnnnnnnnnnnnnnnnnnnnnnnnnnnnnnnnnnnnnnnnnnnnnnnnnnnnnnnnnnnnnnnnnnnnnnnnnnnnnnnnnnnnnnnnnnnnnnnnnnnnnnnnnnnnnnnnnnnnnnnnnnnnnnnnnnnnnnnnnnnnnnnnnnnnnnnnnnnnnnnnnnnnnnnnnnnnnnnnnnnnnnnnnnnnnnnnnnnnnnnnnnnnnnnnnnnnnnnnnnnnnnnnnnnnnnnnnnnnnnnnnnnnnnnnnnnnnnnnnnnnnnnnnnnnnnnnnnnnnnnnnnnnnnnnnnnnnnnnnnnnnnnnnnnnnnnnnnnnnnnnnnnnnnnnnnnnnnnnnnnnnnnnnnnnnnnnnnnnnnnnnnnnnnnnnnnnnnnnnnnnnnnnnnnnnnnnnnnnnnnnnnnnnnnnnnnnnnnnnnnnnnnnnnnnnnnnnnnnnnnnnnnnnnnnnnnnnnnnnnnnnnnnnnnnnnnnnnnnnnnnnnnnnnnnnnnnnnnnnnnnnnnnnnnnnnnnnnnnnnnnnnnnnnnnnnnnnnnnnnnnnnnnnnnnnnnnnnnnnnnnnnnnnnnnnnnnnnnnnnnnnnnnnnnnnnnnnnnnnnnnnnnnnnnnnnnnnnnnnnnnnnnnnnnnnnnnnnnnnnnnnnnnnnnnnnnnnnnnnnnnnnnnnnnnnnnnnnnnnnnnnnnnnnnnnnnnnnnnnnnnnnnnnnnnnnnnnnnnnnnnnnnnnnnnnnnnnnnnnnnnnnnnnnnnnnnnnnnnnnnnnnnnnnnnnnnnnnnnnnnnnnnnnnnnnnnnnnnnnnnnnnnnnnnnnnnnnnnnnnnnnnnnnnnnnnnnnnnnnnnnnnnnnnnnnnnnnnnnnnnnnnnnnnnnnnnnnnnnnnnnnnnnnnnnnnnnnnnnnnnnnnnnnnnnnnnnnnnnnnnnnnnnnnnnnnnnnnnnnnnnnnnnnnnnnnnnnnnnnnnnnnnnnnnnnnnnnnnnnnnnnnnnnnnnnnnnnnnnnnnnnnnnnnnnnnnnnnnnnnnnnnnnnnnnnnnnnnnnnnnnnnnnnnnnnnnnnnnnnnnnnnnnnnnnnnnnnnnnnnnnnnnnnnnnnnnnnnnnnnnnnnnnnnnnnnnnnnnnnnnnnnnnnnnnnnnnnnnnnnnnnnnnnnnnnnnnnnnnnnnnnnnnnnnnnnnnnnnnnnnnnnnnnnnnnnnnnnnnnnnnnnnnnnnnnnnnnnnnnnnnnnnnnnnnnnnnnnnnnnnnnnnnnnnnnnnnnnnnnnnnnnnnnnnnnnnnnnnnnnnnnnnnnnnnnnnnnnnnnnnnnnnnnnnnnnnnnnnnnnnnnnnnnnnnnnnnnnnnnnnnnnnnnnnnnnnnnnnnnnnnnnnnnnnnnnnnnnnnnnnnnnnnnnnnnnnnnnnnnnnnnnnnnnnnnnnnnnnnnnnnnnnnnnnnnnnnnnnnnnnnnnnnnnnnnnnnnnnnnnnnnnnnnnnnnnnnnnnnnnnnnnnnnnnnnnnnnnnnnnnnnnnnnnnnnnnnnnnnnnnnnnnnnnnnnnnnnnnnnnnnnnnnnnnnnnnnnnnnnnnnnnnnnnnnnnnnnnnnnnnnnnnnnnnnnnnnnnnnnnnnnnnnnnnnnnnnnnnnnnnnnnnnnnnnnnnnnnnnnnnnnnnnnnnnnnnnnnnnnnnnnnnnnnnnnnnnnnnnnnnnnnnnnnnnnnnnnnnnnnnnnnnnnnnnnnnnnnnnnnnnnnnnnnnnnnnnnnnnnnnnnnnnnnnnnnnnnnnnnnnnnnnnnnnnnnnnnnnnnnnnnnnnnnnnnnnnnnnnnnnnnnnnnnnnnnnnnnnnnnnnnnnnnnnnnnnnnnnnnnnnnnnnnnnnnnnnnnnnnnnnnnnnnnnnnnnnnnnnnnnnnnnnnnnnnnnnnnnnnnnnnnnnnnnnnnnnnnnnnnnnnnnnnnnnnnnnnnnnnnnnnnnnnnnnnnnnnnnnnnnnnnnnnnnnnnnnnnnnnnnnnnnnnnnnnnnnnnnnnnnnnnnnnnnnnnnnnnnnnnnnnnnnnnnnnnnnnnnnnnnnnnnnnnnnnnnnnnnnnnnnnnnnnnnnnnnnnnnnnnnnnnnnnnnnnnnnnnnnnnnnnnnnnnnnnnnnnnnnnnnnnnnnnnnnnnnnnnnnnnnnnnnnnnnnnnnnnnnnnnnnnnnnnnnnnnnnnnnnnnnnnnnnnnnnnnnnnnnnnnnnnnnnnnnnnnnnnnnnnnnnnnnnnnnnnnnnnnnnnnnnnnnnnnnnnnnnnnnnnnnnnnnnnnnnnnnnnnnnnnnnnnnnnnnnnnnnnnnnnnnnnnnnnnnnnnnnnnnnnnnnnnnnnnnnnnnnnnnnnnnnnnnnnnnnnnnnnnnnnnnnnnnnnnnnnnnnnnnnnnnnnnnnnnnnnnnnnnnnnnnnnnnnnnnnnnnnnnnnnnnnnnnnnnnnnnnnnnnnnnnnnnnnnnnnnnnnnnnnnnnnnnnnnnnnnnnnnnnnnnnnnnnnnnnnnnnnnnnnnnnnnnnnnnnnnnnnnnnnnnnnnnnnnnnnnnnnnnnnnnnnnnnnnnnnnnnnnnnnnnnnnnnnnnnnnnnnnnnnnnnnnnnnnnnnnnnnnnnnnnnnnnnnnnnnnnnnnnnnnnnnnnnnnnnnnnnnnnnnnnnnnnnnnnnnnnnnnnnnnnnnnnnnnnnnnnnnnnnnnnnnnnnnnnnnnnnnnnnnnnnnnnnnnnnnnnnnnnnnnnnnnnnnnnnnnnnnnnnnnnnnnnnnnnnnnnnnnnnnnnnnnnnnnnnnnnnnnnnnnnnnnnnnnnnnnnnnnnnnnnnnnnnnnnnnnnnnnnnnnnnnnnnnnnnnnnnnnnnnnnnnnnnnnnnnnnnnnnnnnnnnnnnnnnnnnnnnnnnnnnnnnnnnnnnnnnnnnnnnnnnnnnnnnnnnnnnnnnnnnnnnnnnnnnnnnnnnnnnnnnnnnnnnnnnnnnnnnnnnnnnnnnnnnnnnnnnnnnnnnnnnnnnnnnnnnnnnnnnnnnnnnnnnnnnnnnnnnnnnnnnnnnnnnnnnnnnnnnnnnnnnnnnnnnnnnnnnnnnnnnnnnnnnnnnnnnnnnnnnnnnnnnnnnnnnnnnnnnnnnnnnnnnnnnnnnnnnnnnnnnnnnnnnnnnnnnnnnnnnnnnnnnnnnnnnnnnnnnnnnnnnnnnnnnnnnnnnnnnnnnnnnnnnnnnnnnnnnnnnnnnnnnnnnnnnnnnnnnnnnnnnnnnnnnnnnnnnnnnnnnnnnnnnnnnnnnnnnnnnnnnnnnnnnnnnnnnnnnnnnnnnnnnnnnnnnnnnnnnnnnnnnnnnnnnnnnnnnnnnnnnnnnnnnnnnnnnnnnnnnnnnnnnnnncacgacgcagtagctacagtactttgagcagccttccataatggagacgaaggcgctggcgccatcgacgcgcgctggcggcaggtgatcaaacttctcaatctcagggaagctgatatcaacctgtggcttctgagcgcgttcgcgctcattcaacagatcgggcaagcggtgcagggtttgggggccaaacaccacatcgacaaacggggcacgcgcaataattgccgcgccctcttggcttgccacacagccgcccacaccaatgagcacgccttttttcttgaggtgcttcacacggcctaagtcactaaacaccttctcttgcgccttttcgcgcacagagcaggtgttgaacaaaatcagatcggcctcatccacatcttgggtgggctcatagccttgtgccgcttgcaagacgtcagacatcttgtctgagtcgtacacattcatttggcagccgaaggtcttgataaaaacttttttgctcatgtcgcgttgcttgggttaggccaacccatgcacgccacgcaccagcgcgagccgcgggtgcgaaagagagcgagggccggcgttgcatggtgtagatccagtggccggcgtgcagacgcgctgcacacaaaacatgattgtaatacttgggcaggcaataaaaaaacccggaaaatttgcaccatccagacagaaggcaaacacttcttccggagtacggccgtgcatgcgtaccgttttttctagcacggccatcacatcacctcatccaatttgtttattgctgccgcaccgaacggtgccgcgtagcgcgcccagtgagttggggctagggctctatcgaaactgcgcagataagagactacatcaaaagtattaattcctatagactgataaatcaagtccctgcttagctgtttttcacaacgaggtgccagtccatggatcacacaatcacaaaaccagcgcgcgtcgaaggctacgccgtccaccgtatggtcgccgctttggtagacgacgcacccgcgctgcatctcgatgccggcgacaccctaaccattcgcaccgatgcgcccctgcccagtgggcatattgtgggcttctcgttgcgtgcctgtgtctctgtcaagaacaaggggcggcaccgctatttccccagtgctgactggcgctctcgccacagttggctcgagcgaaaaggcgtacagcatggcttcgaagtcatcaccgtgcattgctctgccaaacacttggtcatcgaaaaacaatctggccaattcagtgttgatgacaccttgtttacgggtgtcctcaaagttgtcgattacgacaagtacaacgccgcgctgctatcgggcatcggcaacacggcacgcgccttcgggttcggcatgttagttatttaatcttcaccaagggaaaccatgccaaagcaaaccatcgttatcgacaccgttatcaccacacaaggcccgctgtctatcgccatgcccgtcgcacagggcacacgggcaaacgactacaacaactttccattgatggcccgtgggcaggatgaactgggcgccgtattgcaaacagcctacctgcccgctagtacggtgcgtgggttccttcgccgtgcggctggcattgccgcgatggaaaagcgcggcgtaggcaacaccacattgcagcaagcgtattccgatattttggggcagtctaaagacgccaaagaaacggtggacttggtccagctgtctgccatacgcgaggcagaccccatactcgacctctttggttcgtggtctatcaagtcgcgcttactggtgagtaacttcttgcccacaaccaacgtgttgccacaggccatcacgggtgtcagaaaagacttagaagacaccgaaggcgtgttgaccctcttgagtgagaccgaccaacaggcctattacaaccgcagtgacatcaacagccagcgcgcagccgctgacgcagtcgtcaagggcctcactcgtgacatcagaaaagccaaaaaagacggcaacgcactcactgacctagaggcggcgcttgtgatcgccgacgcgaaggccgtggccttaaaaacggatatgggcgagatggcgaactcatcacgcaccatcaccgagttttttgccttgcccgctaacatggccttgcacggacgcatcgtggttgagcaagccaaggagcgtgaccttgcattgatcgtggaggcgctagacaccctgtctattcgccccatgttgggcgcccaagtagcgctcggctgtggcgaggtggcggggcagttcaccatcaaggtggatggcatcgtggtcaagacagtcaccacgggcggctgggtgcctgcgcaggtcgaagacttctcgtctgatgcgcctgcaccagccgctgtctaattgcacgtggaccagttacgaatcaccgcccacctcagcggcccccttgtgacggggggcggctacctcacctttgatgcgttgctcgcctctgccacttacagcttgacgcaagacattgagcaggcccacaaccagctgccacttaaacaagttgccggcctgtaccacgccagcgccgccatttatgaacccgttgccatcggggcattggctattgtgcaagccatgcgtcccgacgacctgtggcttgaccaccagtggttaaagaagaacaagcgcggcgctgtgcacaccaagttcgacaacctatccgacaacatactgaccacctacaagaccatagcggcaccgaccatgacctggtactgcgaaggtgatgcagaccgcattcgtgtcttactagcgcatctacccctcattggtaaaaagcgggtttgctccgtgacccagtggaccgttgaggcgggcgagcttgacggtctgcatggctatgccgatgagccactgcggcctgtacccgttgagctgtgggatggtgacaagagcagccccatcgtggacgcggcatggcgtcccgcttattgggatgcgactgggcgcaccgcttgttttgtgaactgagggcacaccatgacgacgcttgaatttttaatcagtacttcggtcgccacctcgttgcgcaaaccggtgatgcgcaggccgatgcaacgcgcacgctgtcgtctggccacaaaatggccaagggtggcacagcacaacgcattgcatcgggttgggcggtgatctcagaagatgtcagcacgcttcaattcaagctggcggccaccggcttaagttacggcggacagacgcgttacgaggcttggctagatgcgcttgaggcatttagcggcaagcccatcatgcttattgagtttgataagaagcctgtaccagttaccaacctgtttcgtacgcatgatttacgagcggtacaggtgtgttcgcccggcggggcggcgctatttgactttacgcaagaacccaccgctgagagtggtaaagcgcacaaagtgctgtgggaattaaaactagaaaggctaaaaagcgctgttgaatcaagcgcttgagccacatgagatcaagccaccctctaaatgggtggttactagaacaacgcaggtgtgaatccaacatgtccgccggatcaagccaccctctaaatgggtggttactagaaccgcgcaggtggttgattaaccgagcctaccgatcaagccaccctctaaatgggtggttactagaactcaccggtcagccactcgtttgttttgcggatcaagccaccgtctaaatgggtggttactagaacatcttgtggctcgacacagcgcttttcagcagatcaagccaccctctaaatgggtggttactagaactacagagccaccacatcgcgcaacgcattcggatcaagccaccctctaaatgggtggttacttatttacagacataccatgggccgccgtgcccttattaggagttcaccgatgtttcgttcctcagagcagcagcatttctgcaatgtgcttattaagcatttgaaacgcgtcgatgcgcccatattgctggaaggcggggtgggtcttgggaagacgcgtgcctacctggccgcactggcaactacgacgcaaacggttgccattgtgttacccacacaccaactgattgaccagttgctggctagcgctgacttgtcagccgttgccttgccattggccgtgttcaggccagccagtcggtttgacacacgggaggcgtaccaagcgcagcgagaggcggcccgtgctgcgcgtgtcatgctctgcaccgctgcaagcgtgattattgaccaacgccttgcgggggcttacaacggcgcaacacagcgtgatgtggtgttatttgatgaagccgaccagttacccgatatggcggcattgcagagcgactttgtgattgaggcggcgctactgcagggccagccgctgcacgcggccttagagcgcataagcaccacccgttcacagtcggttgaggccgagcaaaaggctgctgcgcgggtcatgcttgagatattggccgaaccggtgggctacgcatccgtcgggcttgatgatgatggcaatgcgcggctacaccacgccctgccaggtcgcttattaaagaaaattagcaatcgcggtagcacggtgtttctttctgcaacgctgacccacaacgataagtttgatgacttcaagatcgccatgggcctagacgcggtgagtagcctgtcaacaagcattgagccagaacagcatggcacgctcgacttcaccgtacacgcgcacgaggtggacacgcctgactggtttgcggccaccgttcagtgcatacaaagcgcgcagcgccccacgttggtggtcacacctagccatgaccgcacagagcggctacaacccgccgtgggtgagcaagcagacttgcttatacgtgcgggtgcatgggcgggtcttgacacgccaacgcgctggcgtaccgtggttattccgcgcgtgccatttggcgcaccagtcattgttgacggggtggcggtcacgtcttacttggccgccaaggtgacggccagtcggcggatgcgccaagcaattggccgtgggcttagaacacctgaggcggtgtgcacggttgtggttttggatgcgcgggcacacaacttaggtcgctttgtgccagagcgttttgcggcagattggtcgtctcggcaagtgtttgacgagggtgcccgccatgcggtggtgctgtccaaagcggagcgcgaccccgctttggccaaagccgcgctcagacactacggcgctcaatgccaacaagcgggttgttccgtgacagaggcgtgtcagctggacgtgcaccaccttgaccccgtaagcgaaggcgtgcgccgcacaaccttgaaggatgtgaccgtgctgtgtgcaaaccaccaccgacaggcccaccacgacatgaaaatggggctgaacgtgtcgtagcgcaacaaaaaacccgccatacctttgggtacgcgggttttgggagttctggcaaggcctgaaacctaaatgtggtggtgataggtggacttgaaccaccgaccccagcattatgaatgctgtgctctaaccaactgagctatatcaccgagcctgaaattatagccaaaattctcagggctttggcttgccgccaaaagtttttgttagccattttgtcgcgcccgtacgacgcgccaagcccttggttattggtgtttgaaggcgggtttgcgcttgtttatgaacgcatccatgccctctttttggtcttcggttgcaaacagcgcgtggaacagacggcgctcaaaacgcacgccttcgctgaggctgccttcaaacgcttggttcaccgcttcctttgccgccatgacactggggagggagtagttgcaaatcatcagggctgcgcccaaggcctcggtcatgagttggtcatcggcgaccacgcggctcaccagtccgccgcgctcggcttctgcagcgtccatcatgcggcctgtgagggccatgtccatggccttggctttgccaacggcgcgtggcaggcgctgcgtgccacctgcgccagggataacgcccaacttgatttcgggttggccaaatttggcgctctcgctggcaatgatgacgtcgcacatcatggccaattcacagccgccgccgagggcaaagccgctgacggcggcaataacgggcttgcgaacgctgcgaatggtttcccagttgcgcgtgatgtagtctgacttgtagacgtcagcaaaggtgtaggtcgccatagcgccaatgtcggcacccgcggcaaaggctttttcactgcctgtgagcacaatgcagccaatgtccgggtcggcgtcgaatgcggttagcgccgcgccaagctcgtccatta

SEQ ID NO: 188 - DNA, 12400 bp, Artificial Sequence
  Synthetic Oligonucleotide
  misc_feature (1)..(5067): n is a, c, g, or t
nnnnnnnnnnnnnnnnnnnnnnnnnnnnnnnnnnnnnnnnnnnnnnnnnnnnnnnnnnnnnnnnnnnnnnnnnnnnnnnnnnnnnnnnnnnnnnnnnnnnnnnnnnnnnnnnnnnnnnnnnnnnnnnnnnnnnnnnnnnnnnnnnnnnnnnnnnnnnnnnnnnnnnnnnnnnnnnnnnnnnnnnnnnnnnnnnnnnnnnnnnnnnnnnnnnnnnnnnnnnnnnnnnnnnnnnnnnnnnnnnnnnnnnnnnnnnnnnnnnnnnnnnnnnnnnnnnnnnnnnnnnnnnnnnnnnnnnnnnnnnnnnnnnnnnnnnnnnnnnnnnnnnnnnnnnnnnnnnnnnnnnnnnnnnnnnnnnnnnnnnnnnnnnnnnnnnnnnnnnnnnnnnnnnnnnnnnnnnnnnnnnnnnnnnnnnnnnnnnnnnnnnnnnnnnnnnnnnnnnnnnnnnnnnnnnnnnnnnnnnnnnnnnnnnnnnnnnnnnnnnnnnnnnnnnnnnnnnnnnnnnnnnnnnnnnnnnnnnnnnnnnnnnnnnnnnnnnnnnnnnnnnnnnnnnnnnnnnnnnnnnnnnnnnnnnnnnnnnnnnnnnnnnnnnnnnnnnnnnnnnnnnnnnnnnnnnnnnnnnnnnnnnnnnnnnnnnnnnnnnnnnnnnnnnnnnnnnnnnnnnnnnnnnnnnnnnnnnnnnnnnnnnnnnnnnnnnnnnnnnnnnnnnnnnnnnnnnnnnnnnnnnnnnnnnnnnnnnnnnnnnnnnnnnnnnnnnnnnnnnnnnnnnnnnnnnnnnnnnnnnnnnnnnnnnnnnnnnnnnnnnnnnnnnnnnnnnnnnnnnnnnnnnnnnnnnnnnnnnnnnnnnnnnnnnnnnnnnnnnnnnnnnnnnnnnnnnnnnnnnnnnnnnnnnnnnnnnnnnnnnnnnnnnnnnnnnnnnnnnnnnnnnnnnnnnnnnnnnnnnnnnnnnnnnnnnnnnnnnnnnnnnnnnnnnnnnnnnnnnnnnnnnnnnnnnnnnnnnnnnnnnnnnnnnnnnnnnnnnnnnnnnnnnnnnnnnnnnnnnnnnnnnnnnnnnnnnnnnnnnnnnnnnnnnnnnnnnnnnnnnnnnnnnnnnnnnnnnnnnnnnnnnnnnnnnnnnnnnnnnnnnnnnnnnnnnnnnnnnnnnnnnnnnnnnnnnnnnnnnnnnnnnnnnnnnnnnnnnnnnnnnnnnnnnnnnnnnnnnnnnnnnnnnnnnnnnnnnnnnnnnnnnnnnnnnnnnnnnnnnnnnnnnnnnnnnnnnnnnnnnnnnnnnnnnnnnnnnnnnnnnnnnnnnnnnnnnnnnnnnnnnnnnnnnnnnnnnnnnnnnnnnnnnnnnnnnnnnnnnnnnnnnnnnnnnnnnnnnnnnnnnnnnnnnnnnnnnnnnnnnnnnnnnnnnnnnnnnnnnnnnnnnnnnnnnnnnnnnnnnnnnnnnnnnnnnnnnnnnnnnnnnnnnnnnnnnnnnnnnnnnnnnnnnnnnnnnnnnnnnnnnnnnnnnnnnnnnnnnnnnnnnnnnnnnnnnnnnnnnnnnnnnnnnnnnnnnnnnnnnnnnnnnnnnnnnnnnnnnnnnnnnnnnnnnnnnnnnnnnnnnnnnnnnnnnnnnnnnnnnnnnnnnnnnnnnnnnnnnnnnnnnnnnnnnnnnnnnnnnnnnnnnnnnnnnnnnnnnnnnnnnnnnnnnnnnnnnnnnnnnnnnnnnnnnnnnnnnnnnnnnnnnnnnnnnnnnnnnnnnnnnnnnnnnnnnnnnnnnnnnnnnnnnnnnnnnnnnnnnnnnnnnnnnnnnnnnnnnnnnnnnnnnnnnnnnnnnnnnnnnnnnnnnnnnnnnnnnnnnnnnnnnnnnnnnnnnnnnnnnnnnnnnnnnnnnnnnnnnnnnnnnnnnnnnnnnnnnnnnnnnnnnnnnnnnnnnnnnnnnnnnnnnnnnnnnnnnnnnnnnnnnnnnnnnnnnnnnnnnnnnnnnnnnnnnnnnnnnnnnnnnnnnnnnnnnnnnnnnnnnnnnnnnnnnnnnnnnnnnnnnnnnnnnnnnnnnnnnnnnnnnnnnnnnnnnnnnnnnnnnnnnnnnnnnnnnnnnnnnnnnnnnnnnnnnnnnnnnnnnnnnnnnnnnnnnnnnnnnnnnnnnnnnnnnnnnnnnnnnnnnnnnnnnnnnnnnnnnnnnnnnnnnnnnnnnnnnnnnnnnnnnnnnnnnnnnnnnnnnnnnnnnnnnnnnnnnnnnnnnnnnnnnnnnnnnnnnnnnnnnnnnnnnnnnnnnnnnnnnnnnnnnnnnnnnnnnnnnnnnnnnnnnnnnnnnnnnnnnnnnnnnnnnnnnnnnnnnnnnnnnnnnnnnnnnnnnnnnnnnnnnnnnnnnnnnnnnnnnnnnnnnnnnnnnnnnnnnnnnnnnnnnnnnnnnnnnnnnnnnnnnnnnnnnnnnnnnnnnnnnnnnnnnnnnnnnnnnnnnnnnnnnnnnnnnnnnnnnnnnnnnnnnnnnnnnnnnnnnnnnnnnnnnnnnnnnnnnnnnnnnnnnnnnnnnnnnnnnnnnnnnnnnnnnnnnnnnnnnnnnnnnnnnnnnnnnnnnnnnnnnnnnnnnnnnnnnnnnnnnnnnnnnnnnnnnnnnnnnnnnnnnnnnnnnnnnnnnnnnnnnnnnnnnnnnnnnnnnnnnnnnnnnnnnnnnnnnnnnnnnnnnnnnnnnnnnnnnnnnnnnnnnnnnnnnnnnnnnnnnnnnnnnnnnnnnnnnnnnnnnnnnnnnnnnnnnnnnnnnnnnnnnnnnnnnnnnnnnnnnnnnnnnnnnnnnnnnnnnnnnnnnnnnnnnnnnnnnnnnnnnnnnnnnnnnnnnnnnnnnnnnnnnnnnnnnnnnnnnnnnnnnnnnnnnnnnnnnnnnnnnnnnnnnnnnnnnnnnnnnnnnnnnnnnnnnnnnnnnnnnnnnnnnnnnnnnnnnnnnnnnnnnnnnnnnnnnnnnnnnnnnnnnnnnnnnnnnnnnnnnnnnnnnnnnnnnnnnnnnnnnnnnnnnnnnnnnnnnnnnnnnnnnnnnnnnnnnnnnnnnnnnnnnnnnnnnnnnnnnnnnnnnnnnnnnnnnnnnnnnnnnnnnnnnnnnnnnnnnnnnnnnnnnnnnnnnnnnnnnnnnnnnnnnnnnnnnnnnnnnnnnnnnnnnnnnnnnnnnnnnnnnnnnnnnnnnnnnnnnnnnnnnnnnnnnnnnnnnnnnnnnnnnnnnnnnnnnnnnnnnnnnnnnnnnnnnnnnnnnnnnnnnnnnnnnnnnnnnnnnnnnnnnnnnnnnnnnnnnnnnnnnnnnnnnnnnnnnnnnnnnnnnnnnnnnnnnnnnnnnnnnnnnnnnnnnnnnnnnnnnnnnnnnnnnnnnnnnnnnnnnnnnnnnnnnnnnnnnnnnnnnnnnnnnnnnnnnnnnnnnnnnnnnnnnnnnnnnnnnnnnnnnnnnnnnnnnnnnnnnnnnnnnnnnnnnnnnnnnnnnnnnnnnnnnnnnnnnnnnnnnnnnnnnnnnnnnnnnnnnnnnnnnnnnnnnnnnnnnnnnnnnnnnnnnnnnnnnnnnnnnnnnnnnnnnnnnnnnnnnnnnnnnnnnnnnnnnnnnnnnnnnnnnnnnnnnnnnnnnnnnnnnnnnnnnnnnnnnnnnnnnnnnnnnnnnnnnnnnnnnnnnnnnnnnnnnnnnnnnnnnnnnnnnnnnnnnnnnnnnnnnnnnnnnnnnnnnnnnnnnnnnnnnnnnnnnnnnnnnnnnnnnnnnnnnnnnnnnnnnnnnnnnnnnnnnnnnnnnnnnnnnnnnnnnnnnnnnnnnnnnnnnnnnnnnnnnnnnnnnnnnnnnnnnnnnnnnnnnnnnnnnnnnnnnnnnnnnnnnnnnnnnnnnnnnnnnnnnnnnnnnnnnnnnnnnnnnnnnnnnnnnnnnnnnnnnnnnnnnnnnnnnnnnnnnnnnnnnnnnnnnnnnnnnnnnnnnnnnnnnnnnnnnnnnnnnnnnnnnnnnnnnnnnnnnnnnnnnnnnnnnnnnnnnnnnnnnnnnnnnnnnnnnnnnnnnnnnnnnnnnnnnnnnnnnnnnnnnnnnnnnnnnnnnnnnnnnnnnnnnnnnnnnnnnnnnnnnnnnnnnnnnnnnnnnnnnnnnnnnnnnnnnnnnnnnnnnnnnnnnnnnnnnnnnnnnnnnnnnnnnnnnnnnnnnnnnnnnnnnnnnnnnnnnnnnnnnnnnnnnnnnnnnnnnnnnnnnnnnnnnnnnnnnnnnnnnnnnnnnnnnnnnnnnnnnnnnnnnnnnnnnnnnnnnnnnnnnnnnnnnnnnnnnnnnnnnnnnnnnnnnnnnnnnnnnnnnnnnnnnnnnnnnnnnnnnnnnnnnnnnnnnnnnnnnnnnnnnnnnnnnnnnnnnnnnnnnnnnnnnnnnnnnnnnnnnnnnnnnnnnnnnnnnnnnnnnnnnnnnnnnnnnnnnnnnnnnnnnnnnnnnnnnnnnnnnnnnnnnnnnnnnnnnnnnnnnnnnnnnnnnnnnnnnnnnnnnnnnnnnnnnnnnnnnnnnnnnnnnnnnnnnnnnnnnnnnnnnnnnnnnnnnnnnnnnnnnnnnnnnnnnnnnnnnnnnnnnnnnnnnnnnnnnnnnnnnnnnnnnnnnnnnnnnnnnnnnnnnnnnnnnnnnnnnnnnnnnnnnnnnnnnnnnnnnnnnnnnnnnnnnnnnnnnnnnnnnnnnnnnnnnnnnnnnnnnnnnnnnnnnnnnnnnnnnnnnnnnnnnnnnnnnnnnnnnnnnnnnnnnnnnnnnnnnnnnnnnnnnnnnnnnnnnnnnnnnnnnnnnnnnnnnnnnnnnnnnnnnnnnnnnnnnnnnnnnnnnnnnnnnnnnnnnnnnnnnnnnnnnnnnnnnnnnnnnnnnnnnnnnnnnnnnnnnnnnnnnnnnnnnnnnnnnnnnnnnnnnnnnnnnnnnnnnnnnnnnnnnnnnnnnnnnnnnnnnnnnnnnnnnnnnnnnnnnnnnnnnnnnnnnnnnnnnnnnnnnnnnnnnnnnnnnnnnnnnnnnnnnnnnnnnnnnnnnnnnnnnnnnnnnnnnnnnnnnnnnnnnnnnnnnnnnnnnnnnnnnnnnnnnnnnnnnnnnnnnnnnnnnnnnnnnnnnnnnnnnnnnnnnnnnnnnnnnnnnnnnnnnnnnnnnnnttattagtgctgtccgctggggaaactcaggggaaacaattgcgtttgttaagcctcttcccaatcctatttagatgatcataacttaacgttgagcagggggctagaatggaaaaaatattgaaactgtttggccaaaaactttttattatgtccatcttcatttttagtctgaatgtttcaatggctcataccaaatccttggacgaaattaagttgcttccaccagataggattaccgagctcgccaagatgggaaacccagatgctcagtactggcttggggaattaatttacaatggtgccatatcaaattggcacgacttaaggcatttaatgatgccctattgggaggatgcgatgcggcaggggcatgcaatggctacctacagattacttgagtgggtcaggggcggtgctgtgccagatgatatggctaaacttaagtcatcagagattaaattatatctcagtaaactcgctaatgcaggtgaagccaaagctaacatgatattgtttcgggatacgttatccgattttgtaaataaacgaaatacttctggtgagactgataatcttttaaaaagaactgcagataaatatctaattcgtgcttacgaaattggatcgagagacgctgcatatcggtatgcgatcatgttgtcttatggcagcatatctataccgcaggatcattctttagctgtaacaatttttgaagaagcctacgcaatggagccagatgaaccaaaaagagacgatggcagtttatcctgttcaatattaattatactttctgattattatggaggtcagtttctagttgatggtgaaaattactctggcgaagcggacgatgcatcttaccttcatacattatctaaaagcgtgaaagattcttgtccgatcttgatgttccgttactccacttacttaatggaaaacggggaggctgatgattatttcgacgcttatctcgtagctctagatgctttagatatcgctaaagctgatcatcttgctaccgattatatgtacgatttactgggaacgctagctctgaaactaaatgagccgctcaaagcgaaagagcatttttcaaaaatgaaagatgagcagtatattgaatggttatttaatgaatatttgggtggtggtctaaaactttgtagcgcgctggatgtttcaaaaaatgagtgcagggcttttatttttaattgagaaattcagcatagttatttttgtgtaaaaaatttcaaacaaagatgttaaacatttaaatgaaatattagacgtagtcgtattttaatctaattgctctgctagttgtgaagtgaagggtgccagtaaatattagatcctttacacgggtaactccgatatcgcggtggatggggctggggttcgttagggaaaaattactttggcagattctcaatggtagaggggggggcaaaaaacagccgcccctttctagtgatgggtgttgctctcacatttttgactgagaatgctctatgaaataattaatacgattttcaaataaatttttagtagatttctagtatcttgtcgatactctctaataacctgagcaccagctgtaacaatcaaatcttgcggtgaattttatttatgtttgaacaagtgaaaattgaggcaacccttcgtactccgattattattcaggggtatatgacatttgatgcgctattaggtgcattactgtttgagcggctacaggatgtcgacaaaacgcactccagcattccaattcaatgtgatgatgggctgttttatgcttctgcagctcaggttgaagtcattgatcgtggtggtttggcaattgctgctaatctgagggcccagcatgacttgaacccaaatcatgtaaagaaaagtcgtgatggctcaaaactgcacaaaagtttaggattgaagcgccgtagacagtttggagcagttctaaataaatacagaacaatcactgtaaattctatcagttgggatgtgactggcgatattaaccagattgaagacttgcttaatgatgctttttttatcggcaaaaaaagaacagcaggttatggtgaagttataagttgggacttcaagaacagtgaaacagacggtctcatagatgcgcaaggacaggcactaaggcctattccggtagaacgttttaatggtgataagtctttgccaataattgataccgcttggaagcctgcttattggaatcctgagaacaggtcagcctgttatgctcctgagcctgtctcatgaatacatttgtttttctccgggagcattttgctagatatgttttgcctgatcttagcaatgacgcagtcgcagactgcaaacgtgcactcacgatgaaccatctccttgttaccggaaagtcggggaggttaagcggttgggtaatggttaaaaaagataaaacctatatccaagccaaaattgcagcaaagcatgcaaaccttataaccgccgatccacgtacccggtatgaagcatggtatgaggagctcgaaaatttttcaggacctacctgctttatagaatttacaaagagtacctttaatattggcaatatctttttgacccatgatgcgcgagttgtaaaaatttgtgggccagcttcgtctcaaacattcaattataccgatgaaccaaacgaagcttctggtgtagcacataaagtgctcgccaagatgcggagaaaaaatgctgtttgattataaaatattaaaatctgatgcaaaaaatgcctatgacttgcatcagcttgtcgctgccacctttaagggtgagagtggcagaaatttgttctgtgattacggcgaccacatacgtgtgcggagcacaaagcacactctaaatgcgaaacaaggtgtcgccgttactgtgcctgccgtcggcgcaatagctttcattgaattgcgagcatcctgttatgtgtctgggggaggaaaaaaatatttcctgatgcaaggtgattggagagccaggcatacctggcttgaaaaaaagagcgcccaaagtggcttttcggttttaaatgtaacctgtcaatcagaactgatgaaaatcccaaagccaggtgcacagttcacgcttgattgcaccgactttgctgcatgcatcaagatcaatgacatagaaaaattcgaaactgccttgcgcgatggaattggatcgaaaggcagagcgtttggttttggaatgcttgttttatgaataatatggagacaatgaaatggtaaatacgatctttaatatggttctaacatctgagcagcctttgagtatcacgctacccgtggccgagtacactcgggcaaataaatttgctaactctccagttatgacccgagggctcgacgcggaaggtgcgaagcaagaaacatgttacattcctgctacgacttttcgcggaatgctcaggcgtcatgtggttgtcccgctgatggaggagcgagccagaaacggtgatcactatactttggatgaagcctaccgtgatttgattgggcaggatgctgccagcgaacaacagccagatgaaattgatctgatggctttaaaaaatatgcgtgcacaaaatccaattgtcgatttgtttggtctcggtttgggtgttcaatcacgcctaaaagtcagtcactttcttccagagcataatattttgccagaggtatttaccaccgctcgaaaggacttaggcgatgcagacgatggtgcaatactggacttggttcgcgatgaagagagagaaaaatatctcaaaagagccaacgcaaattcaaagagatctgctgcagaaagccttctggcgcggctggtgaagcagaagaaaaaggacggttcatcagcagacttggatgctcaaatagttgcgacagaaagtaaggttgaagagtaccgtgatgcgatggatggcatgaccaattcttctcggaccatacttacgcattacgccatgcctgcgggtgtacagtggacgggacgtttaattattacaaactccactgaaaaagatatcgatgctctgtgtggagccttagatcgtttcagtagctatccgatgattggtgcccagcatgcccgtggatgcggtgagattagtggtattgctaatatagaaacagatagaaggctggttaaaagaattagttttggtggctttgcgccagcacaaatagacaacgtagcctaggatgaaggagctaatcatacattttttatattggaaatgcggttaaagttaacttttctaaatggttatgaaaactctgttgtggcccccattaatttgtggggcaactgaaactcgaaggtctgtattgtacggtcatagaaggttgtggcccccatttatttgtggggcaactgaaaccataaccctgacaccttctattggactaatgctgcggcccccagtagtttgaggggcaactgaaacatggagcaacaactaataaaaacactactggttgtggcccccattaatttgtggggcaactgaaacaagtcggtggccagttgggtgttgtaggatgttgtggcccccattaatttgtggggcaactgaaacgatggcttcacgcaagttatagcagccgatgttgtggcccccattaatttgtggggcaactgaaactctgcaccgaagcggatcttttgccgccccgttgtggcccccattaatttgtggggcaactgaaaccgccgcgtacccggccttatttctgcgatgttgtggcccccattaatttgtggggcaactgaaacaagatggcttgcccaggtgcgccagcctgccgttgtggcccccatcgatatgtggggcaaaataaagagagccaagcatgctagttttggctctctttaacgtaacgcaccatatgaagttggatttaactagtgtttaattcacacttttggttaggtttactgattcaaagtggaaaatgggggatgatcagaatttttagatcggaagagcaagatcagttttttaagctgatccaaaaacatatagaaacccctgatgcacctttactgctggaaggagccactggactgggtaaaacgctgccgttccttgttgccgcagcggtaagtggtaaaaaggttgcgatagttttcccaacccatcagctgatcaatcaggctttggatagctgggacttaaaagcaacacttgcggcctatcccgcagtgattgtgaaggcctttagacctaggtcatatttcgaagcctcacctgcagattacgcggcacacaaacaagaagcgttagacgcagacataatgttctgcacctcggtatccgtgatcatagaccaaagactcaatggcgattataatggctcaacagacagagatgtgattatctttgatgaggcagatcagcttcctcaatttgctgctttgacctctgatatttcactcagcagaattgatctaagaagcctcagaattaatgaatcttcgccaaaagagaccattgatgcaatcttcaaaaagaagacattgccgtcagaaatcagggcaaaggcgcgcttgatagaagaagcgttaggccttggcgatgtttggtttattaaggtgggttttgcggatgatggagccttagaggtgcgctcacgcttgcctggaaggctgttaaaacgcgtatccaaccgagcatcgacaatttttataagcgcaaccctgtctgtaaatggtacatttaaagacttttgtcgtgcgatgggaatagaagagaagagtagactgtctgcaatagttgagcccaagaaacatggggacctacaatttgattttataactgatgaagagcttggaagcgatgcttggctggacgcagtttgtgaagcaattgaatatgccgatcatcctgtactggtcgctacaccgtcgcattctttagctcaacagattgcaagtaatgctactcaggcgaccttaagagccgcggatgaaacaacgtcgcaagctgctgcgcgtatgggagatacaaaggttctcatagcagcgggtgcatgggcagggcttgatacgccggtacaatggaaaacggttgtggtacctagaataccctacactgggccaaacaatctcagagagttttggtatgatgatgaagaggactttggcgtccagaagccagatccgatgtcatcttttatagattcaaaaaatgctgcggctcgtaggctgaagcaggtctttggcagaggcttaagaacacccgatgccgaatgctcaataatactttgcgacccgcgaattgatcgttttaataagattgcaccagccagatttcagaaaacgtattttgagggaatggccatttcagttaatgcaacaaaatctgaacgttcgcctctgcttagaaaagcagcactcgctcattatggtgaaacctgcatggcctgtgactttattcctgagtctttaaggcaattagaaatccaccatcttgagccccttgctgatcgtgggccaagccacacgaccctgaatgacgtcgtggtattgtgcagaaactgccacggtttggcacatgacactaatccgcccatacagttgccagagcttaaattacgatctcaaaagttgaaaaagaaaagacctggattgtccatgatttaaagatttcgattttcctgtacgctggtatccattaagttaaccagtcaatttggctgatcccaaacaacaattgtttgatgaatagccccagttttttgccgtactgacataccactgacacgtgactgcgcatacgcactggctaagtaactaggttttaacgaaattggatagaattttgttaaaacggaatgtcgtcgttatcaaacgaattaatatccgcaattggtggagtgttggcgttttggaaattaactgactgcgagctgttagcgtcgttaccattgcgtgaaactttccacgccttaacatccgtgtaccaacgcccattatattctcggctctccagatcgattgaaacctcaacggtttctccctgctggatattaaactgatcaatcttatcaccccaagccatgaagcagactttcttggggtattgggcctcagtctccagaacatactcttgcttgcgccattctccattcgctgactgtccggatttaacttccaatatttcaacaatcttccctgaaatttccaaagttaccaccttctctgcattcattgtaactgcttactttcgtatcaaactacgcgatctgaataaaaggccaagcgtattcctctgaatcttgtggattgagttgaagctacgcatgtg

SEQ ID NO: 189 - DNA, 12392 bp, Artificial Sequence; identical to SEQ ID NO: 4
  Synthetic Oligonucleotide
  misc_feature (1)..(4007): n is a, c, g, or t

SEQ ID NO: 190 - DNA, 12374 bp, Artificial Sequence
  Synthetic Oligonucleotide
  misc_feature (1)..(8235): n is a, c, g, or t
nnnnnnnnnnnnnnnnnnnnnnnnnnnnnnnnnnnnnnnnnnnnnnnnnnnnnnnnnnnnnnnnnnnnnnnnnnnnnnnnnnnnnnnnnnnnnnnnnnnnnnnnnnnnnnnnnnnnnnnnnnnnnnnnnnnnnnnnnnnnnnnnnnnnnnnnnnnnnnnnnnnnnnnnnnnnnnnnnnnnnnnnnnnnnnnnnnnnnnnnnnnnnnnnnnnnnnnnnnnnnnnnnnnnnnnnnnnnnnnnnnnnnnnnnnnnnnnnnnnnnnnnnnnnnnnnnnnnnnnnnnnnnnnnnnnnnnnnnnnnnnnnnnnnnnnnnnnnnnnnnnnnnnnnnnnnnnnnnnnnnnnnnnnnnnnnnnnnnnnnnnnnnnnnnnnnnnnnnnnnnnnnnnnnnnnnnnnnnnnnnnnnnnnnnnnnnnnnnnnnnnnnnnnnnnnnnnnnnnnnnnnnnnnnnnnnnnnnnnnnnnnnnnnnnnnnnnnnnnnnnnnnnnnnnnnnnnnnnnnnnnnnnnnnnnnnnnnnnnnnnnnnnnnnnnnnnnnnnnnnnnnnnnnnnnnnnnnnnnnnnnnnnnnnnnnnnnnnnnnnnnnnnnnnnnnnnnnnnnnnnnnnnnnnnnnnnnnnnnnnnnnnnnnnnnnnnnnnnnnnnnnnnnnnnnnnnnnnnnnnnnnnnnnnnnnnnnnnnnnnnnnnnnnnnnnnnnnnnnnnnnnnnnnnnnnnnnnnnnnnnnnnnnnnnnnnnnnnnnnnnnnnnnnnnnnnnnnnnnnnnnnnnnnnnnnnnnnnnnnnnnnnnnnnnnnnnnnnnnnnnnnnnnnnnnnnnnnnnnnnnnnnnnnnnnnnnnnnnnnnnnnnnnnnnnnnnnnnnnnnnnnnnnnnnnnnnnnnnnnnnnnnnnnnnnnnnnnnnnnnnnnnnnnnnnnnnnnnnnnnnnnnnnnnnnnnnnnnnnnnnnnnnnnnnnnnnnnnnnnnnnnnnnnnnnnnnnnnnnnnnnnnnnnnnnnnnnnnnnnnnnnnnnnnnnnnnnnnnnnnnnnnnnnnnnnnnnnnnnnnnnnnnnnnnnnnnnnnnnnnnnnnnnnnnnnnnnnnnnnnnnnnnnnnnnnnnnnnnnnnnnnnnnnnnnnnnnnnnnnnnnnnnnnnnnnnnnnnnnnnnnnnnnnnnnnnnnnnnnnnnnnnnnnnnnnnnnnnnnnnnnnnnnnnnnnnnnnnnnnnnnnnnnnnnnnnnnnnnnnnnnnnnnnnnnnnnnnnnnnnnnnnnnnnnnnnnnnnnnnnnnnnnnnnnnnnnnnnnnnnnnnnnnnnnnnnnnnnnnnnnnnnnnnnnnnnnnnnnnnnnnnnnnnnnnnnnnnnnnnnnnnnnnnnnnnnnnnnnnnnnnnnnnnnnnnnnnnnnnnnnnnnnnnnnnnnnnnnnnnnnnnnnnnnnnnnnnnnnnnnnnnnnnnnnnnnnnnnnnnnnnnnnnnnnnnnnnnnnnnnnnnnnnnnnnnnnnnnnnnnnnnnnnnnnnnnnnnnnnnnnnnnnnnnnnnnnnnnnnnnnnnnnnnnnnnnnnnnnnnnnnnnnnnnnnnnnnnnnnnnnnnnnnnnnnnnnnnnnnnnnnnnnnnnnnnnnnnnnnnnnnnnnnnnnnnnnnnnnnnnnnnnnnnnnnnnnnnnnnnnnnnnnnnnnnnnnnnnnnnnnnnnnnnnnnnnnnnnnnnnnnnnnnnnnnnnnnnnnnnnnnnnnnnnnnnnnnnnnnnnnnnnnnnnnnnnnnnnnnnnnnnnnnnnnnnnnnnnnnnnnnnnnnnnnnnnnnnnnnnnnnnnnnnnnnnnnnnnnnnnnnnnnnnnnnnnnnnnnnnnnnnnnnnnnnnnnnnnnnnnnnnnnnnnnnnnnnnnnnnnnnnnnnnnnnnnnnnnnnnnnnnnnnnnnnnnnnnnnnnnnnnnnnnnnnnnnnnnnnnnnnnnnnnnnnnnnnnnnnnnnnnnnnnnnnnnnnnnnnnnnnnnnnnnnnnnnnnnnnnnnnnnnnnnnnnnnnnnnnnnnnnnnnnnnnnnnnnnnnnnnnnnnnnnnnnnnnnnnnnnnnnnnnnnnnnnnnnnnnnnnnnnnnnnnnnnnnnnnnnnnnnnnnnnnnnnnnnnnnnnnnnnnnnnnnnnnnnnnnnnnnnnnnnnnnnnnnnnnnnnnnnnnnnnnnnnnnnnnnnnnnnnnnnnnnnnnnnnnnnnnnnnnnnnnnnnnnnnnnnnnnnnnnnnnnnnnnnnnnnnnnnnnnnnnnnnnnnnnnnnnnnnnnnnnnnnnnnnnnnnnnnnnnnnnnnnnnnnnnnnnnnnnnnnnnnnnnnnnnnnnnnnnnnnnnnnnnnnnnnnnnnnnnnnnnnnnnnnnnnnnnnnnnnnnnnnnnnnnnnnnnnnnnnnnnnnnnnnnnnnnnnnnnnnnnnnnnnnnnnnnnnnnnnnnnnnnnnnnnnnnnnnnnnnnnnnnnnnnnnnnnnnnnnnnnnnnnnnnnnnnnnnnnnnnnnnnnnnnnnnnnnnnnnnnnnnnnnnnnnnnnnnnnnnnnnnnnnnnnnnnnnnnnnnnnnnnnnnnnnnnnnnnnnnnnnnnnnnnnnnnnnnnnnnnnnnnnnnnnnnnnnnnnnnnnnnnnnnnnnnnnnnnnnnnnnnnnnnnnnnnnnnnnnnnnnnnnnnnnnnnnnnnnnnnnnnnnnnnnnnnnnnnnnnnnnnnnnnnnnnnnnnnnnnnnnnnnnnnnnnnnnnnnnnnnnnnnnnnnnnnnnnnnnnnnnnnnnnnnnnnnnnnnnnnnnnnnnnnnnnnnnnnnnnnnnnnnnnnnnnnnnnnnnnnnnnnnnnnnnnnnnnnnnnnnnnnnnnnnnnnnnnnnnnnnnnnnnnnnnnnnnnnnnnnnnnnnnnnnnnnnnnnnnnnnnnnnnnnnnnnnnnnnnnnnnnnnnnnnnnnnnnnnnnnnnnnnnnnnnnnnnnnnnnnnnnnnnnnnnnnnnnnnnnnnnnnnnnnnnnnnnnnnnnnnnnnnnnnnnnnnnnnnnnnnnnnnnnnnnnnnnnnnnnnnnnnnnnnnnnnnnnnnnnnnnnnnnnnnnnnnnnnnnnnnnnnnnnnnnnnnnnnnnnnnnnnnnnnnnnnnnnnnnnnnnnnnnnnnnnnnnnnnnnnnnnnnnnnnnnnnnnnnnnnnnnnnnnnnnnnnnnnnnnnnnnnnnnnnnnnnnnnnnnnnnnnnnnnnnnnnnnnnnnnnnnnnnnnnnnnnnnnnnnnnnnnnnnnnnnnnnnnnnnnnnnnnnnnnnnnnnnnnnnnnnnnnnnnnnnnnnnnnnnnnnnnnnnnnnnnnnnnnnnnnnnnnnnnnnnnnnnnnnnnnnnnnnnnnnnnnnnnnnnnnnnnnnnnnnnnnnnnnnnnnnnnnnnnnnnnnnnnnnnnnnnnnnnnnnnnnnnnnnnnnnnnnnnnnnnnnnnnnnnnnnnnnnnnnnnnnnnnnnnnnnnnnnnnnnnnnnnnnnnnnnnnnnnnnnnnnnnnnnnnnnnnnnnnnnnnnnnnnnnnnnnnnnnnnnnnnnnnnnnnnnnnnnnnnnnnnnnnnnnnnnnnnnnnnnnnnnnnnnnnnnnnnnnnnnnnnnnnnnnnnnnnnnnnnnnnnnnnnnnnnnnnnnnnnnnnnnnnnnnnnnnnnnnnnnnnnnnnnnnnnnnnnnnnnnnnnnnnnnnnnnnnnnnnnnnnnnnnnnnnnnnnnnnnnnnnnnnnnnnnnnnnnnnnnnnnnnnnnnnnnnnnnnnnnnnnnnnnnnnnnnnnnnnnnnnnnnnnnnnnnnnnnnnnnnnnnnnnnnnnnnnnnnnnnnnnnnnnnnnnnnnnnnnnnnnnnnnnnnnnnnnnnnnnnnnnnnnnnnnnnnnnnnnnnnnnnnnnnnnnnnnnnnnnnnnnnnnnnnnnnnnnnnnnnnnnnnnnnnnnnnnnnnnnnnnnnnnnnnnnnnnnnnnnnnnnnnnnnnnnnnnnnnnnnnnnnnnnnnnnnnnnnnnnnnnnnnnnnnnnnnnnnnnnnnnnnnnnnnnnnnnnnnnnnnnnnnnnnnnnnnnnnnnnnnnnnnnnnnnnnnnnnnnnnnnnnnnnnnnnnnnnnnnnnnnnnnnnnnnnnnnnnnnnnnnnnnnnnnnnnnnnnnnnnnnnnnnnnnnnnnnnnnnnnnnnnnnnnnnnnnnnnnnnnnnnnnnnnnnnnnnnnnnnnnnnnnnnnnnnnnnnnnnnnnnnnnnnnnnnnnnnnnnnnnnnnnnnnnnnnnnnnnnnnnnnnnnnnnnnnnnnnnnnnnnnnnnnnnnnnnnnnnnnnnnnnnnnnnnnnnnnnnnnnnnnnnnnnnnnnnnnnnnnnnnnnnnnnnnnnnnnnnnnnnnnnnnnnnnnnnnnnnnnnnnnnnnnnnnnnnnnnnnnnnnnnnnnnnnnnnnnnnnnnnnnnnnnnnnnnnnnnnnnnnnnnnnnnnnnnnnnnnnnnnnnnnnnnnnnnnnnnnnnnnnnnnnnnnnnnnnnnnnnnnnnnnnnnnnnnnnnnnnnnnnnnnnnnnnnnnnnnnnnnnnnnnnnnnnnnnnnnnnnnnnnnnnnnnnnnnnnnnnnnnnnnnnnnnnnnnnnnnnnnnnnnnnnnnnnnnnnnnnnnnnnnnnnnnnnnnnnnnnnnnnnnnnnnnnnnnnnnnnnnnnnnnnnnnnnnnnnnnnnnnnnnnnnnnnnnnnnnnnnnnnnnnnnnnnnnnnnnnnnnnnnnnnnnnnnnnnnnnnnnnnnnnnnnnnnnnnnnnnnnnnnnnnnnnnnnnnnnnnnnnnnnnnnnnnnnnnnnnnnnnnnnnnnnnnnnnnnnnnnnnnnnnnnnnnnnnnnnnnnnnnnnnnnnnnnnnnnnnnnnnnnnnnnnnnnnnnnnnnnnnnnnnnnnnnnnnnnnnnnnnnnnnnnnnnnnnnnnnnnnnnnnnnnnnnnnnnnnnnnnnnnnnnnnnnnnnnnnnnnnnnnnnnnnnnnnnnnnnnnnnnnnnnnnnnnnnnnnnnnnnnnnnnnnnnnnnnnnnnnnnnnnnnnnnnnnnnnnnnnnnnnnnnnnnnnnnnnnnnnnnnnnnnnnnnnnnnnnnnnnnnnnnnnnnnnnnnnnnnnnnnnnnnnnnnnnnnnnnnnnnnnnnnnnnnnnnnnnnnnnnnnnnnnnnnnnnnnnnnnnnnnnnnnnnnnnnnnnnnnnnnnnnnnnnnnnnnnnnnnnnnnnnnnnnnnnnnnnnnnnnnnnnnnnnnnnnnnnnnnnnnnnnnnnnnnnnnnnnnnnnnnnnnnnnnnnnnnnnnnnnnnnnnnnnnnnnnnnnnnnnnnnnnnnnnnnnnnnnnnnnnnnnnnnnnnnnnnnnnnnnnnnnnnnnnnnnnnnnnnnnnnnnnnnnnnnnnnnnnnnnnnnnnnnnnnnnnnnnnnnnnnnnnnnnnnnnnnnnnnnnnnnnnnnnnnnnnnnnnnnnnnnnnnnnnnnnnnnnnnnnnnnnnnnnnnnnnnnnnnnnnnnnnnnnnnnnnnnnnnnnnnnnnnnnnnnnnnnnnnnnnnnnnnnnnnnnnnnnnnnnnnnnnnnnnnnnnnnnnnnnnnnnnnnnnnnnnnnnnnnnnnnnnnnnnnnnnnnnnnnnnnnnnnnnnnnnnnnnnnnnnnnnnnnnnnnnnnnnnnnnnnnnnnnnnnnnnnnnnnnnnnnnnnnnnnnnnnnnnnnnnnnnnnnnnnnnnnnnnnnnnnnnnnnnnnnnnnnnnnnnnnnnnnnnnnnnnnnnnnnnnnnnnnnnnnnnnnnnnnnnnnnnnnnnnnnnnnnnnnnnnnnnnnnnnnnnnnnnnnnnnnnnnnnnnnnnnnnnnnnnnnnnnnnnnnnnnnnnnnnnnnnnnnnnnnnnnnnnnnnnnnnnnnnnnnnnnnnnnnnnnnnnnnnnnnnnnnnnnnnnnnnnnnnnnnnnnnnnnnnnnnnnnnnnnnnnnnnnnnnnnnnnnnnnnnnnnnnnnnnnnnnnnnnnnnnnnnnnnnnnnnnnnnnnnnnnnnnnnnnnnnnnnnnnnnnnnnnnnnnnnnnnnnnnnnnnnnnnnnnnnnnnnnnnnnnnnnnnnnnnnnnnnnnnnnnnnnnnnnnnnnnnnnnnnnnnnnnnnnnnnnnnnnnnnnnnnnnnnnnnnnnnnnnnnnnnnnnnnnnnnnnnnnnnnnnnnnnnnnnnnnnnnnnnnnnnnnnnnnnnnnnnnnnnnnnnnnnnnnnnnnnnnnnnnnnnnnnnnnnnnnnnnnnnnnnnnnnnnnnnnnnnnnnnnnnnnnnnnnnnnnnnnnnnnnnnnnnnnnnnnnnnnnnnnnnnnnnnnnnnnnnnnnnnnnnnnnnnnnnnnnnnnnnnnnnnnnnnnnnnnnnnnnnnnnnnnnnnnnnnnnnnnnnnnnnnnnnnnnnnnnnnnnnnnnnnnnnnnnnnnnnnnnnnnnnnnnnnnnnnnnnnnnnnnnnnnnnnnnnnnnnnnnnnnnnnnnnnnnnnnnnnnnnnnnnnnnnnnnnnnnnnnnnnnnnnnnnnnnnnnnnnnnnnnnnnnnnnnnnnnnnnnnnnnnnnnnnnnnnnnnnnnnnnnnnnnnnnnnnnnnnnnnnnnnnnnnnnnnnnnnnnnnnnnnnnnnnnnnnnnnnnnnnnnnnnnnnnnnnnnnnnnnnnnnnnnnnnnnnnnnnnnnnnnnnnnnnnnnnnnnnnnnnnnnnnnnnnnnnnnnnnnnnnnnnnnnnnnnnnnnnnnnnnnnnnnnnnnnnnnnnnnnnnnnnnnnnnnnnnnnnnnnnnnnnnnnnnnnnnnnnnnnnnnnnnnnnnnnnnnnnnnnnnnnnnnnnnnnnnnnnnnnnnnnnnnnnnnnnnnnnnnnnnnnnnnnnnnnnnnnnnnnnnnnnnnnnnnnnnnnnnnnnnnnnnnnnnnnnnnnnnnnnnnnnnnnnnnnnnnnnnnnnnnnnnnnnnnnnnnnnnnnnnnnnnnnnnnnnnnnnnnnnnnnnnnnnnnnnnnnnnnnnnnnnnnnnnnnnnnnnnnnnnnnnnnnnnnnnnnnnnnnnnnnnnnnnnnnnnnnnnnnnnnnnnnnnnnnnnnnnnnnnnnnnnnnnnnnnnnnnnnnnnnnnnnnnnnnnnnnnnnnnnnnnnnnnnnnnnnnnnnnnnnnnnnnnnnnnnnnnnnnnnnnnnnnnnnnnnnnnnnnnnnnnnnnnnnnnnnnnnnnnnnnnnnnnnnnnnnnnnnnnnnnnnnnnnnnnnnnnnnnnnnnnnnnnnnnnnnnnnnnnnnnnnnnnnnnnnnnnnnnnnnnnnnnnnnnnnnnnnnnnnnnnnnnnnnnnnnnnnnnnnnnnnnnnnnnnnnnnnnnnnnnnnnnnnnnnnnnnnnnnnnnnnnnnnnnnnnnnnnnnnnnnnnnnnnnnnnnnnnnnnnnnnnnnnnnnnnnnnnnnnnnnnnnnnnnnnnnnnnnnnnnnnnnnnnnnnnnnnnnnnnnnnnnnnnnnnnnnnnnnnnnnnnnnnnnnnnnnnnnnnnnnnnnnnnnnnnnnnnnnnnnnnnnnnnnnnnnnnnnnnnnnnnnnnnnnnnnnnnnnnnnnnnnnnnnnnnnnnnnnnnnnnnnnnnnnnnnnnnnnnnnnnnnnnnnnnnnnnnnnnnnnnnnnnnnnnnnnnnnnnnnnnnnnnnnnnnnnnnnnnnnnnnnnnnnnnnnnnnnnnnnnnnnnnnnnnnnnnnnnnnnnnnnnnnnnnnnnnnnnnnnnnnnnnnnnnnnnnnnnnnnnnnnnnnnnnnnnnnnnnnnnnnnnnnnnnnnnnnnnnnnnnnnnnnnnnnnnnnnnnnnnnnnnnnnnnnnnnnnnnnnnnnnnnnnnnnnnnnnnnnnnnnnnnnnnnnnnnnnnnnnnnnnnnnnnnnnnnnnnnnnnnnnnnnnnnnnnnnnnnnnnnnnnnnnnnnnnnnnnnnnnnnnnnnnnnnnnnnnnnnnnnnnnnnnnnnnnnnnnnnnnnnnnnnnnnnnnnnnnnnnnnnnnnnnnnnnnnnnnnnnnnnnnnnnnnnnnnnnnnnnnnnnnnnnnnnnnnnnnnnnnnnnnnnnnnnnnnnnnnnnnnnnnnnnnnnnnnnnnnnnnnnnnnnnnnnnnnnnnnnnnnnnnnnnnnnnnnnnnnnnnnnnnnnnnnnnnnnnnnnnnnnnnnnnnnnnnnnnnnnnnnnnnnnnnnnnnnnnnnnnnnnnnnnnnnnnnnnnnnnnnnnnnnnnnnnnnnnnnnnnnnnnnnnnnnnnnnnnnnnnnnnnnnnnnnnnnnnnnnnnnnnnnnnnnnnnnnnnnnnnnnnnnnnnnnnnnnnnnnnnnnnnnntcaaaaaaaaataatggaaaacacgtttattttcctgaggccgattggcgtcgaaggcacgaatggcttcgtcaaaaaggtacaaaacacggattcagtccgctgacactgcattgtaaagccagtcgcgcaaaacttgataacggtcgaggaaacatcttcacagtcgaccaaaccgactttgtcggagtgctccgggttaccgacaaagaattgtttgagaacgttctagccaaaggaattggatcaacagccaaaacctacgggttcggcatgttaattatttagagacaggggaatgctgtgaataatatcattatcaacgggacaataacgactgtcggaccgctctcaatctcaatgccagaagtagacgaccccgataccggtggtttcccgatgatggcacgaggtgttgatcaagatggaaacaaacaccggacgggataccttcccggcacaacggtgagagggtttttaaggcgggcagttgtcaccaggtcgatgcaagcagcatcagaagcaggcgaaccttattcgcttactcgcgcatactcagagcttatcggtcaagacagcgccagtgagaaacaagcaggtgaaatcgacctggcagaagttaagaaggcgagagaaggctctcctataatagatctatttggaagcggtctcggcgtagcaagtaggctacgtgtcgggcactttgtccccaccgcaaacgtcgtgccagacttttaccgaggtgttcggaaagacctgggagacacggaaggggtagtcgagctgctatccgataaagacattcaagcctactatgcccgctcagaatcgaatagtcggcgtgggcctgctgaaacacttgtgaagtccctaaagcagaaagttcgagccgcaaagaacaaaaacgaagacgctggtgagctcaaaaaagaactggaagaggcggagaagctgctcgctaaacatgtcgcaggcatgggtgacatgaagaactcaagcaagacgcctggcattagttatcacgctcttcccgcctcactcgagctaaatggtcgcatcgtcattctaaatgcaaaagatcgggacttagagatgttggaatatgcgctagaccaactaagtctcaacccggtcttcggtgctcaatcagcaagaggctgcggtgaaatcagtgggaccttcgacattaatatcgaaggaaaattcgcaaaaaaaatgacaattggtggctatgaagcagccaaagtcacagttttttgaaggtagaaacacctatttcagcaatttcttcaatgcattatgcgatatctactgaagccactcccgattcgagtggttactgaaacaatcgactatcaagaaaagaactatagcggactgaagccactcccgattcgagtggttactgaaaccgagccttcgatgctttcagtgctgcctttactgaagccactcccgattcgagtggttactgaaacccaaaaggctcaacagagatcggctggggtactgaagccactcccgattcgagtggttactgaaacgtggcacctgtgtcgccgcgaggaactgtgactgaagccactcccgattcgagtggttactgaaacgtgtagagcatgtagagctggtgctgcgcactgaagccactcccgattcgagtggttactgcaacttacttccgggaaataaagaacccggtcgatctaaagccacactaattcgtgtgtggttcctttgtgtaaatagtgcaagaattattttatgttccgttcccacgaacaagaaaatttttataaaatcatcgcggcgcacctcgaggtctgcgatgcgccactgctgctcgaagggggaaccggcctcggtaaaaccagggcctacctagcggcagtcgcgaagaccgataaaaccgtcgcaatcattttaccgacgcatctattgatcaatcagcttgtcgcctcaaaggaccttgaaaacgttgggcttgaggtcacggctttcagaccatcgcgtgattttgagactagggctgactatgtggctcatagaacggcctctatggccggacgcgtgatgctttgcacagcagccagcgtaatcatcgatcagcgcctcgctgggaactacaacggtgttatcaatcgagagctgttggtctttgatgaggctgacgagcttcccgccgccgccgcgctgcagcaagaccaagaagtcacggctagtgcccttcgcgatgccaacgtgaaactgtcgactgcagaagacaccttacgaaaactccttaaaaaaaagaggctcgaaccagaaacccgagcggccgccttgatggctctcgaggccatcgaagagcctgcttggttttatcaaaccgggataaataaagatggcggcatatccctttgtcaccgattacctggcaggctccttaaacgaatagccaacaaaggaaactccatattcattagcgcgaccctatcggtcgctggaagcttcaaaaattttcaaggaagcatggggatagacgcaatcagtagcctgtcgtcgatgatagagcctgaacaccacgggactatcgaactccatacgccacttgacgaagagcctgcggaggtcgtccgtagagccgcgaagccctgtctcgttgtaacccccagcttcaagttggcggaaacaatcggcaaacagatacccaacgccactgtaagattacaaactgagaccactactgaggcggcgcaacgaataggccctgatggtgtgttgattgcggcaggggcttgggctggtttggatactccgacagtttgggcatcaatcgtcgttccgaaaattccgttttccgccccaactgtgctcgacgggaaaatcgaaagccaatacctcgatagtcggaacgttgcgatcaggcggatgcgtcaggtgataggcagaggcctgaggacaccggatgcgaaatgccaggtgtacattcttgatggtcgttacaaggccttaggcgctttcgtacctgaacgctttcaggagtcctggatcgagggtgacattcaagtctatttacaggctgaagcaaaacggatgcgagggtatcggaagaaggctctagagcattacgggagcagttgcttcgtgtgttcttttgagccgaaagtactccgccaaatacacatacatcacttggaaccaattgctgagggtgtcaggacgacgactctagaggatctgcggccactttgtgccaattgtcatgagcttgcgcatagcgagagccccccaatcacaatcgaacgcctaaaggggatggagggcccataagacaaatgccacccgtgcctaaattctgccgcatctaacgattattaagaataagaagatgggtagggagaatatgagatggcgagtagtggcattatgtggatcgattacacattcaatttagcagtgcagcttttgtatgtttgcgcagaaattctcggcataacctacgaagaaattaacgtctggctttttgtcataggctggccgctgcaaactataatcatgggtgccgtaataatatgcctctggctcaaattaaatcgtcaagaagatcatcaggttcaaaaatagccacagatttacggctagtcatttggaaccacaaagccgctattccccccgctacccccggttaacgaggagccagtctgactaatctattggcacaatcctggcacaatcagggcacattagaggccgattttcgcttgtgctagaattcgatctcgactagggcaatctctaagttgttgttttcgttgtctttttgtcttaacccgtagctcagctggatagagcgctgccctccgaaggcagaggtcagaggttcgaatcctctcgggtgcgccacttttctccataaaaacaatgacttgggtttttctcaactcgttgtttgaccccaaaactgcatgcacatatcatacacatgatacacatgcgtattggggtaatctccatgacagacgttaacaacaaggttgatgtgcggggtgatggttcagtcatcctctatcaacgtctgaagtttggtagcaaaaccgagattagtgacattttccatatgaggatccggatccccctgtctgcatcgaagggatatt

SEQ ID NO: 191 - DNA, 12374 bp, Artificial Sequence; identical to SEQ ID NO: 190
  Synthetic Oligonucleotide
  misc_feature (1)..(8235): n is a, c, g, or t

SEQ ID NO: 192 - DNA, 12334 bp, Artificial Sequence
  Synthetic Oligonucleotide
  misc_feature (1)..(6076): n is a, c, g, or t
nnnnnnnnnnnnnnnnnnnnnnnnnnnnnnnnnnnnnnnnnnnnnnnnnnnnnnnnnnnnnnnnnnnnnnnnnnnnnnnnnnnnnnnnnnnnnnnnnnnnnnnnnnnnnnnnnnnnnnnnnnnnnnnnnnnnnnnnnnnnnnnnnnnnnnnnnnnnnnnnnnnnnnnnnnnnnnnnnnnnnnnnnnnnnnnnnnnnnnnnnnnnnnnnnnnnnnnnnnnnnnnnnnnnnnnnnnnnnnnnnnnnnnnnnnnnnnnnnnnnnnnnnnnnnnnnnnnnnnnnnnnnnnnnnnnnnnnnnnnnnnnnnnnnnnnnnnnnnnnnnnnnnnnnnnnnnnnnnnnnnnnnnnnnnnnnnnnnnnnnnnnnnnnnnnnnnnnnnnnnnnnnnnnnnnnnnnnnnnnnnnnnnnnnnnnnnnnnnnnnnnnnnnnnnnnnnnnnnnnnnnnnnnnnnnnnnnnnnnnnnnnnnnnnnnnnnnnnnnnnnnnnnnnnnnnnnnnnnnnnnnnnnnnnnnnnnnnnnnnnnnnnnnnnnnnnnnnnnnnnnnnnnnnnnnnnnnnnnnnnnnnnnnnnnnnnnnnnnnnnnnnnnnnnnnnnnnnnnnnnnnnnnnnnnnnnnnnnnnnnnnnnnnnnnnnnnnnnnnnnnnnnnnnnnnnnnnnnnnnnnnnnnnnnnnnnnnnnnnnnnnnnnnnnnnnnnnnnnnnnnnnnnnnnnnnnnnnnnnnnnnnnnnnnnnnnnnnnnnnnnnnnnnnnnnnnnnnnnnnnnnnnnnnnnnnnnnnnnnnnnnnnnnnnnnnnnnnnnnnnnnnnnnnnnnnnnnnnnnnnnnnnnnnnnnnnnnnnnnnnnnnnnnnnnnnnnnnnnnnnnnnnnnnnnnnnnnnnnnnnnnnnnnnnnnnnnnnnnnnnnnnnnnnnnnnnnnnnnnnnnnnnnnnnnnnnnnnnnnnnnnnnnnnnnnnnnnnnnnnnnnnnnnnnnnnnnnnnnnnnnnnnnnnnnnnnnnnnnnnnnnnnnnnnnnnnnnnnnnnnnnnnnnnnnnnnnnnnnnnnnnnnnnnnnnnnnnnnnnnnnnnnnnnnnnnnnnnnnnnnnnnnnnnnnnnnnnnnnnnnnnnnnnnnnnnnnnnnnnnnnnnnnnnnnnnnnnnnnnnnnnnnnnnnnnnnnnnnnnnnnnnnnnnnnnnnnnnnnnnnnnnnnnnnnnnnnnnnnnnnnnnnnnnnnnnnnnnnnnnnnnnnnnnnnnnnnnnnnnnnnnnnnnnnnnnnnnnnnnnnnnnnnnnnnnnnnnnnnnnnnnnnnnnnnnnnnnnnnnnnnnnnnnnnnnnnnnnnnnnnnnnnnnnnnnnnnnnnnnnnnnnnnnnnnnnnnnnnnnnnnnnnnnnnnnnnnnnnnnnnnnnnnnnnnnnnnnnnnnnnnnnnnnnnnnnnnnnnnnnnnnnnnnnnnnnnnnnnnnnnnnnnnnnnnnnnnnnnnnnnnnnnnnnnnnnnnnnnnnnnnnnnnnnnnnnnnnnnnnnnnnnnnnnnnnnnnnnnnnnnnnnnnnnnnnnnnnnnnnnnnnnnnnnnnnnnnnnnnnnnnnnnnnnnnnnnnnnnnnnnnnnnnnnnnnnnnnnnnnnnnnnnnnnnnnnnnnnnnnnnnnnnnnnnnnnnnnnnnnnnnnnnnnnnnnnnnnnnnnnnnnnnnnnnnnnnnnnnnnnnnnnnnnnnnnnnnnnnnnnnnnnnnnnnnnnnnnnnnnnnnnnnnnnnnnnnnnnnnnnnnnnnnnnnnnnnnnnnnnnnnnnnnnnnnnnnnnnnnnnnnnnnnnnnnnnnnnnnnnnnnnnnnnnnnnnnnnnnnnnnnnnnnnnnnnnnnnnnnnnnnnnnnnnnnnnnnnnnnnnnnnnnnnnnnnnnnnnnnnnnnnnnnnnnnnnnnnnnnnnnnnnnnnnnnnnnnnnnnnnnnnnnnnnnnnnnnnnnnnnnnnnnnnnnnnnnnnnnnnnnnnnnnnnnnnnnnnnnnnnnnnnnnnnnnnnnnnnnnnnnnnnnnnnnnnnnnnnnnnnnnnnnnnnnnnnnnnnnnnnnnnnnnnnnnnnnnnnnnnnnnnnnnnnnnnnnnnnnnnnnnnnnnnnnnnnnnnnnnnnnnnnnnnnnnnnnnnnnnnnnnnnnnnnnnnnnnnnnnnnnnnnnnnnnnnnnnnnnnnnnnnnnnnnnnnnnnnnnnnnnnnnnnnnnnnnnnnnnnnnnnnnnnnnnnnnnnnnnnnnnnnnnnnnnnnnnnnnnnnnnnnnnnnnnnnnnnnnnnnnnnnnnnnnnnnnnnnnnnnnnnnnnnnnnnnnnnnnnnnnnnnnnnnnnnnnnnnnnnnnnnnnnnnnnnnnnnnnnnnnnnnnnnnnnnnnnnnnnnnnnnnnnnnnnnnnnnnnnnnnnnnnnnnnnnnnnnnnnnnnnnnnnnnnnnnnnnnnnnnnnnnnnnnnnnnnnnnnnnnnnnnnnnnnnnnnnnnnnnnnnnnnnnnnnnnnnnnnnnnnnnnnnnnnnnnnnnnnnnnnnnnnnnnnnnnnnnnnnnnnnnnnnnnnnnnnnnnnnnnnnnnnnnnnnnnnnnnnnnnnnnnnnnnnnnnnnnnnnnnnnnnnnnnnnnnnnnnnnnnnnnnnnnnnnnnnnnnnnnnnnnnnnnnnnnnnnnnnnnnnnnnnnnnnnnnnnnnnnnnnnnnnnnnnnnnnnnnnnnnnnnnnnnnnnnnnnnnnnnnnnnnnnnnnnnnnnnnnnnnnnnnnnnnnnnnnnnnnnnnnnnnnnnnnnnnnnnnnnnnnnnnnnnnnnnnnnnnnnnnnnnnnnnnnnnnnnnnnnnnnnnnnnnnnnnnnnnnnnnnnnnnnnnnnnnnnnnnnnnnnnnnnnnnnnnnnnnnnnnnnnnnnnnnnnnnnnnnnnnnnnnnnnnnnnnnnnnnnnnnnnnnnnnnnnnnnnnnnnnnnnnnnnnnnnnnnnnnnnnnnnnnnnnnnnnnnnnnnnnnnnnnnnnnnnnnnnnnnnnnnnnnnnnnnnnnnnnnnnnnnnnnnnnnnnnnnnnnnnnnnnnnnnnnnnnnnnnnnnnnnnnnnnnnnnnnnnnnnnnnnnnnnnnnnnnnnnnnnnnnnnnnnnnnnnnnnnnnnnnnnnnnnnnnnnnnnnnnnnnnnnnnnnnnnnnnnnnnnnnnnnnnnnnnnnnnnnnnnnnnnnnnnnnnnnnnnnnnnnnnnnnnnnnnnnnnnnnnnnnnnnnnnnnnnnnnnnnnnnnnnnnnnnnnnnnnnnnnnnnnnnnnnnnnnnnnnnnnnnnnnnnnnnnnnnnnnnnnnnnnnnnnnnnnnnnnnnnnnnnnnnnnnnnnnnnnnnnnnnnnnnnnnnnnnnnnnnnnnnnnnnnnnnnnnnnnnnnnnnnnnnnnnnnnnnnnnnnnnnnnnnnnnnnnnnnnnnnnnnnnnnnnnnnnnnnnnnnnnnnnnnnnnnnnnnnnnnnnnnnnnnnnnnnnnnnnnnnnnnnnnnnnnnnnnnnnnnnnnnnnnnnnnnnnnnnnnnnnnnnnnnnnnnnnnnnnnnnnnnnnnnnnnnnnnnnnnnnnnnnnnnnnnnnnnnnnnnnnnnnnnnnnnnnnnnnnnnnnnnnnnnnnnnnnnnnnnnnnnnnnnnnnnnnnnnnnnnnnnnnnnnnnnnnnnnnnnnnnnnnnnnnnnnnnnnnnnnnnnnnnnnnnnnnnnnnnnnnnnnnnnnnnnnnnnnnnnnnnnnnnnnnnnnnnnnnnnnnnnnnnnnnnnnnnnnnnnnnnnnnnnnnnnnnnnnnnnnnnnnnnnnnnnnnnnnnnnnnnnnnnnnnnnnnnnnnnnnnnnnnnnnnnnnnnnnnnnnnnnnnnnnnnnnnnnnnnnnnnnnnnnnnnnnnnnnnnnnnnnnnnnnnnnnnnnnnnnnnnnnnnnnnnnnnnnnnnnnnnnnnnnnnnnnnnnnnnnnnnnnnnnnnnnnnnnnnnnnnnnnnnnnnnnnnnnnnnnnnnnnnnnnnnnnnnnnnnnnnnnnnnnnnnnnnnnnnnnnnnnnnnnnnnnnnnnnnnnnnnnnnnnnnnnnnnnnnnnnnnnnnnnnnnnnnnnnnnnnnnnnnnnnnnnnnnnnnnnnnnnnnnnnnnnnnnnnnnnnnnnnnnnnnnnnnnnnnnnnnnnnnnnnnnnnnnnnnnnnnnnnnnnnnnnnnnnnnnnnnnnnnnnnnnnnnnnnnnnnnnnnnnnnnnnnnnnnnnnnnnnnnnnnnnnnnnnnnnnnnnnnnnnnnnnnnnnnnnnnnnnnnnnnnnnnnnnnnnnnnnnnnnnnnnnnnnnnnnnnnnnnnnnnnnnnnnnnnnnnnnnnnnnnnnnnnnnnnnnnnnnnnnnnnnnnnnnnnnnnnnnnnnnnnnnnnnnnnnnnnnnnnnnnnnnnnnnnnnnnnnnnnnnnnnnnnnnnnnnnnnnnnnnnnnnnnnnnnnnnnnnnnnnnnnnnnnnnnnnnnnnnnnnnnnnnnnnnnnnnnnnnnnnnnnnnnnnnnnnnnnnnnnnnnnnnnnnnnnnnnnnnnnnnnnnnnnnnnnnnnnnnnnnnnnnnnnnnnnnnnnnnnnnnnnnnnnnnnnnnnnnnnnnnnnnnnnnnnnnnnnnnnnnnnnnnnnnnnnnnnnnnnnnnnnnnnnnnnnnnnnnnnnnnnnnnnnnnnnnnnnnnnnnnnnnnnnnnnnnnnnnnnnnnnnnnnnnnnnnnnnnnnnnnnnnnnnnnnnnnnnnnnnnnnnnnnnnnnnnnnnnnnnnnnnnnnnnnnnnnnnnnnnnnnnnnnnnnnnnnnnnnnnnnnnnnnnnnnnnnnnnnnnnnnnnnnnnnnnnnnnnnnnnnnnnnnnnnnnnnnnnnnnnnnnnnnnnnnnnnnnnnnnnnnnnnnnnnnnnnnnnnnnnnnnnnnnnnnnnnnnnnnnnnnnnnnnnnnnnnnnnnnnnnnnnnnnnnnnnnnnnnnnnnnnnnnnnnnnnnnnnnnnnnnnnnnnnnnnnnnnnnnnnnnnnnnnnnnnnnnnnnnnnnnnnnnnnnnnnnnnnnnnnnnnnnnnnnnnnnnnnnnnnnnnnnnnnnnnnnnnnnnnnnnnnnnnnnnnnnnnnnnnnnnnnnnnnnnnnnnnnnnnnnnnnnnnnnnnnnnnnnnnnnnnnnnnnnnnnnnnnnnnnnnnnnnnnnnnnnnnnnnnnnnnnnnnnnnnnnnnnnnnnnnnnnnnnnnnnnnnnnnnnnnnnnnnnnnnnnnnnnnnnnnnnnnnnnnnnnnnnnnnnnnnnnnnnnnnnnnnnnnnnnnnnnnnnnnnnnnnnnnnnnnnnnnnnnnnnnnnnnnnnnnnnnnnnnnnnnnnnnnnnnnnnnnnnnnnnnnnnnnnnnnnnnnnnnnnnnnnnnnnnnnnnnnnnnnnnnnnnnnnnnnnnnnnnnnnnnnnnnnnnnnnnnnnnnnnnnnnnnnnnnnnnnnnnnnnnnnnnnnnnnnnnnnnnnnnnnnnnnnnnnnnnnnnnnnnnnnnnnnnnnnnnnnnnnnnnnnnnnnnnnnnnnnnnnnnnnnnnnnnnnnnnnnnnnnnnnnnnnnnnnnnnnnnnnnnnnnnnnnnnnnnnnnnnnnnnnnnnnnnnnnnnnnnnnnnnnnnnnnnnnnnnnnnnnnnnnnnnnnnnnnnnnnnnnnnnnnnnnnnnnnnnnnnnnnnnnnnnnnnnnnnnnnnnnnnnnnnnnnnnnnnnnnnnnnnnnnnnnnnnnnnnnnnnnnnnnnnnnnnnnnnnnnnnnnnnnnnnnnnnnnnnnnnnnnnnnnnnnnnnnnnnnnnnnnnnnnnnnnnnnnnnnnnnnnnnnnnnnnnnnnnnnnnnnnnnnnnnnnnnnnnnnnnnnnnnnnnnnnnnnnnnnnnnnnnnnnnnnnnnnnnnnnnnnnnnnnnnnnnnnnnnnnnnnnnnnnnnnnnnnnnnnnnnnnnnnnnnnnnnnnnnnnnnnnnnnnnnnnnnnnnnnnnnnnnnnnnnnnnnnnnnnnnnnnnnnnnnnnnnnnnnnnnnnnnnnnnnnnnnnnnnnnnnnnnnnnnnnnnnnnnnnnnnnnnnnnnnnnnnnnnnnnnnnnnnnnnnnnnnnnnnnnnnnnnnnnnnnnnnnnnnnnnnnnnnnnnnngtctcgccctcaactcgcccttcctccaaaccctatcggcgtagttcttgtgaataactactattccgtggaagtggaaggcggggttgcgatgaagccgataccaggaatcaatagaccagctcttggtcgatgggatcagtagcgcaaattgaccgattaggtgctgttcccaaagtgcgcgaaaaaattgggactcagtaaatttctcaccttcttcagtgttcttgatcttggtggatagtgttactgctagtagtagatgaccttgaacagcgtgagaacagaactcagcataggcagtagagcggttggggttgttcatcgaagcacctcaagtcttgttagtgatatcgctagtgttaggactagtgacacagagacttatgggtacgatgaagaaggtaagggtctgacgactcccacctctcaaaagccaacaaacagcgactcgacgggaaccttggtaggcgttgttattcgtccccgaaaagtatccaagtgggttcagtggaactcttggaacctgtagcccgcgggttaggcggggttagcctctcactctataagcctatttttatttaggcactacgaaggcatttctgacccgaaaccgataaatattctcaatgagaatcggctttttcgatatggggcgtaaatgacggctacagcatcggcttgagaagttttttcgaaaaaagtgtcgcttgttcttgccgtcagacagcacaggctcaatttctgacactgcgacctgtcagaggattgtcagggatgcgtaaaagcaatagggtgggcggatatggatcgcttcgctgtcacgctgcgtctcgcttcccccttggttacgggtgggggctatatgacgctagacgcactcttggcggcggtactatttgattcaggggaaaccgtcgaggctgctcacgaaaagatcccgctcaagaacacccaagggctttggcacggtagtgcggctgtgtacgaaacccttgaggttggacgccaagcgtttgtcgccaatctccgtgccacccatgatttgaaccctgacctggtcgccaagaacaaacagggggcaatccacacgaaaatcagtctagggcgtcgtcgtgattttggagcggtgatgaatggatatccatacctagtggcgaatagcgtcacttggtacggcgagggcgatgccacacaggttgagaacttactgcgctccgtgcgcttcattggaaaacgccgcgcgagtggctttggtgaggtgagtggggttgaaatgtcgccggctgatgcggatggggtggtgggactgtttggcgagcctttgcgtcctgttcccttagagctattcacgggggacaagagcgcaatccgtggtgacgctgcgtggagacccgcctactggcgtcctgagaatcgtgcgatttgttatctgccgtcccctaactaaatgaacacctatgagtttttcatggagcactttgggcgtcatctgatagacgccaatgggctcaccgctgctcaaggcgcagagaaagcactgagtagtaactacactactgtaaagggcactccaagtcgcctctcctcaggatgggcgattgttcgtcctggtatttcctcgcttcagttgaaactcgccgcgaaggggcttcagtacgacagtcgcacgcgccttgaggcgtttatggatgagttgatcgcgtgggatggtgagtcacctcgcatttttctagagtttgataaggcacctgtcccaatttcaaatctgtttatcacggttgatcgtcgcttgatccgtatttgctctcctaaaaatgttgcctcgtttgatatgagcgcggaacccaacgatgcctcgcccatcattcaacgcgcgatttggaagcgtctgtcaaaatgatttgcgactacaccatcccgaagcctgagagccttggtctctatgccgtccatcggtttgtcgcgcagctctgtgatggcgtgccgtacctttttgtggatcgtggagatcgggtggtgattcggaccacgaagtttttatgtgatcgcgtgaccgaggtgtcagtcccttccttgggtgatgtgattgcgttttcgttgcgctcagcggtctccaagcgagtaaaaggtaagaatgcctatgcgcctctcagcgattggcgagcccgtcaccaatggttggagaagcgcagcgagaaaaacggctttgcgctccttgcgcttcacacaacaagcaagagcgtgaaagtggagcgcgaagagggtcagttctttcaaatggactcaaccgattttacaggcgtgctcaaagtgactgatgagccgctctttgcagcgtgtctcactcgcggaattgggcgcgtgggcaagccttacggaatggggatgctcgtaatctagcaacggtttggaggctttatggcgaacagagtgattgtcaaagtgacgctacggaccaagggaccgttgtcgctcaagatgcccatggcggagggagcgcgtgaaaacgagtttgacaacttccccgtgatgacgcgaggcgtagatgcggaagggaccaagcagcgtacaggctatttgcccgcaaccacagtgcgcgggttcctgcgccgtgccgtgacgctcaagcgaatgcgcgatgcggcagcccaaggcaagccctacaagttgccgcagatttataacgaaatgattgggcaagacgctgagagcgaaaagaaagcagaggaaattgatctgattgcgattcaaaaagcacgcgagagcagtcctgtcgtggatctgtttggatcaggactcaatgtgaagtcgcggctcttggtgagccacttttgccctgcgctcaatattcttcctgaggcgttcacaggtgttcgtaaggacattgacgatacagaagacgccttagagttgatggaccctaaagagatggaagggttcgtgcggcgtacagagcgcaatcgtgagcgagctgcggcggctgcggtcgtgaagcagcttgagggaaaaatacggcgcgatgaaagaaaaaacggcgcgtcagaagacgataaaaaagcactggaggcggcgcggacgaaggagaccgcagcggagggggagatgggtgaaatgaaggtgagcactcgccaactcaccacctactacgcgcttcccgctgagattgagctacacggacgcctcgtgattgaacgggcaaagccacgagacctagagctgttggagtatgcgctgagtgaattgagtcttgcgcctgtccttggtgcgcaatcggcacgaggatgcggcgagattgcgggaacctttgagttcacaaacgaggagggaaagctgatcaagaatgtggtggtaggcggttacagcgcagcaaatatcacgaatttctgagagtgaaaggttgttattttaaagggaaatcatatggttacagagtatcgatcgcagctcctctgaatttgaggagctactgaaactacaccccggcgtacatccgcaacgaattcatcgcagctcctctgaatttgaggagctactgaaactcccggcgctatgcctaaacccaaagtccaatcgcagctcctctgaatttgaggagctactgaaactaatcaatatgcggcgcatcccggttcttcatcgcagctcctctgaatttgaggagctactgaaacgaggttgactgggagaggctctacgcagagatcgcagctcctctgaatttgaggagctactgaaactcggtcactactgtcctcaagattaaggacatcgcagctcctctgaatttgaggagctactgaaacaacacgcttggcttgaagtcaccgtactcgatcgcagctcctctgaatttgaggagctattttctatagcgccacattaaaagtggcgctttttttctgtaccgatagaatcagactatgtttcgttccgttgagcagtccaatttttcggcgcgactcgctgcgcatattcagcaggctgatgcgcctttattgcttgaaggaacaacggggcttggaaaaaccagagcctatctagctgcgctcaacaccgcgattcagcagggcaagcgtgtcgctatcgtcgttccaacgcacgcgctgatcgagcagcttcttgcttcttctgatctcgcgttgattgttccgtcgacagtcactcgcgcagcgttcaagcccaagtcgttctattcatcagctcaggagtttaaagacgcaaaagccttatcgcttgagtcgtcgctgatgatttgtactagctcttcggtgatcgttgatcaacgcgccaagggcaactataacggcgtgactactcgcgactatattttatttgacgaagcggatcagctccctcagtacgctgctctgtctagagaccgcgaaattcgtggcgcagaactgaaggaactcggtgttcgaggctcgactacgaaagagattgcggaacaggtgatcgcgcacaaaggtgcggaaacggaaactcgcgccgcagcagtgatgatcttggaggctcttgatgagcctgcgtggtatcacaacgcaggcaagaccgacgatggcgggattgcgctttttcacaaaatgccaggaaggctgcttaagaaagtcgctaaccgctctaatgtcgccttcatcagcgcaacgctctctattggggggaagttcgatgactttaagcgcgcaatgggcattggagagcagagtgcgctctcatcgatcatcgagcctgcgcatcacgggacgctgaaattctttcacgaaccgcacccagttttatcgcaagaatggctcgccgcgacaaccgaagcgatcaccaaggcgaaaaagccaacgcttgtggtcacgccaagcaatgagttgtcgcagaccttgggtgcgcttttccctgacgccattgttcgtgcggcagaggaaaagacttcagacgcgattttgcggctgacagacgaccagaacatcctgatcgcgtcagcagcgtgggcgggacttgacacgcccattgagtggaaaagcattgtcattccgcgcattccgttcctgcgccctcaagtgatagacggcaatattgaaagcagcttctttgattcgcggaatagcgctatccgccgaatgcgtcaggtgattgggcgagggctcagaaagcctgaggcggagtgcgaggtgtacattttggatgaccgtttggcgatgattgagtcgttcatacccactcgctttgaggatgcttggcattcacgaggaagagtggagggagcgagggtagagcacaccctgtccaaagcggagcgtgatccgctcgttagaaagaacgcgctgaagcaccacggcaagcggtgtatgtcttgtggcttcgtgcccaaggtggacagtcagcttgaggctcatcatctattcccgctcgcggacggtggcgagcgggttaccaagattcaaaccgatgtggcggtgctttgcgctaactgtcaccgtttggcgcattcggcgtcgccgccgctgcctcttgcggtcctgagaggacttcaccaagacggcgggttatcagggtagggtgaatacagcgagagggcggttccataagggttccacaagttggataaacggcagctattagttcgcattcaagccgccaatagacccttagatttgagcgtatggaaggctgtcccaacgccacagcggagggtctgactgatcttcttggggctcatccccttcttgtacagttccacgatggcggcacgggtcgaatccgtcaccgagcttgggcgaccgagtttcttcccttccttacgagcgcgttccacgcctaacttgatgcgctcacggattaggtctcgctcgaactcagcgaaggacgagaacaccccgaacatcagcttccctgaaggcgtcgtggtgtctaaagcctgttggtggaagtagagctgaacgcctgaagcgtgaaggtcgttcactgtcgtgacaaggtgctgtagggaccgtccaaggcggtcgatgctccaaacggcgattagatcgaactcacggcgagtggcggctttcaggagagcatcgagggcagggcgaccatcgcgacccttggctcctgagataccatcgtcgcggtaggtagcgacgatgttccatcccctagcggcggcgacacgctcaagctcgtggagttggttgtcggcggtttggtgagcggtggagactcgaagatagagtgcggttttcatacgggtagcctctaagtggctgataagatgaagaa

SEQ ID NO: 193 - DNA, 12325 bp, Artificial Sequence
  Synthetic Oligonucleotide
  misc_feature (1)..(8848): n is a, c, g, or t
nnnnnnnnnnnnnnnnnnnnnnnnnnnnnnnnnnnnnnnnnnnnnnnnnnnnnnnnnnnnnnnnnnnnnnnnnnnnnnnnnnnnnnnnnnnnnnnnnnnnnnnnnnnnnnnnnnnnnnnnnnnnnnnnnnnnnnnnnnnnnnnnnnnnnnnnnnnnnnnnnnnnnnnnnnnnnnnnnnnnnnnnnnnnnnnnnnnnnnnnnnnnnnnnnnnnnnnnnnnnnnnnnnnnnnnnnnnnnnnnnnnnnnnnnnnnnnnnnnnnnnnnnnnnnnnnnnnnnnnnnnnnnnnnnnnnnnnnnnnnnnnnnnnnnnnnnnnnnnnnnnnnnnnnnnnnnnnnnnnnnnnnnnnnnnnnnnnnnnnnnnnnnnnnnnnnnnnnnnnnnnnnnnnnnnnnnnnnnnnnnnnnnnnnnnnnnnnnnnnnnnnnnnnnnnnnnnnnnnnnnnnnnnnnnnnnnnnnnnnnnnnnnnnnnnnnnnnnnnnnnnnnnnnnnnnnnnnnnnnnnnnnnnnnnnnnnnnnnnnnnnnnnnnnnnnnnnnnnnnnnnnnnnnnnnnnnnnnnnnnnnnnnnnnnnnnnnnnnnnnnnnnnnnnnnnnnnnnnnnnnnnnnnnnnnnnnnnnnnnnnnnnnnnnnnnnnnnnnnnnnnnnnnnnnnnnnnnnnnnnnnnnnnnnnnnnnnnnnnnnnnnnnnnnnnnnnnnnnnnnnnnnnnnnnnnnnnnnnnnnnnnnnnnnnnnnnnnnnnnnnnnnnnnnnnnnnnnnnnnnnnnnnnnnnnnnnnnnnnnnnnnnnnnnnnnnnnnnnnnnnnnnnnnnnnnnnnnnnnnnnnnnnnnnnnnnnnnnnnnnnnnnnnnnnnnnnnnnnnnnnnnnnnnnnnnnnnnnnnnnnnnnnnnnnnnnnnnnnnnnnnnnnnnnnnnnnnnnnnnnnnnnnnnnnnnnnnnnnnnnnnnnnnnnnnnnnnnnnnnnnnnnnnnnnnnnnnnnnnnnnnnnnnnnnnnnnnnnnnnnnnnnnnnnnnnnnnnnnnnnnnnnnnnnnnnnnnnnnnnnnnnnnnnnnnnnnnnnnnnnnnnnnnnnnnnnnnnnnnnnnnnnnnnnnnnnnnnnnnnnnnnnnnnnnnnnnnnnnnnnnnnnnnnnnnnnnnnnnnnnnnnnnnnnnnnnnnnnnnnnnnnnnnnnnnnnnnnnnnnnnnnnnnnnnnnnnnnnnnnnnnnnnnnnnnnnnnnnnnnnnnnnnnnnnnnnnnnnnnnnnnnnnnnnnnnnnnnnnnnnnnnnnnnnnnnnnnnnnnnnnnnnnnnnnnnnnnnnnnnnnnnnnnnnnnnnnnnnnnnnnnnnnnnnnnnnnnnnnnnnnnnnnnnnnnnnnnnnnnnnnnnnnnnnnnnnnnnnnnnnnnnnnnnnnnnnnnnnnnnnnnnnnnnnnnnnnnnnnnnnnnnnnnnnnnnnnnnnnnnnnnnnnnnnnnnnnnnnnnnnnnnnnnnnnnnnnnnnnnnnnnnnnnnnnnnnnnnnnnnnnnnnnnnnnnnnnnnnnnnnnnnnnnnnnnnnnnnnnnnnnnnnnnnnnnnnnnnnnnnnnnnnnnnnnnnnnnnnnnnnnnnnnnnnnnnnnnnnnnnnnnnnnnnnnnnnnnnnnnnnnnnnnnnnnnnnnnnnnnnnnnnnnnnnnnnnnnnnnnnnnnnnnnnnnnnnnnnnnnnnnnnnnnnnnnnnnnnnnnnnnnnnnnnnnnnnnnnnnnnnnnnnnnnnnnnnnnnnnnnnnnnnnnnnnnnnnnnnnnnnnnnnnnnnnnnnnnnnnnnnnnnnnnnnnnnnnnnnnnnnnnnnnnnnnnnnnnnnnnnnnnnnnnnnnnnnnnnnnnnnnnnnnnnnnnnnnnnnnnnnnnnnnnnnnnnnnnnnnnnnnnnnnnnnnnnnnnnnnnnnnnnnnnnnnnnnnnnnnnnnnnnnnnnnnnnnnnnnnnnnnnnnnnnnnnnnnnnnnnnnnnnnnnnnnnnnnnnnnnnnnnnnnnnnnnnnnnnnnnnnnnnnnnnnnnnnnnnnnnnnnnnnnnnnnnnnnnnnnnnnnnnnnnnnnnnnnnnnnnnnnnnnnnnnnnnnnnnnnnnnnnnnnnnnnnnnnnnnnnnnnnnnnnnnnnnnnnnnnnnnnnnnnnnnnnnnnnnnnnnnnnnnnnnnnnnnnnnnnnnnnnnnnnnnnnnnnnnnnnnnnnnnnnnnnnnnnnnnnnnnnnnnnnnnnnnnnnnnnnnnnnnnnnnnnnnnnnnnnnnnnnnnnnnnnnnnnnnnnnnnnnnnnnnnnnnnnnnnnnnnnnnnnnnnnnnnnnnnnnnnnnnnnnnnnnnnnnnnnnnnnnnnnnnnnnnnnnnnnnnnnnnnnnnnnnnnnnnnnnnnnnnnnnnnnnnnnnnnnnnnnnnnnnnnnnnnnnnnnnnnnnnnnnnnnnnnnnnnnnnnnnnnnnnnnnnnnnnnnnnnnnnnnnnnnnnnnnnnnnnnnnnnnnnnnnnnnnnnnnnnnnnnnnnnnnnnnnnnnnnnnnnnnnnnnnnnnnnnnnnnnnnnnnnnnnnnnnnnnnnnnnnnnnnnnnnnnnnnnnnnnnnnnnnnnnnnnnnnnnnnnnnnnnnnnnnnnnnnnnnnnnnnnnnnnnnnnnnnnnnnnnnnnnnnnnnnnnnnnnnnnnnnnnnnnnnnnnnnnnnnnnnnnnnnnnnnnnnnnnnnnnnnnnnnnnnnnnnnnnnnnnnnnnnnnnnnnnnnnnnnnnnnnnnnnnnnnnnnnnnnnnnnnnnnnnnnnnnnnnnnnnnnnnnnnnnnnnnnnnnnnnnnnnnnnnnnnnnnnnnnnnnnnnnnnnnnnnnnnnnnnnnnnnnnnnnnnnnnnnnnnnnnnnnnnnnnnnnnnnnnnnnnnnnnnnnnnnnnnnnnnnnnnnnnnnnnnnnnnnnnnnnnnnnnnnnnnnnnnnnnnnnnnnnnnnnnnnnnnnnnnnnnnnnnnnnnnnnnnnnnnnnnnnnnnnnnnnnnnnnnnnnnnnnnnnnnnnnnnnnnnnnnnnnnnnnnnnnnnnnnnnnnnnnnnnnnnnnnnnnnnnnnnnnnnnnnnnnnnnnnnnnnnnnnnnnnnnnnnnnnnnnnnnnnnnnnnnnnnnnnnnnnnnnnnnnnnnnnnnnnnnnnnnnnnnnnnnnnnnnnnnnnnnnnnnnnnnnnnnnnnnnnnnnnnnnnnnnnnnnnnnnnnnnnnnnnnnnnnnnnnnnnnnnnnnnnnnnnnnnnnnnnnnnnnnnnnnnnnnnnnnnnnnnnnnnnnnnnnnnnnnnnnnnnnnnnnnnnnnnnnnnnnnnnnnnnnnnnnnnnnnnnnnnnnnnnnnnnnnnnnnnnnnnnnnnnnnnnnnnnnnnnnnnnnnnnnnnnnnnnnnnnnnnnnnnnnnnnnnnnnnnnnnnnnnnnnnnnnnnnnnnnnnnnnnnnnnnnnnnnnnnnnnnnnnnnnnnnnnnnnnnnnnnnnnnnnnnnnnnnnnnnnnnnnnnnnnnnnnnnnnnnnnnnnnnnnnnnnnnnnnnnnnnnnnnnnnnnnnnnnnnnnnnnnnnnnnnnnnnnnnnnnnnnnnnnnnnnnnnnnnnnnnnnnnnnnnnnnnnnnnnnnnnnnnnnnnnnnnnnnnnnnnnnnnnnnnnnnnnnnnnnnnnnnnnnnnnnnnnnnnnnnnnnnnnnnnnnnnnnnnnnnnnnnnnnnnnnnnnnnnnnnnnnnnnnnnnnnnnnnnnnnnnnnnnnnnnnnnnnnnnnnnnnnnnnnnnnnnnnnnnnnnnnnnnnnnnnnnnnnnnnnnnnnnnnnnnnnnnnnnnnnnnnnnnnnnnnnnnnnnnnnnnnnnnnnnnnnnnnnnnnnnnnnnnnnnnnnnnnnnnnnnnnnnnnnnnnnnnnnnnnnnnnnnnnnnnnnnnnnnnnnnnnnnnnnnnnnnnnnnnnnnnnnnnnnnnnnnnnnnnnnnnnnnnnnnnnnnnnnnnnnnnnnnnnnnnnnnnnnnnnnnnnnnnnnnnnnnnnnnnnnnnnnnnnnnnnnnnnnnnnnnnnnnnnnnnnnnnnnnnnnnnnnnnnnnnnnnnnnnnnnnnnnnnnnnnnnnnnnnnnnnnnnnnnnnnnnnnnnnnnnnnnnnnnnnnnnnnnnnnnnnnnnnnnnnnnnnnnnnnnnnnnnnnnnnnnnnnnnnnnnnnnnnnnnnnnnnnnnnnnnnnnnnnnnnnnnnnnnnnnnnnnnnnnnnnnnnnnnnnnnnnnnnnnnnnnnnnnnnnnnnnnnnnnnnnnnnnnnnnnnnnnnnnnnnnnnnnnnnnnnnnnnnnnnnnnnnnnnnnnnnnnnnnnnnnnnnnnnnnnnnnnnnnnnnnnnnnnnnnnnnnnnnnnnnnnnnnnnnnnnnnnnnnnnnnnnnnnnnnnnnnnnnnnnnnnnnnnnnnnnnnnnnnnnnnnnnnnnnnnnnnnnnnnnnnnnnnnnnnnnnnnnnnnnnnnnnnnnnnnnnnnnnnnnnnnnnnnnnnnnnnnnnnnnnnnnnnnnnnnnnnnnnnnnnnnnnnnnnnnnnnnnnnnnnnnnnnnnnnnnnnnnnnnnnnnnnnnnnnnnnnnnnnnnnnnnnnnnnnnnnnnnnnnnnnnnnnnnnnnnnnnnnnnnnnnnnnnnnnnnnnnnnnnnnnnnnnnnnnnnnnnnnnnnnnnnnnnnnnnnnnnnnnnnnnnnnnnnnnnnnnnnnnnnnnnnnnnnnnnnnnnnnnnnnnnnnnnnnnnnnnnnnnnnnnnnnnnnnnnnnnnnnnnnnnnnnnnnnnnnnnnnnnnnnnnnnnnnnnnnnnnnnnnnnnnnnnnnnnnnnnnnnnnnnnnnnnnnnnnnnnnnnnnnnnnnnnnnnnnnnnnnnnnnnnnnnnnnnnnnnnnnnnnnnnnnnnnnnnnnnnnnnnnnnnnnnnnnnnnnnnnnnnnnnnnnnnnnnnnnnnnnnnnnnnnnnnnnnnnnnnnnnnnnnnnnnnnnnnnnnnnnnnnnnnnnnnnnnnnnnnnnnnnnnnnnnnnnnnnnnnnnnnnnnnnnnnnnnnnnnnnnnnnnnnnnnnnnnnnnnnnnnnnnnnnnnnnnnnnnnnnnnnnnnnnnnnnnnnnnnnnnnnnnnnnnnnnnnnnnnnnnnnnnnnnnnnnnnnnnnnnnnnnnnnnnnnnnnnnnnnnnnnnnnnnnnnnnnnnnnnnnnnnnnnnnnnnnnnnnnnnnnnnnnnnnnnnnnnnnnnnnnnnnnnnnnnnnnnnnnnnnnnnnnnnnnnnnnnnnnnnnnnnnnnnnnnnnnnnnnnnnnnnnnnnnnnnnnnnnnnnnnnnnnnnnnnnnnnnnnnnnnnnnnnnnnnnnnnnnnnnnnnnnnnnnnnnnnnnnnnnnnnnnnnnnnnnnnnnnnnnnnnnnnnnnnnnnnnnnnnnnnnnnnnnnnnnnnnnnnnnnnnnnnnnnnnnnnnnnnnnnnnnnnnnnnnnnnnnnnnnnnnnnnnnnnnnnnnnnnnnnnnnnnnnnnnnnnnnnnnnnnnnnnnnnnnnnnnnnnnnnnnnnnnnnnnnnnnnnnnnnnnnnnnnnnnnnnnnnnnnnnnnnnnnnnnnnnnnnnnnnnnnnnnnnnnnnnnnnnnnnnnnnnnnnnnnnnnnnnnnnnnnnnnnnnnnnnnnnnnnnnnnnnnnnnnnnnnnnnnnnnnnnnnnnnnnnnnnnnnnnnnnnnnnnnnnnnnnnnnnnnnnnnnnnnnnnnnnnnnnnnnnnnnnnnnnnnnnnnnnnnnnnnnnnnnnnnnnnnnnnnnnnnnnnnnnnnnnnnnnnnnnnnnnnnnnnnnnnnnnnnnnnnnnnnnnnnnnnnnnnnnnnnnnnnnnnnnnnnnnnnnnnnnnnnnnnnnnnnnnnnnnnnnnnnnnnnnnnnnnnnnnnnnnnnnnnnnnnnnnnnnnnnnnnnnnnnnnnnnnnnnnnnnnnnnnnnnnnnnnnnnnnnnnnnnnnnnnnnnnnnnnnnnnnnnnnnnnnnnnnnnnnnnnnnnnnnnnnnnnnnnnnnnnnnnnnnnnnnnnnnnnnnnnnnnnnnnnnnnnnnnnnnnnnnnnnnnnnnnnnnnnnnnnnnnnnnnnnnnnnnnnnnnnnnnnnnnnnnnnnnnnnnnnnnnnnnnnnnnnnnnnnnnnnnnnnnnnnnnnnnnnnnnnnnnnnnnnnnnnnnnnnnnnnnnnnnnnnnnnnnnnnnnnnnnnnnnnnnnnnnnnnnnnnnnnnnnnnnnnnnnnnnnnnnnnnnnnnnnnnnnnnnnnnnnnnnnnnnnnnnnnnnnnnnnnnnnnnnnnnnnnnnnnnnnnnnnnnnnnnnnnnnnnnnnnnnnnnnnnnnnnnnnnnnnnnnnnnnnnnnnnnnnnnnnnnnnnnnnnnnnnnnnnnnnnnnnnnnnnnnnnnnnnnnnnnnnnnnnnnnnnnnnnnnnnnnnnnnnnnnnnnnnnnnnnnnnnnnnnnnnnnnnnnnnnnnnnnnnnnnnnnnnnnnnnnnnnnnnnnnnnnnnnnnnnnnnnnnnnnnnnnnnnnnnnnnnnnnnnnnnnnnnnnnnnnnnnnnnnnnnnnnnnnnnnnnnnnnnnnnnnnnnnnnnnnnnnnnnnnnnnnnnnnnnnnnnnnnnnnnnnnnnnnnnnnnnnnnnnnnnnnnnnnnnnnnnnnnnnnnnnnnnnnnnnnnnnnnnnnnnnnnnnnnnnnnnnnnnnnnnnnnnnnnnnnnnnnnnnnnnnnnnnnnnnnnnnnnnnnnnnnnnnnnnnnnnnnnnnnnnnnnnnnnnnnnnnnnnnnnnnnnnnnnnnnnnnnnnnnnnnnnnnnnnnnnnnnnnnnnnnnnnnnnnnnnnnnnnnnnnnnnnnnnnnnnnnnnnnnnnnnnnnnnnnnnnnnnnnnnnnnnnnnnnnnnnnnnnnnnnnnnnnnnnnnnnnnnnnnnnnnnnnnnnnnnnnnnnnnnnnnnnnnnnnnnnnnnnnnnnnnnnnnnnnnnnnnnnnnnnnnnnnnnnnnnnnnnnnnnnnnnnnnnnnnnnnnnnnnnnnnnnnnnnnnnnnnnnnnnnnnnnnnnnnnnnnnnnnnnnnnnnnnnnnnnnnnnnnnnnnnnnnnnnnnnnnnnnnnnnnnnnnnnnnnnnnnnnnnnnnnnnnnnnnnnnnnnnnnnnnnnnnnnnnnnnnnnnnnnnnnnnnnnnnnnnnnnnnnnnnnnnnnnnnnnnnnnnnnnnnnnnnnnnnnnnnnnnnnnnnnnnnnnnnnnnnnnnnnnnnnnnnnnnnnnnnnnnnnnnnnnnnnnnnnnnnnnnnnnnnnnnnnnnnnnnnnnnnnnnnnnnnnnnnnnnnnnnnnnnnnnnnnnnnnnnnnnnnnnnnnnnnnnnnnnnnnnnnnnnnnnnnnnnnnnnnnnnnnnnnnnnnnnnnnnnnnnnnnnnnnnnnnnnnnnnnnnnnnnnnnnnnnnnnnnnnnnnnnnnnnnnnnnnnnnnnnnnnnnnnnnnnnnnnnnnnnnnnnnnnnnnnnnnnnnnnnnnnnnnnnnnnnnnnnnnnnnnnnnnnnnnnnnnnnnnnnnnnnnnnnnnnnnnnnnnnnnnnnnnnnnnnnnnnnnnnnnnnnnnnnnnnnnnnnnnnnnnnnnnnnnnnnnnnnnnnnnnnnnnnnnnnnnnnnnnnnnnnnnnnnnnnnnnnnnnnnnnnnnnnnnnnnnnnnnnnnnnnnnnnnnnnnnnnnnnnnnnnnnnnnnnnnnnnnnnnnnnnnnnnnnnnnnnnnnnnnnnnnnnnnnnnnnnnnnnnnnnnnnnnnnnnnnnnnnnnnnnnnnnnnnnnnnnnnnnnnnnnnnnnnnnnnnnnnnnnnnnnnnnnnnnnnnnnnnnnnnnnnnnnnnnnnnnnnnnnnnnnnnnnnnnnnnnnnnnnnnnnnnnnnnnnnnnnnnnnnnnnnnnnnnnnnnnnnnnnnnnnnnnnnnnnnnnnnnnnnnnnnnnnnnnnnnnnnnnnnnnnnnnnnnnnnnnnnnnnnnnnnnnnnnnnnnnnnnnnnnnnnnnnnnnnnnnnnnnnnnnnnnnnnnnnnnnnnnnnnnnnnnnnnnnnnnnnnnnnnnnnnnnnnnnnnnnnnnnnnnnnnnnnnnnnnnnnnnnnnnnnnnnnnnnnnnnnnnnnnnnnnnnnnnnnnnnnnnnnnnnnnnnnnnnnnnnnnnnnnnnnnnnnnnnnnnnnnnnnnnnnnnnnnnnnnnnnnnnnnnnnnnnnnnnnnnnnnnnnnnnnnnnnnnnnnnnnnnnnnnnnnnnnnnnnnnnnnnnnnnnnnnnnnnnnnnnnnnnnnnnnnnnnnnnnnnnnnnnnnnnnnnnnnnnnnnnnnnnnnnnnnnnnnnnnnnnnnnnnnnnnnnnnnnnnnnnnnnnnnnnnnnnnnnnnnnnnnnnnnnnnnnnnnnnnnnnnnnnnnnnnnnnnnnnnnnnnnnnnnnnnnnnnnnnnnnnnnnnnnnnnnnnnnnnnnnnnnnnnnnnnnnnnnnnnnnnnnnnnnnnnnnnnnnnnnnnnnnnnnnnnnnnnnnnnnnnnnnnnnnnnnnnnnnnnnnnnnnnnnnnnnnnnnnnnnnnnnnnnnnnnnnnnnnnnnnnnnnnnnnnnnnnnnnnnnnnnnnnnnnnnnnnnnnnnnnnnnnnnnnnnnnnnnnnnnnnnnnnnnnnnnnnnnnnnnnnnnnnnnnnnnnnnnnnnnnnnnnnnnnnnnnnnnnnnnnnnnnnnnnnnnnnnnnnnnnnnnnnnnnnnnnnnnnnnnnnnnnnnnnnnnnnnnnnnnnnnnnnnnnnnnnnnnnnnnnnnnnnnnnnnnnnnnnnnnnnnnnnnnnnnnnnnnnnnnnnnnnnnnnnnnnnnnnnnnnnnnnnnnnnnnnnnnnnnnnnnnnnnnnnnnnnnnnnnnnnnnnnnnnnnnnnnnnnnnnnnnnnnnnnnagagcgcggccatgtagtccttgaaccacttgggtgaagccaccattggtttgagtggctactaaaagggcgcctttttgatgctgaagctgggcgctggtgaagccaccattggtttgagtggctactaaaagttcaccagaactacctcgcgcaaggttggtggtgaagccaccattggtttgagtggctactaaaagaggtagttatggtagtaattcacggtgtcggtgaagccaccattggtttgagtggctactaaaagtggtccctagtagtccttctattcctgcagggtgaagccaccattggtttgagtggctactaaaagctgagagtgaatgactcttcacgcccggagggtgaagccaccattggtttgagtggctactaaaagaacaatcttcacccaatcgttatcgggtggggtgaagccaccattggtttgagtggcttctaaaagagcttgccgccgtgcgtgtagtcccgcgccaggtgaagccaccattggtttgagtggctactaaaagtcttgtagcgcggcaatgagcgcgggcagaaggtgaagccaccattggtttgagtggctactaaaagtgacacggctgcgcaggtgtgccacactcgggtgaagccaccattggtttgagtggctactaaaagatcttcaagctgatcggtcgcagcgacgagggtgaagccaccattggtttgagtggctactaaaagcgcgcgaagtgtgacgccaaagccgggtcgggtgaagccaccattggtttgagtggctactaaaagcacaacggcgggaagtttgattttcatttccggtgaagccaccattggtttgagtggctactaaaagatggacacgttcggcaaaccgctcgtcgaggggtgaagccaccattggtttgagtggctactaaaagtttgacataggggcgcatttcgatgagacagggtgaagccaccattggtttgagtggctactaaaaggcgttgtagataacggtcaggacgcccgtaggtgaagccaccattggtttgagtggctgtttaatagtgcaagcccgcttagacgtgagtcgagacggcttcattgaagagcgataaggtaaagtgacaagataagttgtcacttcgctaagttcatgttccgctcagtagagcaagagaactttcacaagctggtggcctcgcacatggagaggcccgacgcgcccttgcttctagagggcacgactggcattggcaagacccgtgcatacttgcttgcggtgatggatgccgcagctgcgggccgcaggatagccatcgtgcttcccagtcatgccctgattgaccagctgtgtgcctcttccgaccttgctgcaactcagcgagacacggttcgcgtcgccgcatttcgcccacggcgatggtttgcgacgagaggcgaatacgagcagcaaaagatatcagcgttggaggcgcagattcttgtctgcacaagcgcctccgtcatcatcgaccagcggctgagtggtggctacaacggctccacgctgcgcgactacattcttttcgacgaggccgaccagttgcccgatgcggctgcattacagagcgactgtgagatcacggctgaccagctcaaagacctaggaatcgttgcgcaaagcgctcagcaggcagcgagggcagttatcaacaaagaaagcagcgagccggaagtaaaagctgccgcgatgctaattttggaggcgattgacgaaccagcgtggtaccagagcacgggcctgaccgaagaaggcggcatcatgctgtaccacaagctgccggggcgcttattgaagcgaaccgcgaaccgaaaggacgcggcattcgtaagcgcaacattgtcgatcaatggcaagtttgatgactttaagcgttccctcggtattagcgcgcaaagtgaactatcttccatcttagaacccatccgtcacgggcagcttaagtttgaggtgtcagacgttgagatcaacacacccgaatggtcaagcctgatcaagcgcaccgtagaacaagcggcccagcaagggaaggtactcgttgccacgccaagcaacgagcttgcaatgactctaggccacttgattgccagtgcgacggtcaggacagacgagaccacgggcgaagcggcggctcgtatgggcaacagcaacgtcttaatagctgccggcgcatgggcgggactcgacacacccatccaatggcacagcatcgtcgtcccgcgaattccctatgagcgaccgatcaagctcgacgggcacttggagagcagttttctagactctcgtaacacggcggtccgtaggatgcgccaagtgatcggtcgtggcttgcgaagcccgagtgccacatgcacggtctacattctcgattcgcgctataagaacatcgaagccttcatacccaatcgctttcgcacggattgggcggggaagcgatttttggagggccggcagcaggaacacatgctttccgattttgagcgcaattcttccgtgagaaaaaacgcgttgcaacattacggtatgaagtgtatgagttgcggatttcttccgcgcgacagtaggcaattggatgtgcaccatctacatccgctctctgagggcgaacgccggacgtcgcttgacgatctcgcggtgctgtgcgcgaactgccaccggcttgcgcactcggagagccccccaatcccgatccctgagttgaagcggcggcacacaaacgaagcgtaacgcgagagcaaccattggctgagtacctgtgccaaacgtaaacaacgccaagcggccactgcccgacttcaggagctggagggactggctaaggctattgggttgatacgcggaccagggactagagggcgaaaggccgggggcgcctaatcttccgattcgccggaagcgggtgtcgggtgattaccgtctctgtacctctatacacactaacgtctctcaaaacctaagattcgtagcacccacaaaacaacaaacgcaaataccaagggcaagaacgaactggtgtcgtaggcgtacatacccgacagaaggcataccgcccccccaatcttcggcccaataccatcagcgaagaacagaccaataccgaacagcacgaatgccgctgctgcgattatcagaagtagccccatttcccttccccaagagcttcagacggtctgcgttaggtattagctacttgggtggcagcgagtcgccgaaatcgatctcgtagtcgaatacgcggacatacggcgtacggctgtcgaaatcaaacccatcatcatcacgaacgaactgagccggtgagtaagtctttcctgttcgccgattgaacaaatgtccgttgcgccactcccattgcctgtctttcggttcgattggaactctcctagaggaggtggacggcgttgcattagcgatcggggtcggactcgggctgccaggc

SEQ ID NO: 194 - DNA, 12318 bp, Artificial Sequence
  Synthetic Oligonucleotide
  misc_feature (1)..(3416): n is a, c, g, or t
nnnnnnnnnnnnnnnnnnnnnnnnnnnnnnnnnnnnnnnnnnnnnnnnnnnnnnnnnnnnnnnnnnnnnnnnnnnnnnnnnnnnnnnnnnnnnnnnnnnnnnnnnnnnnnnnnnnnnnnnnnnnnnnnnnnnnnnnnnnnnnnnnnnnnnnnnnnnnnnnnnnnnnnnnnnnnnnnnnnnnnnnnnnnnnnnnnnnnnnnnnnnnnnnnnnnnnnnnnnnnnnnnnnnnnnnnnnnnnnnnnnnnnnnnnnnnnnnnnnnnnnnnnnnnnnnnnnnnnnnnnnnnnnnnnnnnnnnnnnnnnnnnnnnnnnnnnnnnnnnnnnnnnnnnnnnnnnnnnnnnnnnnnnnnnnnnnnnnnnnnnnnnnnnnnnnnnnnnnnnnnnnnnnnnnnnnnnnnnnnnnnnnnnnnnnnnnnnnnnnnnnnnnnnnnnnnnnnnnnnnnnnnnnnnnnnnnnnnnnnnnnnnnnnnnnnnnnnnnnnnnnnnnnnnnnnnnnnnnnnnnnnnnnnnnnnnnnnnnnnnnnnnnnnnnnnnnnnnnnnnnnnnnnnnnnnnnnnnnnnnnnnnnnnnnnnnnnnnnnnnnnnnnnnnnnnnnnnnnnnnnnnnnnnnnnnnnnnnnnnnnnnnnnnnnnnnnnnnnnnnnnnnnnnnnnnnnnnnnnnnnnnnnnnnnnnnnnnnnnnnnnnnnnnnnnnnnnnnnnnnnnnnnnnnnnnnnnnnnnnnnnnnnnnnnnnnnnnnnnnnnnnnnnnnnnnnnnnnnnnnnnnnnnnnnnnnnnnnnnnnnnnnnnnnnnnnnnnnnnnnnnnnnnnnnnnnnnnnnnnnnnnnnnnnnnnnnnnnnnnnnnnnnnnnnnnnnnnnnnnnnnnnnnnnnnnnnnnnnnnnnnnnnnnnnnnnnnnnnnnnnnnnnnnnnnnnnnnnnnnnnnnnnnnnnnnnnnnnnnnnnnnnnnnnnnnnnnnnnnnnnnnnnnnnnnnnnnnnnnnnnnnnnnnnnnnnnnnnnnnnnnnnnnnnnnnnnnnnnnnnnnnnnnnnnnnnnnnnnnnnnnnnnnnnnnnnnnnnnnnnnnnnnnnnnnnnnnnnnnnnnnnnnnnnnnnnnnnnnnnnnnnnnnnnnnnnnnnnnnnnnnnnnnnnnnnnnnnnnnnnnnnnnnnnnnnnnnnnnnnnnnnnnnnnnnnnnnnnnnnnnnnnnnnnnnnnnnnnnnnnnnnnnnnnnnnnnnnnnnnnnnnnnnnnnnnnnnnnnnnnnnnnnnnnnnnnnnnnnnnnnnnnnnnnnnnnnnnnnnnnnnnnnnnnnnnnnnnnnnnnnnnnnnnnnnnnnnnnnnnnnnnnnnnnnnnnnnnnnnnnnnnnnnnnnnnnnnnnnnnnnnnnnnnnnnnnnnnnnnnnnnnnnnnnnnnnnnnnnnnnnnnnnnnnnnnnnnnnnnnnnnnnnnnnnnnnnnnnnnnnnnnnnnnnnnnnnnnnnnnnnnnnnnnnnnnnnnnnnnnnnnnnnnnnnnnnnnnnnnnnnnnnnnnnnnnnnnnnnnnnnnnnnnnnnnnnnnnnnnnnnnnnnnnnnnnnnnnnnnnnnnnnnnnnnnnnnnnnnnnnnnnnnnnnnnnnnnnnnnnnnnnnnnnnnnnnnnnnnnnnnnnnnnnnnnnnnnnnnnnnnnnnnnnnnnnnnnnnnnnnnnnnnnnnnnnnnnnnnnnnnnnnnnnnnnnnnnnnnnnnnnnnnnnnnnnnnnnnnnnnnnnnnnnnnnnnnnnnnnnnnnnnnnnnnnnnnnnnnnnnnnnnnnnnnnnnnnnnnnnnnnnnnnnnnnnnnnnnnnnnnnnnnnnnnnnnnnnnnnnnnnnnnnnnnnnnnnnnnnnnnnnnnnnnnnnnnnnnnnnnnnnnnnnnnnnnnnnnnnnnnnnnnnnnnnnnnnnnnnnnnnnnnnnnnnnnnnnnnnnnnnnnnnnnnnnnnnnnnnnnnnnnnnnnnnnnnnnnnnnnnnnnnnnnnnnnnnnnnnnnnnnnnnnnnnnnnnnnnnnnnnnnnnnnnnnnnnnnnnnnnnnnnnnnnnnnnnnnnnnnnnnnnnnnnnnnnnnnnnnnnnnnnnnnnnnnnnnnnnnnnnnnnnnnnnnnnnnnnnnnnnnnnnnnnnnnnnnnnnnnnnnnnnnnnnnnnnnnnnnnnnnnnnnnnnnnnnnnnnnnnnnnnnnnnnnnnnnnnnnnnnnnnnnnnnnnnnnnnnnnnnnnnnnnnnnnnnnnnnnnnnnnnnnnnnnnnnnnnnnnnnnnnnnnnnnnnnnnnnnnnnnnnnnnnnnnnnnnnnnnnnnnnnnnnnnnnnnnnnnnnnnnnnnnnnnnnnnnnnnnnnnnnnnnnnnnnnnnnnnnnnnnnnnnnnnnnnnnnnnnnnnnnnnnnnnnnnnnnnnnnnnnnnnnnnnnnnnnnnnnnnnnnnnnnnnnnnnnnnnnnnnnnnnnnnnnnnnnnnnnnnnnnnnnnnnnnnnnnnnnnnnnnnnnnnnnnnnnnnnnnnnnnnnnnnnnnnnnnnnnnnnnnnnnnnnnnnnnnnnnnnnnnnnnnnnnnnnnnnnnnnnnnnnnnnnnnnnnnnnnnnnnnnnnnnnnnnnnnnnnnnnnnnnnnnnnnnnnnnnnnnnnnnnnnnnnnnnnnnnnnnnnnnnnnnnnnnnnnnnnnnnnnnnnnnnnnnnnnnnnnnnnnnnnnnnnnnnnnnnnnnnnnnnnnnnnnnnnnnnnnnnnnnnnnnnnnnnnnnnnnnnnnnnnnnnnnnnnnnnnnnnnnnnnnnnnnnnnnnnnnnnnnnnnnnnnnnnnnnnnnnnnnnnnnnnnnnnnnnnnnnnnnnnnnnnnnnnnnnnnnnnnnnnnnnnnnnnnnnnnnnnnnnnnnnnnnnnnnnnnnnnnnnnnnnnnnnnnnnnnnnnnnnnnnnnnnnnnnnnnnnnnnnnnnnnnnnnnnnnnnnnnnnnnnnnnnnnnnnnnnnnnnnnnnnnnnnnnnnnnnnnnnnnnnnnnnnnnnnnnnnnnnnnnnnnnnnnnnnnnnnnnnnnnnnnnnnnnnnnnnnnnnnnnnnnnnnnnnnnnnnnnnnnnnnnnnnnnnnnnnnnnnnnnnnnnnnnnnnnnnnnnnnnnnnnnnnnnnnnnnnnnnnnnnnnnnnnnnnnnnnnnnnnnnnnnnnnnnnnnnnnnnnnnnnnnnnnnnnnnnnnnnnnnnnnnnnnnnnnnnnnnnnnnnnnnnnnnnnnnnnnnnnnnnnnnnnnnnnnnnnnnnnnnnnnnnnnnnnnnnnnnnnnnnnnnnnnnnnnnnnnnnnnnnnnnnnnnnnnnnnnnnnnnnnnnnnnnnnnnnnnnnnnnnnnnnnnnnnnnnnnnnnnnnnnnnnnnnnnnnnnnnnnnnnnnnnnnnnnnnnnnnnnnnnnnnnnnnnnnnnnnnnnnnnnnnnnnnnnnnnnnnnnnnnnnnnnacgaattggatcgccaaggggcagctcagttcggaaacgacagtcagcgaagccaagaaactcggagtcaaggttccgaaacaaaccaacccgtctgagggaaaaacatcgcgattggtcgcagacgctaagaggactacaaccgcttttcggaagaatggtgtcgttcttgatgttcccctgagttcggtgagtcgtcagttccccgatagagatctctttacaaagggtcttacggtagcaatcttgggtagcgagaccgacgaagcgtcgggggttgaaaagttggttttactcactgtggtcaacagcgaaaccgcgctcgccgatgtactcgatagcctcaaggactagggttccaataagggtgggcgagaagaccccgcaagtagttgattcttggtgcgacgcgaaggggtttttcagcgttccacaagtagtagatttggtttaggcaccgtacgataaagaataaaaattttgtcaccaagcgtatctctaggattaggaggttcccgatgttcggaatcacagtgattgagcgcaggcttcgcgatgagcgtgatgacgagtgacgcaatagcaatggcgcgtgttggaggatctatgcgtagttatattctcgtaacaataaactccctaatcctaatatctcttgccgcttgtggcactcaggagtccgtctctccgccgaaacttgaggcggctgaaaacagcgataagccatcgacggaaactactagctcttcgacgaatacttgcgatggcttatcaggcgccaagtacaacgattgcgttgtaaagaattctcccgatactgcggcagcgatcctaacgcctagcgttacgtcaaaatggaatgtggttgagaataaagacgagatgactggggcatcagaggtcgtatccgtttacggcgagggcgatacggagcaaacgcaactagtacttcgatgtaacgataaaaaaatactgcttttcgaggtagtcattggaaatggcgaccttgttgatcaaaccgaacagcaggtgcgctcgactaatatatggaatgacgacgcgccaaaatattgggaagccgtcgtatactcggctgcacgaataaaaatgtctgaaaatgatggcgttgcgaatattatgcttcgtgaaagtaatgagtttagtaatcagtatatttggggattgcaaataacaagcgaaaacaaggcgttgataaatctaagcactttcatgcttgaaatgacgcttagtaatggccaaaaaagattaataaaaggggatgcggtagtcggagactggttcgagaagttctgtactactccagagagcgaacttccttagtgtaaagctccgacggctcaggatcgttttgttaccgctcggtgtgcttcagcttgaggtacatattcctgcgtttgtttcacatgaactcgcggagggacgtcaggtccgtttgctcttctctgccacaatccaagcatggtcgctctgaagcagtgcttttcgctgtcgctcgctgagggtccgagcgtcgtagacctcaaggtcgcgggagtggcgccgaaaggtttccatcaatgccttggtttctgtggaggtgagtggcttgccaggcttcatcaggcaactcttgctctgagcagctcagccgcttgtgggttggtgtagatggcaatttcgagctctttggcggcttcacggcagaactcaccgtcagtcattcccacaaactcagcagctttgcgaatgcggctcttgaggtcgttggtggtgcggaaggcaatttgttcattcttgatcagcgtgtgttgtcttggcatttgtcaggctccatcaggtgcgttgtcgactatttagcgtgtagggcgagggcaaggcggtagaggtgagtgggtctcactcgaacaggtgcgcaaggttgtggcgaacgggttccgcagccgcagaaggcgactgaggagcactggttgaaacagttccaccgcgtggcacctcaatacccacattgatttcattcgtatcagcgtcgcgccaagcgcagaagaacaactcaggctcagcatttccgcggttgaactcgcgagcgatgtgcgccgcaattcgccaatcgagcttttcgacgcctcggtgtttcgcatagtgcgtgggtgatccccgtttgggactgtcagactgcgacggcacgagtgaaataaagtagtgactattgttgtttttgctcattgttgaaagatctcgttttggctaaagcactgcttctatttagcgtttctgtgcttttcgaattttgcgtatctcagccaattgctcaccgcgtcgcctccgcaatcgttgtgagtggtaagttcagagggagtgtttgcgattcgagtcacctcgaaccgtttgactcgagttggtctgatattgcgttcgttgcgtgaccaagagcgcagagtgtttgtgagacgcttgttcagcgacccattcacccacaccttgtgcgcgtaatctttcttgatacaaacgattccgtgaaaatgaatcgttggctcatagtgaagagagtacttagacgcgattaggtaatgccgcttgctcttaggtagaaactgctgaaacgcttggagtagaaacttgctccatagctcgtggaagtcttgggttctagagtattggtttccttggtcatcattcggcactagcgttaccaatgtgacggcgagtaaaagatgaccgttctcagagtggtttgtgaactctctgatgtcagactccagggtgtcattagtgctagaaggtttagatccttcaggtaagtttgtaaggttctcttttgctctgcgtcttggaccaaaaccaagtaatccattggctagttcctctttatgtcgtgactcatacgcttgcttgtcttgggtctctttgactttccaccagattaagcagtagtagaggaatagtgtttgtagcgttggatctgtcagtctcatcggtcgttctcagtgtttcttgggcaatagttagtcaattgggctcagcaccctcgttgtaaaactgaatacacgctaacgagcttcttgggggtggttgttcttttgccaccaagagtcagttagcctgagcactcccacaggactatttcggtgtacctgtgggttgaaccttcagaggagacgacaccctatctcccatagatatatataaaaaaaagcactgaaaacgccctactgaacgctttttttcgaaaaaagtttcgcttgttcttgccgtcagatagcagagggtcaatttctgacactgcgacctgtcagaggattgtcagggctgcgtaaaagcaatagggtgggcggatatggatcgctttgctgtcacgctgcgtctcgcctcccccttggttacgggtgggggctatatgacgctagacgcactcctggcggcggtactatttgattcaggggaaaccgtcgaggctgctcacgcgaaagtgcctctcaagaatactcaagggctttggcacggaagtgccgctgtttacgaaactcttgaagtgggacgccaagcgttcgttgccaatctgcgtgccactcacgatctgactcctgaccttatcgccaagaacaagcacggagcactccacgcaaaaatcagtttaggacgccgtcgtgacttcggacctgtaatgaatgggtaccaatacttggtggcggagtcgttgacgtggtacggcgagggggactcagccgccgtagaacgcttgctccgcaccgtgagatttattggaaaacgtcgagcgagtggctttggtgaggtgagcggggtcgaaatgtcgccgtctgatgtggatggtgtagtgggaatgcttggcgatcccttgcgtcctgttcccttagagctattcacgggggacaagagcgcgatacgaggtgacgctgcgtggaaacctgcctattggcgtcctgagaatcgtgcgatttgttatttaccgtcacaaaactaaatgaatacttacgaattttttatggagcactttgggcgtcatctcattgacgcagaggggctgaccgcagcacagggaacagagaaagcgctgagtagcaactacactacgctgaagggaactcctagtcgtcttcagtctggttgggcagttgttcgccctggtgtttcttctcttcaattgaagattaccgctaaaggtattgcttacgacaaccgcactgcgatggaagcatttatagacgagctgaccacgtgggacggcgactcgccaaggatattccttcaatttgagaaggcacccgtcccgatatctaatctctttatcacggttgatcgtcggttgattcgtatttgttcgccaaaaggcgtcgcatcgtttgatatgaacgtggaccctgactcctccgccacgattgttcaacgcgcaatttggaagcggttgccaaaatgatttgcgactacaccatttctaaacctgagagcctcggtctgtacgcggtccatcggtttgtcgcgcagctttgtgatggtgtgccgtgcctgtttgtggatcgtggtgatcgcgtggtgattcgtaccgccaagcctttgtgtgatcgcgtgacagaggtttccgtgccttccgtgggcgatgtgattgcgttttccttgcgatctgccgtgtcgaagcgtcaaaaaggcaagaatgtctatgcgccacttaacgattggcgagcgcgtcaccaatggctagagaagcgtgccgtaaagaatggctttgcgcttcttgcgcttcacgcaacaagcaagagcgtgaaagtagagcgcgagggcggtcagtactttcaaatggattcaaccgattttacaggggtgctcaaggtgaccgatgagcagctctttgtggcgtgtctgactcgcggaattgggcgggtgggcaagccttacggaatgggaatgctcgtaatctagcaacggtttggaggctttatggctaacagagtgattgtcaaagtgacgctacggaccaagggaccgttgtcgctcaagatgcctgtggcggaaggtgctcgtgaaaacgagtttgataactttcctgtgatgacgcgaggagtagacgcggagggagccaagcagcgtacaggctatcttcctgcgactactattcgtggatttttgcgaagggcggtcacgctgaagcgaatgcgagatgccgcagcgcaaggcaagccctacaggttgccgcaaatttataatgaaatgatcggtcaagacgccgagagcgagaagaaagcagaggaaatcgatttaatcgaaattcagaaagcacgcgacagcagtcctgtcgtggatctgtttggatcaggactcaatgtgaagtcacggctcttggtgagtcacttttgccctgcgctcaatattcttcctgaggcgttcacaggtgttcgtaaggacattgacgatacagaagacgccttagagttgatggaccctaaagagatggaagggttcgtgcggcgtacagagcgcaatcgtgagcgagctgcggcggctgcgatcgtgaagcagcttgagggaaaaatacggcgcgatgaaagaaaaaacggcgcgtcagaagacgataaaaaagcacttgaggcggcgcggacgaaggagaccgcagcggagggggggatgggtgaaatgaaggtgagcacccgccaactcacaacctactacgcgcttcccgctgagattgagctacacggacgcctcgtgattgaacgggcaaagccacgagacctagagctgttggagtatgcgctgagtgaattgagtcttgcgcctgttcttggtgcgcaatcggcacgaggatgcggcgagattgcgggaacctttgagttcacaaacgaagagggaaagctgatcaagaatgtggtggtaggcggttacagcgcagcaaatatcacgaatttctgagagtgaaaggttgttatttcaaagggaaatcatacggttacagagtatcgatcgcagctcctctgaatttgaggagctactgaaaccgaacaaacctcctatcctgctttcgcagcatcgcagctcctctgaatttgaggagctactgaaacttcgccgagatctggaatgcgggatacggtatcgcagctcctctgaatttgaggagctactgaaacatctcagcagcagcgcggacgatggctcggatcgcagctcctctgaatttgaggagctactgaaagggccagtcgtggcgggcagctatgcgtaccatcgcagctcctctgaatttgaggagctactgaaacaaccttgcgactgaccccgccatctggcatatcgcagctcctctgaatttgaggagctactgaaacagcggttccacggcattagggggagcaagtatcgcagctcctctgaatttgaggagctactgaaactgagcgacaacatcaccctgccccgcgctgagcgcagctcctctgaatttgaggagctactgaaacacaaggtagccgccgacggcggccacgacgatcgcagctcctctgaatttgaggagctattttctatagcgccactttaatgtggcgctttttttctgtaccgatagaatcagactatgtttcgttccgttgagcagtccaatttttctgcgcgccttgctgcgcatattcagcaggctgatgcgcctttactgcttgaaggaacaacggggcttggaaaaacaagagcctatctagctgcgctcaacaccgcgattcagcagggcaagcgtgtcgctatcgtcgttccaacgcacgcgctgatcgagcagcttcttgcttcttctgatctcgcgttgattgttccgtcgacagtcactcgcgcagcgttcaagcccaagtcgttctatccatcagctcaggagtttaaagacgcaaaagccttatcgcttgagtcgtcgctgatgatttgtactagctcttcagtgattgttgatcaacgcgccaagggcaactataacggcgtgactactcgcgactatattttatttgacgaagcggatcagctccctcagtacgctgctctgtctagagaccgagaaattcgtggcgcagaactcagggaactcggtgttcgaggctcgactacgaaagagatcgcggagcaggtgatcgcgcacaaaggtgcggaaacggagacccgcgccgcagcggtgatgatcttggaggctcttgatgagcctgcttggtatcacaacgcaggcaagaccgacgatggcgggattgcgctttttcacaaaatgccaggaaggctgcttaagaaagtcgctaaccgctctaatgtcgccttcatcagcgcaacgctctctattggggggaagttcgatgactttaatcgcgcaatgggcattggagagcagagtgcgctctcatcgatcatcgagcctgcgcatcacgggacgctgaaattctttcacgaaccgcacccagttctatcgcaagaatggctcaccgcgacaaccgaagcgatcaccaaggcgaaaaagccaacgcttgtggttacgccaagcaatgaattgtctcagaccttgggtgcgcttttccctgacgccattgttcgtgcggcagaggaaaagacttcagacgcgattttgcggctgacagacaagcagaacatcctgatcgcgtcagccgcgtgggcgggacttgacacgcccattgagtggaaaagcatcgtcattccgcgcattccgttcctgcgccctcaagtgatagacggcaatattgaaagcagcttctttgattcgcggaatagcgctatccgccgaatgcgtcaggtgattgggcgagggctcaggaaacctgaggcggagtgcgaggtgtacattttggatgaccgtttggcgatgattgagtcgttcattccaacgcgattcagagagttgtgggcgaatagacagcgtcttgtggggtcatcgtatgttgaagggcgtgactatgagaaaggcggaaggggagtagagcgtcatccgctggtcagaaaaaacgccctgaagcattttggtagacggtgtatgtcgtgtgacttcgttcccaaagtggacagtcagttagaggttcaccatttgttcccgcttgctgatggcggtgagcgggttacgaagattcaaaccgatgtggcggtgctttgcgccaactgtcaccgtttggcgcattcggcgtcgccgccgctgcctcttggggtcctgagaggacttcaccaagacggcgggttatcagggtagggtgaatacagcgagagggcggttccataagggttccgcaatcgaccccatacctgcgcttacctcacccctcaagccgccaatagccccttggacttgagcgtatggaaggctgtcccaacgccacaacgaagggtctgactgatcttcttgggtgacatacccttcttgtagagttcgacgatggcggctcgagtgctgtcagtcacgctagagggtcgaccgagtttcttcccttccttacgagcgcgttccacgcctaacttgatccgctcgcggatgaggtcgcgttcgaattcagcgaaggacgagaacacaccgaacatcagcttccctgaagggctcgtggtgtctaaagcctgttggtggaagtagagctgaacgcctgaagcgtgaagatcgttcacagtggtgacaaggtgctgtagagagcgtccaaggcggtcgatgctccaaacggcgatgaggtcgaactcacggcgagtggcggcttttaagagggcatcgagggcagggcgaccatcgcgacccttggctcctgagatcccatcgtcgcggtaagtagcgacgatgttccatcccctagcggcggcgacacgctcaagctcgtggagttggttgtcggcggtttggtgagcggtggagactcgaagatagagtgcggttttcata

SEQ ID NO: 195 - DNA, 12292 bp, Artificial Sequence
  Synthetic Oligonucleotide
  misc_feature (1)..(9256): n is a, c, g, or t
nnnnnnnnnnnnnnnnnnnnnnnnnnnnnnnnnnnnnnnnnnnnnnnnnnnnnnnnnnnnnnnnnnnnnnnnnnnnnnnnnnnnnnnnnnnnnnnnnnnnnnnnnnnnnnnnnnnnnnnnnnnnnnnnnnnnnnnnnnnnnnnnnnnnnnnnnnnnnnnnnnnnnnnnnnnnnnnnnnnnnnnnnnnnnnnnnnnnnnnnnnnnnnnnnnnnnnnnnnnnnnnnnnnnnnnnnnnnnnnnnnnnnnnnnnnnnnnnnnnnnnnnnnnnnnnnnnnnnnnnnnnnnnnnnnnnnnnnnnnnnnnnnnnnnnnnnnnnnnnnnnnnnnnnnnnnnnnnnnnnnnnnnnnnnnnnnnnnnnnnnnnnnnnnnnnnnnnnnnnnnnnnnnnnnnnnnnnnnnnnnnnnnnnnnnnnnnnnnnnnnnnnnnnnnnnnnnnnnnnnnnnnnnnnnnnnnnnnnnnnnnnnnnnnnnnnnnnnnnnnnnnnnnnnnnnnnnnnnnnnnnnnnnnnnnnnnnnnnnnnnnnnnnnnnnnnnnnnnnnnnnnnnnnnnnnnnnnnnnnnnnnnnnnnnnnnnnnnnnnnnnnnnnnnnnnnnnnnnnnnnnnnnnnnnnnnnnnnnnnnnnnnnnnnnnnnnnnnnnnnnnnnnnnnnnnnnnnnnnnnnnnnnnnnnnnnnnnnnnnnnnnnnnnnnnnnnnnnnnnnnnnnnnnnnnnnnnnnnnnnnnnnnnnnnnnnnnnnnnnnnnnnnnnnnnnnnnnnnnnnnnnnnnnnnnnnnnnnnnnnnnnnnnnnnnnnnnnnnnnnnnnnnnnnnnnnnnnnnnnnnnnnnnnnnnnnnnnnnnnnnnnnnnnnnnnnnnnnnnnnnnnnnnnnnnnnnnnnnnnnnnnnnnnnnnnnnnnnnnnnnnnnnnnnnnnnnnnnnnnnnnnnnnnnnnnnnnnnnnnnnnnnnnnnnnnnnnnnnnnnnnnnnnnnnnnnnnnnnnnnnnnnnnnnnnnnnnnnnnnnnnnnnnnnnnnnnnnnnnnnnnnnnnnnnnnnnnnnnnnnnnnnnnnnnnnnnnnnnnnnnnnnnnnnnnnnnnnnnnnnnnnnnnnnnnnnnnnnnnnnnnnnnnnnnnnnnnnnnnnnnnnnnnnnnnnnnnnnnnnnnnnnnnnnnnnnnnnnnnnnnnnnnnnnnnnnnnnnnnnnnnnnnnnnnnnnnnnnnnnnnnnnnnnnnnnnnnnnnnnnnnnnnnnnnnnnnnnnnnnnnnnnnnnnnnnnnnnnnnnnnnnnnnnnnnnnnnnnnnnnnnnnnnnnnnnnnnnnnnnnnnnnnnnnnnnnnnnnnnnnnnnnnnnnnnnnnnnnnnnnnnnnnnnnnnnnnnnnnnnnnnnnnnnnnnnnnnnnnnnnnnnnnnnnnnnnnnnnnnnnnnnnnnnnnnnnnnnnnnnnnnnnnnnnnnnnnnnnnnnnnnnnnnnnnnnnnnnnnnnnnnnnnnnnnnnnnnnnnnnnnnnnnnnnnnnnnnnnnnnnnnnnnnnnnnnnnnnnnnnnnnnnnnnnnnnnnnnnnnnnnnnnnnnnnnnnnnnnnnnnnnnnnnnnnnnnnnnnnnnnnnnnnnnnnnnnnnnnnnnnnnnnnnnnnnnnnnnnnnnnnnnnnnnnnnnnnnnnnnnnnnnnnnnnnnnnnnnnnnnnnnnnnnnnnnnnnnnnnnnnnnnnnnnnnnnnnnnnnnnnnnnnnnnnnnnnnnnnnnnnnnnnnnnnnnnnnnnnnnnnnnnnnnnnnnnnnnnnnnnnnnnnnnnnnnnnnnnnnnnnnnnnnnnnnnnnnnnnnnnnnnnnnnnnnnnnnnnnnnnnnnnnnnnnnnnnnnnnnnnnnnnnnnnnnnnnnnnnnnnnnnnnnnnnnnnnnnnnnnnnnnnnnnnnnnnnnnnnnnnnnnnnnnnnnnnnnnnnnnnnnnnnnnnnnnnnnnnnnnnnnnnnnnnnnnnnnnnnnnnnnnnnnnnnnnnnnnnnnnnnnnnnnnnnnnnnnnnnnnnnnnnnnnnnnnnnnnnnnnnnnnnnnnnnnnnnnnnnnnnnnnnnnnnnnnnnnnnnnnnnnnnnnnnnnnnnnnnnnnnnnnnnnnnnnnnnnnnnnnnnnnnnnnnnnnnnnnnnnnnnnnnnnnnnnnnnnnnnnnnnnnnnnnnnnnnnnnnnnnnnnnnnnnnnnnnnnnnnnnnnnnnnnnnnnnnnnnnnnnnnnnnnnnnnnnnnnnnnnnnnnnnnnnnnnnnnnnnnnnnnnnnnnnnnnnnnnnnnnnnnnnnnnnnnnnnnnnnnnnnnnnnnnnnnnnnnnnnnnnnnnnnnnnnnnnnnnnnnnnnnnnnnnnnnnnnnnnnnnnnnnnnnnnnnnnnnnnnnnnnnnnnnnnnnnnnnnnnnnnnnnnnnnnnnnnnnnnnnnnnnnnnnnnnnnnnnnnnnnnnnnnnnnnnnnnnnnnnnnnnnnnnnnnnnnnnnnnnnnnnnnnnnnnnnnnnnnnnnnnnnnnnnnnnnnnnnnnnnnnnnnnnnnnnnnnnnnnnnnnnnnnnnnnnnnnnnnnnnnnnnnnnnnnnnnnnnnnnnnnnnnnnnnnnnnnnnnnnnnnnnnnnnnnnnnnnnnnnnnnnnnnnnnnnnnnnnnnnnnnnnnnnnnnnnnnnnnnnnnnnnnnnnnnnnnnnnnnnnnnnnnnnnnnnnnnnnnnnnnnnnnnnnnnnnnnnnnnnnnnnnnnnnnnnnnnnnnnnnnnnnnnnnnnnnnnnnnnnnnnnnnnnnnnnnnnnnnnnnnnnnnnnnnnnnnnnnnnnnnnnnnnnnnnnnnnnnnnnnnnnnnnnnnnnnnnnnnnnnnnnnnnnnnnnnnnnnnnnnnnnnnnnnnnnnnnnnnnnnnnnnnnnnnnnnnnnnnnnnnnnnnnnnnnnnnnnnnnnnnnnnnnnnnnnnnnnnnnnnnnnnnnnnnnnnnnnnnnnnnnnnnnnnnnnnnnnnnnnnnnnnnnnnnnnnnnnnnnnnnnnnnnnnnnnnnnnnnnnnnnnnnnnnnnnnnnnnnnnnnnnnnnnnnnnnnnnnnnnnnnnnnnnnnnnnnnnnnnnnnnnnnnnnnnnnnnnnnnnnnnnnnnnnnnnnnnnnnnnnnnnnnnnnnnnnnnnnnnnnnnnnnnnnnnnnnnnnnnnnnnnnnnnnnnnnnnnnnnnnnnnnnnnnnnnnnnnnnnnnnnnnnnnnnnnnnnnnnnnnnnnnnnnnnnnnnnnnnnnnnnnnnnnnnnnnnnnnnnnnnnnnnnnnnnnnnnnnnnnnnnnnnnnnnnnnnnnnnnnnnnnnnnnnnnnnnnnnnnnnnnnnnnnnnnnnnnnnnnnnnnnnnnnnnnnnnnnnnnnnnnnnnnnnnnnnnnnnnnnnnnnnnnnnnnnnnnnnnnnnnnnnnnnnnnnnnnnnnnnnnnnnnnnnnnnnnnnnnnnnnnnnnnnnnnnnnnnnnnnnnnnnnnnnnnnnnnnnnnnnnnnnnnnnnnnnnnnnnnnnnnnnnnnnnnnnnnnnnnnnnnnnnnnnnnnnnnnnnnnnnnnnnnnnnnnnnnnnnnnnnnnnnnnnnnnnnnnnnnnnnnnnnnnnnnnnnnnnnnnnnnnnnnnnnnnnnnnnnnnnnnnnnnnnnnnnnnnnnnnnnnnnnnnnnnnnnnnnnnnnnnnnnnnnnnnnnnnnnnnnnnnnnnnnnnnnnnnnnnnnnnnnnnnnnnnnnnnnnnnnnnnnnnnnnnnnnnnnnnnnnnnnnnnnnnnnnnnnnnnnnnnnnnnnnnnnnnnnnnnnnnnnnnnnnnnnnnnnnnnnnnnnnnnnnnnnnnnnnnnnnnnnnnnnnnnnnnnnnnnnnnnnnnnnnnnnnnnnnnnnnnnnnnnnnnnnnnnnnnnnnnnnnnnnnnnnnnnnnnnnnnnnnnnnnnnnnnnnnnnnnnnnnnnnnnnnnnnnnnnnnnnnnnnnnnnnnnnnnnnnnnnnnnnnnnnnnnnnnnnnnnnnnnnnnnnnnnnnnnnnnnnnnnnnnnnnnnnnnnnnnnnnnnnnnnnnnnnnnnnnnnnnnnnnnnnnnnnnnnnnnnnnnnnnnnnnnnnnnnnnnnnnnnnnnnnnnnnnnnnnnnnnnnnnnnnnnnnnnnnnnnnnnnnnnnnnnnnnnnnnnnnnnnnnnnnnnnnnnnnnnnnnnnnnnnnnnnnnnnnnnnnnnnnnnnnnnnnnnnnnnnnnnnnnnnnnnnnnnnnnnnnnnnnnnnnnnnnnnnnnnnnnnnnnnnnnnnnnnnnnnnnnnnnnnnnnnnnnnnnnnnnnnnnnnnnnnnnnnnnnnnnnnnnnnnnnnnnnnnnnnnnnnnnnnnnnnnnnnnnnnnnnnnnnnnnnnnnnnnnnnnnnnnnnnnnnnnnnnnnnnnnnnnnnnnnnnnnnnnnnnnnnnnnnnnnnnnnnnnnnnnnnnnnnnnnnnnnnnnnnnnnnnnnnnnnnnnnnnnnnnnnnnnnnnnnnnnnnnnnnnnnnnnnnnnnnnnnnnnnnnnnnnnnnnnnnnnnnnnnnnnnnnnnnnnnnnnnnnnnnnnnnnnnnnnnnnnnnnnnnnnnnnnnnnnnnnnnnnnnnnnnnnnnnnnnnnnnnnnnnnnnnnnnnnnnnnnnnnnnnnnnnnnnnnnnnnnnnnnnnnnnnnnnnnnnnnnnnnnnnnnnnnnnnnnnnnnnnnnnnnnnnnnnnnnnnnnnnnnnnnnnnnnnnnnnnnnnnnnnnnnnnnnnnnnnnnnnnnnnnnnnnnnnnnnnnnnnnnnnnnnnnnnnnnnnnnnnnnnnnnnnnnnnnnnnnnnnnnnnnnnnnnnnnnnnnnnnnnnnnnnnnnnnnnnnnnnnnnnnnnnnnnnnnnnnnnnnnnnnnnnnnnnnnnnnnnnnnnnnnnnnnnnnnnnnnnnnnnnnnnnnnnnnnnnnnnnnnnnnnnnnnnnnnnnnnnnnnnnnnnnnnnnnnnnnnnnnnnnnnnnnnnnnnnnnnnnnnnnnnnnnnnnnnnnnnnnnnnnnnnnnnnnnnnnnnnnnnnnnnnnnnnnnnnnnnnnnnnnnnnnnnnnnnnnnnnnnnnnnnnnnnnnnnnnnnnnnnnnnnnnnnnnnnnnnnnnnnnnnnnnnnnnnnnnnnnnnnnnnnnnnnnnnnnnnnnnnnnnnnnnnnnnnnnnnnnnnnnnnnnnnnnnnnnnnnnnnnnnnnnnnnnnnnnnnnnnnnnnnnnnnnnnnnnnnnnnnnnnnnnnnnnnnnnnnnnnnnnnnnnnnnnnnnnnnnnnnnnnnnnnnnnnnnnnnnnnnnnnnnnnnnnnnnnnnnnnnnnnnnnnnnnnnnnnnnnnnnnnnnnnnnnnnnnnnnnnnnnnnnnnnnnnnnnnnnnnnnnnnnnnnnnnnnnnnnnnnnnnnnnnnnnnnnnnnnnnnnnnnnnnnnnnnnnnnnnnnnnnnnnnnnnnnnnnnnnnnnnnnnnnnnnnnnnnnnnnnnnnnnnnnnnnnnnnnnnnnnnnnnnnnnnnnnnnnnnnnnnnnnnnnnnnnnnnnnnnnnnnnnnnnnnnnnnnnnnnnnnnnnnnnnnnnnnnnnnnnnnnnnnnnnnnnnnnnnnnnnnnnnnnnnnnnnnnnnnnnnnnnnnnnnnnnnnnnnnnnnnnnnnnnnnnnnnnnnnnnnnnnnnnnnnnnnnnnnnnnnnnnnnnnnnnnnnnnnnnnnnnnnnnnnnnnnnnnnnnnnnnnnnnnnnnnnnnnnnnnnnnnnnnnnnnnnnnnnnnnnnnnnnnnnnnnnnnnnnnnnnnnnnnnnnnnnnnnnnnnnnnnnnnnnnnnnnnnnnnnnnnnnnnnnnnnnnnnnnnnnnnnnnnnnnnnnnnnnnnnnnnnnnnnnnnnnnnnnnnnnnnnnnnnnnnnnnnnnnnnnnnnnnnnnnnnnnnnnnnnnnnnnnnnnnnnnnnnnnnnnnnnnnnnnnnnnnnnnnnnnnnnnnnnnnnnnnnnnnnnnnnnnnnnnnnnnnnnnnnnnnnnnnnnnnnnnnnnnnnnnnnnnnnnnnnnnnnnnnnnnnnnnnnnnnnnnnnnnnnnnnnnnnnnnnnnnnnnnnnnnnnnnnnnnnnnnnnnnnnnnnnnnnnnnnnnnnnnnnnnnnnnnnnnnnnnnnnnnnnnnnnnnnnnnnnnnnnnnnnnnnnnnnnnnnnnnnnnnnnnnnnnnnnnnnnnnnnnnnnnnnnnnnnnnnnnnnnnnnnnnnnnnnnnnnnnnnnnnnnnnnnnnnnnnnnnnnnnnnnnnnnnnnnnnnnnnnnnnnnnnnnnnnnnnnnnnnnnnnnnnnnnnnnnnnnnnnnnnnnnnnnnnnnnnnnnnnnnnnnnnnnnnnnnnnnnnnnnnnnnnnnnnnnnnnnnnnnnnnnnnnnnnnnnnnnnnnnnnnnnnnnnnnnnnnnnnnnnnnnnnnnnnnnnnnnnnnnnnnnnnnnnnnnnnnnnnnnnnnnnnnnnnnnnnnnnnnnnnnnnnnnnnnnnnnnnnnnnnnnnnnnnnnnnnnnnnnnnnnnnnnnnnnnnnnnnnnnnnnnnnnnnnnnnnnnnnnnnnnnnnnnnnnnnnnnnnnnnnnnnnnnnnnnnnnnnnnnnnnnnnnnnnnnnnnnnnnnnnnnnnnnnnnnnnnnnnnnnnnnnnnnnnnnnnnnnnnnnnnnnnnnnnnnnnnnnnnnnnnnnnnnnnnnnnnnnnnnnnnnnnnnnnnnnnnnnnnnnnnnnnnnnnnnnnnnnnnnnnnnnnnnnnnnnnnnnnnnnnnnnnnnnnnnnnnnnnnnnnnnnnnnnnnnnnnnnnnnnnnnnnnnnnnnnnnnnnnnnnnnnnnnnnnnnnnnnnnnnnnnnnnnnnnnnnnnnnnnnnnnnnnnnnnnnnnnnnnnnnnnnnnnnnnnnnnnnnnnnnnnnnnnnnnnnnnnnnnnnnnnnnnnnnnnnnnnnnnnnnnnnnnnnnnnnnnnnnnnnnnnnnnnnnnnnnnnnnnnnnnnnnnnnnnnnnnnnnnnnnnnnnnnnnnnnnnnnnnnnnnnnnnnnnnnnnnnnnnnnnnnnnnnnnnnnnnnnnnnnnnnnnnnnnnnnnnnnnnnnnnnnnnnnnnnnnnnnnnnnnnnnnnnnnnnnnnnnnnnnnnnnnnnnnnnnnnnnnnnnnnnnnnnnnnnnnnnnnnnnnnnnnnnnnnnnnnnnnnnnnnnnnnnnnnnnnnnnnnnnnnnnnnnnnnnnnnnnnnnnnnnnnnnnnnnnnnnnnnnnnnnnnnnnnnnnnnnnnnnnnnnnnnnnnnnnnnnnnnnnnnnnnnnnnnnnnnnnnnnnnnnnnnnnnnnnnnnnnnnnnnnnnnnnnnnnnnnnnnnnnnnnnnnnnnnnnnnnnnnnnnnnnnnnnnnnnnnnnnnnnnnnnnnnnnnnnnnnnnnnnnnnnnnnnnnnnnnnnnnnnnnnnnnnnnnnnnnnnnnnnnnnnnnnnnnnnnnnnnnnnnnnnnnnnnnnnnnnnnnnnnnnnnnnnnnnnnnnnnnnnnnnnnnnnnnnnnnnnnnnnnnnnnnnnnnnnnnnnnnnnnnnnnnnnnnnnnnnnnnnnnnnnnnnnnnnnnnnnnnnnnnnnnnnnnnnnnnnnnnnnnnnnnnnnnnnnnnnnnnnnnnnnnnnnnnnnnnnnnnnnnnnnnnnnnnnnnnnnnnnnnnnnnnnnnnnnnnnnnnnnnnnnnnnnnnnnnnnnnnnnnnnnnnnnnnnnnnnnnnnnnnnnnnnnnnnnnnnnnnnnnnnnnnnnnnnnnnnnnnnnnnnnnnnnnnnnnnnnnnnnnnnnnnnnnnnnnnnnnnnnnnnnnnnnnnnnnnnnnnnnnnnnnnnnnnnnnnnnnnnnnnnnnnnnnnnnnnnnnnnnnnnnnnnnnnnnnnnnnnnnnnnnnnnnnnnnnnnnnnnnnnnnnnnnnnnnnnnnnnnnnnnnnnnnnnnnnnnnnnnnnnnnnnnnnnnnnnnnnnnnnnnnnnnnnnnnnnnnnnnnnnnnnnnnnnnnnnnnnnnnnnnnnnnnnnnnnnnnnnnnnnnnnnnnnnnnnnnnnnnnnnnnnnnnnnnnnnnnnnnnnnnnnnnnnnnnnnnnnnnnnnnnnnnnnnnnnnnnnnnnnnnnnnnnnnnnnnnnnnnnnnnnnnnnnnnnnnnnnnnnnnnnnnnnnnnnnnnnnnnnnnnnnnnnnnnnnnnnnnnnnnnnnnnnnnnnnnnnnnnnnnnnnnnnnnnnnnnnnnnnnnnnnnnnnnnnnnnnnnnnnnnnnnnnnnnnnnnnnnnnnnnnnnnnnnnnnnnnnnnnnnnnnnnnnnnnnnnnnnnnnnnnnnnnnnnnnnnnnnnnnnnnnnnnnnnnnnnnnnnnnnnnnnnnnnnnnnnnnnnnnnnnnnnnnnnnnnnnnnnnnnnnnnnnnnnnnnnnnnnnnnnnnnnnnnnnnnnnnnnnnnnnnnnnnnnnnnnnnnnnnnnnnnnnnnnnnnnnnnnnnnnnnnnnnnnnnnnnnnnnnnnnnnnnnnnnnnnnnnnnnnnnnnnnnnnnnnnnnnnnnnnnnnnnnnnnnnnnnnnnnnnnnnnnnnnnnnnnnnnnnnnnnnnnnnnnnnnnnnnnnnnnnnnnnnnnnnnnnnnnnnnnnnnnnnnnnnnnnnnnnnnnnnnnnnnnnnnnnnnnnnnnnnnnnnnnnnnnnnnnnnnnnnnnnnnnnnnnnnnnnnnnnnnnnnnnnnnnnnnnnnnnnnnnnnnnnnnnnnnnnnnnnnnnnnnnnnnnnnnnnnnnnnnnnnnnnnnnnnnnnnnnnnnnnnnnnnnnnnnnnnnnnnnnnnnnnnnnnnnnnnnnnnnnnnnnnnnnnnnnnnnnnnnnnnnnnnnnnnnnnnnnnnnnnnnnnnnnnnnnnnnnnnnnnnnnnnnnnnnnnnnnnnnnnnnnnnnnnnnnnnnnnnnnnnnnnnnnnnnnnnnnnnnnnnnnnnnnnnnnnnnnnnnnnnnnnnnnnnnnnnnnnnnnnnnnnnnnnnnnnnnnnnnnnnnnnnnnnnnnnnnnnnnnnnnnnnnnnnnnnnnnnnnnnnnnnnnnnnnnnnnnnnnnnnnnnnnnnnnnnnnnnnnnnnnnnnnnnnnnnnnnnnnnnnnnnnnnnnnnnnnnnnnnnnnnnnnnnnnnnnnnnnnnnnnnnnnnnnnnnnnnnnnnnnnnnnnnnnnnnnnnnnnnnnnnnnnnnnnnnnnnnnnnnnnnnnnnnnnnnnnnnnnnnnnnnnnnnnnnnnnnnnnnnnnnnnnnnnnnnnnnnnnnnnnnnnnnnnnnnnnnnnnnnnnnnnnnnnnnnnnnnnnnnnnnnnnnnnnnnnnnnnnngttgctgaccgtgactgattgcgtctgcaaggtgcggccacccggatttcgggtggtcattgcaagacgcttgccgatgtggatgcgtgcgtgactggtgcggccacccggatttcgggtggtcattgcaagtaaagcttcatgacgaaaggcgccaagcgcggtgcggccacccggatttcgggtggtcattgcaagtcctgcccgtcaatcatcgcgagcggccgcggtgcggccacccggatttcgggtggtcattgcaagtcgcaacgcattggcaaccgccgccgctacggtgcggccatccggatttcgggtggtcattgcaagtggcaaaggcagcggcaagcgcgcgttgcaggtgcggccacccggatttcgggtggtcattgcaaggtgctggtaagcgggctggcttccacctctggtgcggccacccggatttcgggtggtcattgcaagatatcttccggtgcgttctcattgcccccggtgcggccacccggatttcgggtggtcattgcaagcaaaatggcgatgcgcggcgcgtgtcaatcggtgcggccacccggatttcgggtggtcattgcaagtgataacgccacatgtgaacggaatgcgggggtgcggccacccggatttcgggtggtcattgcaacgtcggatcaggcaaaaccaccacgggccttggtgcggccacccggatttcgggtggtcattgcaacagctcgccaaggttggccatgcccatggcgggtgcggccacccggatttcgggtggtcaatgtagaatatcatcagacttattgttgtcctcgtccatcaggccatgttcgaagaacgtggtcaggagtcttcgcacccaacatcatgtagttctttccttcggctcccaaaaggatttaccccagatgtttcgcagcagcgaacagcggctattccatgaaattgtcgcgcggcattttgccgcccccatccggcctttgctcgcccaggcggcgaccgggcttgggaagacgcgtgcctatcttgccgccgccgcgcaggccgccagccaaggccagcgcatcgccatcgccctgccaagctgggcgctgattgatcaattgctggcctcggaagatttcgcgctcacgcgcggtacattgaacatcgccaccttccggccacgccggcgttgcgacaatgcggctgaatatgaagcccaagcggaagcggcgcgttccagccacatcatgctttgtactgctgcggcggtgttgattgataacgccgcgaagggcgcctattgcggtgccattgaacgcagcattatttttgatgaggcggatcaattgccggatgcggctgccttgcgcgcggatgtggaaatcacccccgtcgaattgcgcgacctgaatattgccgccaaaacgactgaggctattgccgctgccgttttggcgcatcctcgcgccaccacggaacaacgcgccatcgccaggctagtgcagcaatacgttactgaagcacccggctatgcgctggtcggcagaacagaccaagatggcatcgccgtaaatcatccaagaccggggcgaatgctgaaacgcatcagcaacctgcccagcagcattttcatctccgccacccttcaaattcgcggcagcttcgacgcctttcggcgcgccatggcgattgaggagatctctcccctctcgacagccattgaaccaaaacgccacggggacctgtccttcatctatcaacccagggcgcccgatacggaagactggttcactgaggttatcagcagcatcgcaaccgcgccccgcccgtgcttggtgctggtgccaagccatgacttggccgagcgtattggcgccgcggccggtgggcgcgtgcgtggccacgatgaacctttgcgggaagccgccgcggaagctcaaagccagggacttttcatcgcggccggtggctgggccgggctggatacgccgacacactgggccagcctggtcattccccgcgcgcctttccccaggctgcgggttctggagggggaagctgtggaccattacctggatagtcacgcaacaaccgtgcggcgccttgggcagggtcttggccgcgtactgcgctttcctgaagcgcgcgccaaggtgattattcttgaccagcgcctggtcactcacggcctggagagctgcataccggaacgcttccgctccgcttgggaggaagccaagcgcgccgccctttctcagggtttcgaggaaggcacgcggtttgagctgaccttgagccgggcggaacgcgaccctgcgctgcgcaaggcggcgctcagccattacgggctgcgctgcaccgaatgcgggttcgtgccgcaggtttcatcgcaactggaagttcaccacctgaacccaatcgctgagggcaagcggaggacagtgctgacggacgtgacggttctctgcgccaattgccaccggctggtgcacgcgcgccttcgcgccgcttcagccgagggggaggcggtttgacgcgtctaagcatgctgtctgcagtggcccaaggccgacccgatgcccggagcgggcagggccttctcaaccgaccaggcggcgttactgctcacttttccccgctttatttcttggcgagcatgcgcggccctgcgcctacgactcctagcctccgccaacgccaaaggtgagtataggcagcgattttccgctcccggtcaccctacgccccccattgaaatctcccacttccgaagcggtccgcgaaaatttatcaagctttttcaattactttcgtctggctggaaaatcactcaagtcgccagccttggagagaactcgccccggagagagcattttcgcgcaatattccggcaccgcaccagccacgcgaatttgagaacccttgcgataacacgggaatttcggagggccatcagcggcggagagcgtgtttgtaccataggaatggcgtcccgtacgggacgccattcctatggtacaaacacgctctccgccgctgatggccctc

SEQ ID NO: 196 - DNA, 12271 bp, Artificial Sequence
  Synthetic Oligonucleotide
  misc_feature (1)..(9049): n is a, c, g, or t
nnnnnnnnnnnnnnnnnnnnnnnnnnnnnnnnnnnnnnnnnnnnnnnnnnnnnnnnnnnnnnnnnnnnnnnnnnnnnnnnnnnnnnnnnnnnnnnnnnnnnnnnnnnnnnnnnnnnnnnnnnnnnnnnnnnnnnnnnnnnnnnnnnnnnnnnnnnnnnnnnnnnnnnnnnnnnnnnnnnnnnnnnnnnnnnnnnnnnnnnnnnnnnnnnnnnnnnnnnnnnnnnnnnnnnnnnnnnnnnnnnnnnnnnnnnnnnnnnnnnnnnnnnnnnnnnnnnnnnnnnnnnnnnnnnnnnnnnnnnnnnnnnnnnnnnnnnnnnnnnnnnnnnnnnnnnnnnnnnnnnnnnnnnnnnnnnnnnnnnnnnnnnnnnnnnnnnnnnnnnnnnnnnnnnnnnnnnnnnnnnnnnnnnnnnnnnnnnnnnnnnnnnnnnnnnnnnnnnnnnnnnnnnnnnnnnnnnnnnnnnnnnnnnnnnnnnnnnnnnnnnnnnnnnnnnnnnnnnnnnnnnnnnnnnnnnnnnnnnnnnnnnnnnnnnnnnnnnnnnnnnnnnnnnnnnnnnnnnnnnnnnnnnnnnnnnnnnnnnnnnnnnnnnnnnnnnnnnnnnnnnnnnnnnnnnnnnnnnnnnnnnnnnnnnnnnnnnnnnnnnnnnnnnnnnnnnnnnnnnnnnnnnnnnnnnnnnnnnnnnnnnnnnnnnnnnnnnnnnnnnnnnnnnnnnnnnnnnnnnnnnnnnnnnnnnnnnnnnnnnnnnnnnnnnnnnnnnnnnnnnnnnnnnnnnnnnnnnnnnnnnnnnnnnnnnnnnnnnnnnnnnnnnnnnnnnnnnnnnnnnnnnnnnnnnnnnnnnnnnnnnnnnnnnnnnnnnnnnnnnnnnnnnnnnnnnnnnnnnnnnnnnnnnnnnnnnnnnnnnnnnnnnnnnnnnnnnnnnnnnnnnnnnnnnnnnnnnnnnnnnnnnnnnnnnnnnnnnnnnnnnnnnnnnnnnnnnnnnnnnnnnnnnnnnnnnnnnnnnnnnnnnnnnnnnnnnnnnnnnnnnnnnnnnnnnnnnnnnnnnnnnnnnnnnnnnnnnnnnnnnnnnnnnnnnnnnnnnnnnnnnnnnnnnnnnnnnnnnnnnnnnnnnnnnnnnnnnnnnnnnnnnnnnnnnnnnnnnnnnnnnnnnnnnnnnnnnnnnnnnnnnnnnnnnnnnnnnnnnnnnnnnnnnnnnnnnnnnnnnnnnnnnnnnnnnnnnnnnnnnnnnnnnnnnnnnnnnnnnnnnnnnnnnnnnnnnnnnnnnnnnnnnnnnnnnnnnnnnnnnnnnnnnnnnnnnnnnnnnnnnnnnnnnnnnnnnnnnnnnnnnnnnnnnnnnnnnnnnnnnnnnnnnnnnnnnnnnnnnnnnnnnnnnnnnnnnnnnnnnnnnnnnnnnnnnnnnnnnnnnnnnnnnnnnnnnnnnnnnnnnnnnnnnnnnnnnnnnnnnnnnnnnnnnnnnnnnnnnnnnnnnnnnnnnnnnnnnnnnnnnnnnnnnnnnnnnnnnnnnnnnnnnnnnnnnnnnnnnnnnnnnnnnnnnnnnnnnnnnnnnnnnnnnnnnnnnnnnnnnnnnnnnnnnnnnnnnnnnnnnnnnnnnnnnnnnnnnnnnnnnnnnnnnnnnnnnnnnnnnnnnnnnnnnnnnnnnnnnnnnnnnnnnnnnnnnnnnnnnnnnnnnnnnnnnnnnnnnnnnnnnnnnnnnnnnnnnnnnnnnnnnnnnnnnnnnnnnnnnnnnnnnnnnnnnnnnnnnnnnnnnnnnnnnnnnnnnnnnnnnnnnnnnnnnnnnnnnnnnnnnnnnnnnnnnnnnnnnnnnnnnnnnnnnnnnnnnnnnnnnnnnnnnnnnnnnnnnnnnnnnnnnnnnnnnnnnnnnnnnnnnnnnnnnnnnnnnnnnnnnnnnnnnnnnnnnnnnnnnnnnnnnnnnnnnnnnnnnnnnnnnnnnnnnnnnnnnnnnnnnnnnnnnnnnnnnnnnnnnnnnnnnnnnnnnnnnnnnnnnnnnnnnnnnnnnnnnnnnnnnnnnnnnnnnnnnnnnnnnnnnnnnnnnnnnnnnnnnnnnnnnnnnnnnnnnnnnnnnnnnnnnnnnnnnnnnnnnnnnnnnnnnnnnnnnnnnnnnnnnnnnnnnnnnnnnnnnnnnnnnnnnnnnnnnnnnnnnnnnnnnnnnnnnnnnnnnnnnnnnnnnnnnnnnnnnnnnnnnnnnnnnnnnnnnnnnnnnnnnnnnnnnnnnnnnnnnnnnnnnnnnnnnnnnnnnnnnnnnnnnnnnnnnnnnnnnnnnnnnnnnnnnnnnnnnnnnnnnnnnnnnnnnnnnnnnnnnnnnnnnnnnnnnnnnnnnnnnnnnnnnnnnnnnnnnnnnnnnnnnnnnnnnnnnnnnnnnnnnnnnnnnnnnnnnnnnnnnnnnnnnnnnnnnnnnnnnnnnnnnnnnnnnnnnnnnnnnnnnnnnnnnnnnnnnnnnnnnnnnnnnnnnnnnnnnnnnnnnnnnnnnnnnnnnnnnnnnnnnnnnnnnnnnnnnnnnnnnnnnnnnnnnnnnnnnnnnnnnnnnnnnnnnnnnnnnnnnnnnnnnnnnnnnnnnnnnnnnnnnnnnnnnnnnnnnnnnnnnnnnnnnnnnnnnnnnnnnnnnnnnnnnnnnnnnnnnnnnnnnnnnnnnnnnnnnnnnnnnnnnnnnnnnnnnnnnnnnnnnnnnnnnnnnnnnnnnnnnnnnnnnnnnnnnnnnnnnnnnnnnnnnnnnnnnnnnnnnnnnnnnnnnnnnnnnnnnnnnnnnnnnnnnnnnnnnnnnnnnnnnnnnnnnnnnnnnnnnnnnnnnnnnnnnnnnnnnnnnnnnnnnnnnnnnnnnnnnnnnnnnnnnnnnnnnnnnnnnnnnnnnnnnnnnnnnnnnnnnnnnnnnnnnnnnnnnnnnnnnnnnnnnnnnnnnnnnnnnnnnnnnnnnnnnnnnnnnnnnnnnnnnnnnnnnnnnnnnnnnnnnnnnnnnnnnnnnnnnnnnnnnnnnnnnnnnnnnnnnnnnnnnnnnnnnnnnnnnnnnnnnnnnnnnnnnnnnnnnnnnnnnnnnnnnnnnnnnnnnnnnnnnnnnnnnnnnnnnnnnnnnnnnnnnnnnnnnnnnnnnnnnnnnnnnnnnnnnnnnnnnnnnnnnnnnnnnnnnnnnnnnnnnnnnnnnnnnnnnnnnnnnnnnnnnnnnnnnnnnnnnnnnnnnnnnnnnnnnnnnnnnnnnnnnnnnnnnnnnnnnnnnnnnnnnnnnnnnnnnnnnnnnnnnnnnnnnnnnnnnnnnnnnnnnnnnnnnnnnnnnnnnnnnnnnnnnnnnnnnnnnnnnnnnnnnnnnnnnnnnnnnnnnnnnnnnnnnnnnnnnnnnnnnnnnnnnnnnnnnnnnnnnnnnnnnnnnnnnnnnnnnnnnnnnnnnnnnnnnnnnnnnnnnnnnnnnnnnnnnnnnnnnnnnnnnnnnnnnnnnnnnnnnnnnnnnnnnnnnnnnnnnnnnnnnnnnnnnnnnnnnnnnnnnnnnnnnnnnnnnnnnnnnnnnnnnnnnnnnnnnnnnnnnnnnnnnnnnnnnnnnnnnnnnnnnnnnnnnnnnnnnnnnnnnnnnnnnnnnnnnnnnnnnnnnnnnnnnnnnnnnnnnnnnnnnnnnnnnnnnnnnnnnnnnnnnnnnnnnnnnnnnnnnnnnnnnnnnnnnnnnnnnnnnnnnnnnnnnnnnnnnnnnnnnnnnnnnnnnnnnnnnnnnnnnnnnnnnnnnnnnnnnnnnnnnnnnnnnnnnnnnnnnnnnnnnnnnnnnnnnnnnnnnnnnnnnnnnnnnnnnnnnnnnnnnnnnnnnnnnnnnnnnnnnnnnnnnnnnnnnnnnnnnnnnnnnnnnnnnnnnnnnnnnnnnnnnnnnnnnnnnnnnnnnnnnnnnnnnnnnnnnnnnnnnnnnnnnnnnnnnnnnnnnnnnnnnnnnnnnnnnnnnnnnnnnnnnnnnnnnnnnnnnnnnnnnnnnnnnnnnnnnnnnnnnnnnnnnnnnnnnnnnnnnnnnnnnnnnnnnnnnnnnnnnnnnnnnnnnnnnnnnnnnnnnnnnnnnnnnnnnnnnnnnnnnnnnnnnnnnnnnnnnnnnnnnnnnnnnnnnnnnnnnnnnnnnnnnnnnnnnnnnnnnnnnnnnnnnnnnnnnnnnnnnnnnnnnnnnnnnnnnnnnnnnnnnnnnnnnnnnnnnnnnnnnnnnnnnnnnnnnnnnnnnnnnnnnnnnnnnnnnnnnnnnnnnnnnnnnnnnnnnnnnnnnnnnnnnnnnnnnnnnnnnnnnnnnnnnnnnnnnnnnnnnnnnnnnnnnnnnnnnnnnnnnnnnnnnnnnnnnnnnnnnnnnnnnnnnnnnnnnnnnnnnnnnnnnnnnnnnnnnnnnnnnnnnnnnnnnnnnnnnnnnnnnnnnnnnnnnnnnnnnnnnnnnnnnnnnnnnnnnnnnnnnnnnnnnnnnnnnnnnnnnnnnnnnnnnnnnnnnnnnnnnnnnnnnnnnnnnnnnnnnnnnnnnnnnnnnnnnnnnnnnnnnnnnnnnnnnnnnnnnnnnnnnnnnnnnnnnnnnnnnnnnnnnnnnnnnnnnnnnnnnnnnnnnnnnnnnnnnnnnnnnnnnnnnnnnnnnnnnnnnnnnnnnnnnnnnnnnnnnnnnnnnnnnnnnnnnnnnnnnnnnnnnnnnnnnnnnnnnnnnnnnnnnnnnnnnnnnnnnnnnnnnnnnnnnnnnnnnnnnnnnnnnnnnnnnnnnnnnnnnnnnnnnnnnnnnnnnnnnnnnnnnnnnnnnnnnnnnnnnnnnnnnnnnnnnnnnnnnnnnnnnnnnnnnnnnnnnnnnnnnnnnnnnnnnnnnnnnnnnnnnnnnnnnnnnnnnnnnnnnnnnnnnnnnnnnnnnnnnnnnnnnnnnnnnnnnnnnnnnnnnnnnnnnnnnnnnnnnnnnnnnnnnnnnnnnnnnnnnnnnnnnnnnnnnnnnnnnnnnnnnnnnnnnnnnnnnnnnnnnnnnnnnnnnnnnnnnnnnnnnnnnnnnnnnnnnnnnnnnnnnnnnnnnnnnnnnnnnnnnnnnnnnnnnnnnnnnnnnnnnnnnnnnnnnnnnnnnnnnnnnnnnnnnnnnnnnnnnnnnnnnnnnnnnnnnnnnnnnnnnnnnnnnnnnnnnnnnnnnnnnnnnnnnnnnnnnnnnnnnnnnnnnnnnnnnnnnnnnnnnnnnnnnnnnnnnnnnnnnnnnnnnnnnnnnnnnnnnnnnnnnnnnnnnnnnnnnnnnnnnnnnnnnnnnnnnnnnnnnnnnnnnnnnnnnnnnnnnnnnnnnnnnnnnnnnnnnnnnnnnnnnnnnnnnnnnnnnnnnnnnnnnnnnnnnnnnnnnnnnnnnnnnnnnnnnnnnnnnnnnnnnnnnnnnnnnnnnnnnnnnnnnnnnnnnnnnnnnnnnnnnnnnnnnnnnnnnnnnnnnnnnnnnnnnnnnnnnnnnnnnnnnnnnnnnnnnnnnnnnnnnnnnnnnnnnnnnnnnnnnnnnnnnnnnnnnnnnnnnnnnnnnnnnnnnnnnnnnnnnnnnnnnnnnnnnnnnnnnnnnnnnnnnnnnnnnnnnnnnnnnnnnnnnnnnnnnnnnnnnnnnnnnnnnnnnnnnnnnnnnnnnnnnnnnnnnnnnnnnnnnnnnnnnnnnnnnnnnnnnnnnnnnnnnnnnnnnnnnnnnnnnnnnnnnnnnnnnnnnnnnnnnnnnnnnnnnnnnnnnnnnnnnnnnnnnnnnnnnnnnnnnnnnnnnnnnnnnnnnnnnnnnnnnnnnnnnnnnnnnnnnnnnnnnnnnnnnnnnnnnnnnnnnnnnnnnnnnnnnnnnnnnnnnnnnnnnnnnnnnnnnnnnnnnnnnnnnnnnnnnnnnnnnnnnnnnnnnnnnnnnnnnnnnnnnnnnnnnnnnnnnnnnnnnnnnnnnnnnnnnnnnnnnnnnnnnnnnnnnnnnnnnnnnnnnnnnnnnnnnnnnnnnnnnnnnnnnnnnnnnnnnnnnnnnnnnnnnnnnnnnnnnnnnnnnnnnnnnnnnnnnnnnnnnnnnnnnnnnnnnnnnnnnnnnnnnnnnnnnnnnnnnnnnnnnnnnnnnnnnnnnnnnnnnnnnnnnnnnnnnnnnnnnnnnnnnnnnnnnnnnnnnnnnnnnnnnnnnnnnnnnnnnnnnnnnnnnnnnnnnnnnnnnnnnnnnnnnnnnnnnnnnnnnnnnnnnnnnnnnnnnnnnnnnnnnnnnnnnnnnnnnnnnnnnnnnnnnnnnnnnnnnnnnnnnnnnnnnnnnnnnnnnnnnnnnnnnnnnnnnnnnnnnnnnnnnnnnnnnnnnnnnnnnnnnnnnnnnnnnnnnnnnnnnnnnnnnnnnnnnnnnnnnnnnnnnnnnnnnnnnnnnnnnnnnnnnnnnnnnnnnnnnnnnnnnnnnnnnnnnnnnnnnnnnnnnnnnnnnnnnnnnnnnnnnnnnnnnnnnnnnnnnnnnnnnnnnnnnnnnnnnnnnnnnnnnnnnnnnnnnnnnnnnnnnnnnnnnnnnnnnnnnnnnnnnnnnnnnnnnnnnnnnnnnnnnnnnnnnnnnnnnnnnnnnnnnnnnnnnnnnnnnnnnnnnnnnnnnnnnnnnnnnnnnnnnnnnnnnnnnnnnnnnnnnnnnnnnnnnnnnnnnnnnnnnnnnnnnnnnnnnnnnnnnnnnnnnnnnnnnnnnnnnnnnnnnnnnnnnnnnnnnnnnnnnnnnnnnnnnnnnnnnnnnnnnnnnnnnnnnnnnnnnnnnnnnnnnnnnnnnnnnnnnnnnnnnnnnnnnnnnnnnnnnnnnnnnnnnnnnnnnnnnnnnnnnnnnnnnnnnnnnnnnnnnnnnnnnnnnnnnnnnnnnnnnnnnnnnnnnnnnnnnnnnnnnnnnnnnnnnnnnnnnnnnnnnnnnnnnnnnnnnnnnnnnnnnnnnnnnnnnnnnnnnnnnnnnnnnnnnnnnnnnnnnnnnnnnnnnnnnnnnnnnnnnnnnnnnnnnnnnnnnnnnnnnnnnnnnnnnnnnnnnnnnnnnnnnnnnnnnnnnnnnnnnnnnnnnnnnnnnnnnnnnnnnnnnnnnnnnnnnnnnnnnnnnnnnnnnnnnnnnnnnnnnnnnnnnnnnnnnnnnnnnnnnnnnnnnnnnnnnnnnnnnnnnnnnnnnnnnnnnnnnnnnnnnnnnnnnnnnnnnnnnnnnnnnnnnnnnnnnnnnnnnnnnnnnnnnnnnnnnnnnnnnnnnnnnnnnnnnnnnnnnnnnnnnnnnnnnnnnnnnnnnnnnnnnnnnnnnnnnnnnnnnnnnnnnnnnnnnnnnnnnnnnnnnnnnnnnnnnnnnnnnnnnnnnnnnnnnnnnnnnnnnnnnnnnnnnnnnnnnnnnnnnnnnnnnnnnnnnnnnnnnnnnnnnnnnnnnnnnnnnnnnnnnnnnnnnnnnnnnnnnnnnnnnnnnnnnnnnnnnnnnnnnnnnnnnnnnnnnnnnnnnnnnnnnnnnnnnnnnnnnnnnnnnnnnnnnnnnnnnnnnnnnnnnnnnnnnnnnnnnnnnnnnnnnnnnnnnnnnnnnnnnnnnnnnnnnnnnnnnnnnnnnnnnnnnnnnnnnnnnnnnnnnnnnnnnnnnnnnnnnnnnnnnnnnnnnnnnnnnnnnnnnnnnnnnnnnnnnnnnnnnnnnnnnnnnnnnnnnnnnnnnnnnnnnnnnnnnnnnnnnnnnnnnnnnnnnnnnnnnnnnnnnnnnnnnnnnnnnnnnnnnnnnnnnnnnnnnnnnnnnnnnnnnnnnnnnnnnnnnnnnnnnnnnnnnnnnnnnnnnnnnnnnnnnnnnnnnnnnnnnnnnnnnnnnnnnnnnnnnnnnnnnnnnnnnnnnnnnnnnnnnnnnnnnnnnnnnnnnnnnnnnnnnnnnnnnnnnnnnnnnnnnnnnnnnnnnnnnnnnnnnnnnnnnnnnnnnnnnnnnnnnnnnnnnnnnnnnnnnnnnnnnnnnnnnnnnnnnnnnnnnnnnnnnnnnnnnnnnnnnnnnnnnnnnnnnnnnnnnnnnnnnnnnnnnnnnnnnnnnnnnnnnnnnnnnnnnnnnnnnnnnnnnnnnnnnnnnnnnnnnnnnnnnnnnnnnnnnnnnnnnnnnnnnnnnnnnnnnnnnnnnnnnnnnnnnnnnnnnnnnnnnnnnnnnnnnnnnnnnnnnnnnnnnnnnnnnnnnnnnnnnnnnnnnnnnnnnnnnnnnnnnnnnnnnnnnnnnnnnnnnnnnnnnnnnnnnnnnnnnnnnnnnnnnnnnnnnnnnnnnnnnnnnnnnnnnnnnnnnnnnnnnnnnnnnnnnnnnnnnnnnnnnnnnnnnnnnnnnnnnnnnnnnnnnnnnnnnnnnnnnnnnnnnnnnnnnnnnnnnnnnnnnnnnnnnnnnnnnnnnnnnnnnnnnnnnnnnnnnnnnnnnnnnnnnnnnnnnnnnnnnnnnnnnnnnnnnnnnnnnnnnnnnnnnnnnnnnnnnnnnnnnnnnnnnnnnnnnnnnnnnnnnnnnnnnnnnnnnnnnnnnnnnnnnnnnnnnnnnnnnnnnnnnnnnnnnnnnnnnnnnnnnnnnnnnnnnnnnnnnnnnnnnnnnnnnnnnnnnnnnnnnnnnnnnnnnnnnnnnnnnnnnnnnnnnnnnnnnnnnnnnnnnnnnnnnnnnnnnnnnnnnnnnnnnnnnnnnnnnnnnnnnnnnnnnnnnnnnnnnnnnnnnnnnnnnnnnnnnnnnnnnnnnnnnnnnnnnnnnnnnnnnnnnnnnnnnnnnnnnnnnnnnnnnnnnnnnnnnnnnnnnnnnnnnnnnnnnnnnnnnnnnnnnnnnnnnnnnnnnnnnnnnnnnnnnnnnnnnnnnnnnnnnnnnnnnnnnnnnnnnnnnnnnnnnnnnnnnnnnnnnnnnnnnnnnnnnnnnnnnnnnnnnnnnnnnnnnnnnnnnnnnnnnnnnnnnnnnnnnnnnnnnnnnnnnnnnnnnnnnnnnnnnnnnnnnnnnnnnnnnnnnnnnnnnnnnnnnnnnnnnnnnnnnnnnnnnnnnnnnnnnnnnnnnnnnnnnnnnnnnnnnnnnnnnnnnnnnnnnnnnnnnnnnnnnnnnnnnnnnnnnnnnnnnnnnnnnnnnnnnnnnnnnnnnnnnnnnnnnnnnnnnnnnnnnnnnnnnnnnnnnnnnnnnnnnnnnnnnnnnnnnnnnnnnnnnnnnnnnnnnnnnnnnnnacgattcaacccatcaccttcacccatcacggcatcgacgggttgcccaccatggctcgcggcgttgacatggagggtcatcccctgcgcaccgtttacattccagccgcgcagtttcgcggtcggctaaggcatgaggcggcgttggcaaaaatgcgtaccgcacacggccccatcaagttggcggaagcctacatgctggccttggggcaaaacatcgacaccaaagaagacgaggctgatgagaaagtgcggttgggcgagctactcgctttacgggcggccaaccccttcattgatctcttcggaacgtggcgcatggacagccggctttacgtgtcgcacctgatgccggtcgtcaacgtcaagcccgacacctttcaccacatccgccgcgatctagacaccaacgacgcgttgtttgccgagttacccgaagccgagatcgacgtcttttacgaaaggcaagacggacagtcgcaagcctctcaagcggagagtctgattaaggtggccacccgcgaactgcgcaaagccaaaaaagaaaacgacctcgccaaatgcgacgagttcgaagccaagatcgaagaactcaaagccctcaagaaggcgcacaaagccggtgacgaatcgggaaacaccaaacacttggtggcgatggaggccgtccctgcgggaattcaattgttgtgcaaactcatcataaagcgggccacgccgctcgacctcagcatgctcacgggtgcgcttaacgcgatcagcgaattccccatgatgggtgcccagcgggcccgtggctgaggcaaggtgagtggcgccgcaaccgtctgccacacccagggtgaggtgttggcgcaaatcgccttcggtggttttttgccagctgcactggagtggaccgatgcgggcaccgcgttcatgactggcctcgaaacggttgccgtcgccgcgtgaaaggcccttaccgcagcccacagcaggcgcaatacgccaagctcatcgagcgcgctgtcagcaaacccggtgcgcccctgttggcgggtgctgcgcccgggctcggtaagacacacggctacgccatcccgttgttgtgcagtggcaaaaaagttgccatcgccatgagcacgcgccaactgatcgatcaatttatagcgagcgatgcactcgccgctgcgcaagccgcactagaggccgaggggcggcccgctgccaccgttgtcgccttgcaaccccgccgtcaatttgaaacggcggtggcctacagcgcgcacaaaacggcggcgcttgatgccgacgtcttggtgctcacacacatgggcgtgctcatcgatacccacatcccagcctacgcccagctgcgtcagcgcgctgtcttgttgtttgacgaagccgatcttttggccgatgccgccgacttgcgcagcacctatcgcattgaggctgaggccttagcccgcgcaggcgtcgaaaacgccacaccgacaaaggcggttgaaaccatcattaaaaaatccgatgaccccgaggaaaaagcagtcgccacagccatccaacgcgctttggcagagccggcttggtacaaagtgatcggtaaagaagacaacggcgatttggtgctgacccaccgcatgccggggcgcatgttgcgcaccctcatcaatgacatgccgcggtgcattttcaccagtggcaccctcacggtatcggggcgttttgaccactttgtcaaagccatcggcctgaccgcagtggcacccgaaagccagcacattgaccccgtgcaacacggccaactgcgcgtggaggtggccagtgaggccctcaccccagaagcacaagccgaacgcatcatgcacgcggcgacaccggtattggtgctgaccaccagccacgcgactacggcggcgttgggctctttgtgccccggtgccatctgccgcgcacccggtgaagccctcatggatgcggtggcgcgatgccctgatgatggcatcttgatcgccgctggcgcctggtctggcctcgatgcgccgcgcctgcggtggcaaaccgtggtcatccccaaaacaccgtacggcaaaccactcatccttgacgcccagcagataagcgcttacgtggacagcaaggttgttgccatcaggcgcaccaaccaagggttacaccgtgggctgcgcaccaccgatgccacctgcaccttgctgttactcgatccggatagccgtcgtgccgatttacgtcaagccattccccgtcgtttcttggtggattgggacagcgtggccgagggctcgttggttttgcgcacgcacttcgcccgtgaacgaaaaaaaggtctgcgtgaaaaaaccctgagccggcgcgggcagcactgcgaacaccccggctgtacggccacccaagagcatttgctggaggtgcaccacctcaacccgattgccaacggcccccgcgacacagttactgatgacctgcgggtgctttgtaaaaatcaccacgcggatgcccaccaagccatgcgaaaagctgattttttaaaagtgaaaacaactgaaaagcgtgcagaggcagacacttaggccacagctggtcaagctacgccgtaaatgcgtagttactggaacttcgcgcgagtgcttagataggcttccatcggtcaagctacgccgtaaatgcgtagttactggaacttgcgtgtggtatcagttcagcgtggatcgggtcaagctacgccgtaaatgcgtagttactggaacgaagttcacgttgacactgccttggatacgggtcaagctacgccgtaaatgcgtagttactggaactggtagcggctgcttgttaagtaaggccgaggtcgtctggggtcaagctacgccgtaaaggcgtagttacttttagcagccagttttgctggttttaagcggtccaatggcccgacttgccgcccatcttttcaagcaggcgcacgcccgtcatggtcatgccgcggtcggcggctttgcacatgtcgtagatggtcagcaagccgacttgtacggcggtgagggcttccatttcaacacccgtggggccggtggtttcggcggtgacggtgcaatgaacatgggggggctggttaccggtggtgaaggccacgcgcacatggctgagtgccaagggatggcacaggggaatgaggtcagcggtgcgcttggaggcttgtatagccgccacgcgcgcaat

SEQ ID NO: 197 - DNA, 12267 bp, Artificial Sequence
  Synthetic Oligonucleotide
  misc_feature (1)..(9207): n is a, c, g, or t
nnnnnnnnnnnnnnnnnnnnnnnnnnnnnnnnnnnnnnnnnnnnnnnnnnnnnnnnnnnnnnnnnnnnnnnnnnnnnnnnnnnnnnnnnnnnnnnnnnnnnnnnnnnnnnnnnnnnnnnnnnnnnnnnnnnnnnnnnnnnnnnnnnnnnnnnnnnnnnnnnnnnnnnnnnnnnnnnnnnnnnnnnnnnnnnnnnnnnnnnnnnnnnnnnnnnnnnnnnnnnnnnnnnnnnnnnnnnnnnnnnnnnnnnnnnnnnnnnnnnnnnnnnnnnnnnnnnnnnnnnnnnnnnnnnnnnnnnnnnnnnnnnnnnnnnnnnnnnnnnnnnnnnnnnnnnnnnnnnnnnnnnnnnnnnnnnnnnnnnnnnnnnnnnnnnnnnnnnnnnnnnnnnnnnnnnnnnnnnnnnnnnnnnnnnnnnnnnnnnnnnnnnnnnnnnnnnnnnnnnnnnnnnnnnnnnnnnnnnnnnnnnnnnnnnnnnnnnnnnnnnnnnnnnnnnnnnnnnnnnnnnnnnnnnnnnnnnnnnnnnnnnnnnnnnnnnnnnnnnnnnnnnnnnnnnnnnnnnnnnnnnnnnnnnnnnnnnnnnnnnnnnnnnnnnnnnnnnnnnnnnnnnnnnnnnnnnnnnnnnnnnnnnnnnnnnnnnnnnnnnnnnnnnnnnnnnnnnnnnnnnnnnnnnnnnnnnnnnnnnnnnnnnnnnnnnnnnnnnnnnnnnnnnnnnnnnnnnnnnnnnnnnnnnnnnnnnnnnnnnnnnnnnnnnnnnnnnnnnnnnnnnnnnnnnnnnnnnnnnnnnnnnnnnnnnnnnnnnnnnnnnnnnnnnnnnnnnnnnnnnnnnnnnnnnnnnnnnnnnnnnnnnnnnnnnnnnnnnnnnnnnnnnnnnnnnnnnnnnnnnnnnnnnnnnnnnnnnnnnnnnnnnnnnnnnnnnnnnnnnnnnnnnnnnnnnnnnnnnnnnnnnnnnnnnnnnnnnnnnnnnnnnnnnnnnnnnnnnnnnnnnnnnnnnnnnnnnnnnnnnnnnnnnnnnnnnnnnnnnnnnnnnnnnnnnnnnnnnnnnnnnnnnnnnnnnnnnnnnnnnnnnnnnnnnnnnnnnnnnnnnnnnnnnnnnnnnnnnnnnnnnnnnnnnnnnnnnnnnnnnnnnnnnnnnnnnnnnnnnnnnnnnnnnnnnnnnnnnnnnnnnnnnnnnnnnnnnnnnnnnnnnnnnnnnnnnnnnnnnnnnnnnnnnnnnnnnnnnnnnnnnnnnnnnnnnnnnnnnnnnnnnnnnnnnnnnnnnnnnnnnnnnnnnnnnnnnnnnnnnnnnnnnnnnnnnnnnnnnnnnnnnnnnnnnnnnnnnnnnnnnnnnnnnnnnnnnnnnnnnnnnnnnnnnnnnnnnnnnnnnnnnnnnnnnnnnnnnnnnnnnnnnnnnnnnnnnnnnnnnnnnnnnnnnnnnnnnnnnnnnnnnnnnnnnnnnnnnnnnnnnnnnnnnnnnnnnnnnnnnnnnnnnnnnnnnnnnnnnnnnnnnnnnnnnnnnnnnnnnnnnnnnnnnnnnnnnnnnnnnnnnnnnnnnnnnnnnnnnnnnnnnnnnnnnnnnnnnnnnnnnnnnnnnnnnnnnnnnnnnnnnnnnnnnnnnnnnnnnnnnnnnnnnnnnnnnnnnnnnnnnnnnnnnnnnnnnnnnnnnnnnnnnnnnnnnnnnnnnnnnnnnnnnnnnnnnnnnnnnnnnnnnnnnnnnnnnnnnnnnnnnnnnnnnnnnnnnnnnnnnnnnnnnnnnnnnnnnnnnnnnnnnnnnnnnnnnnnnnnnnnnnnnnnnnnnnnnnnnnnnnnnnnnnnnnnnnnnnnnnnnnnnnnnnnnnnnnnnnnnnnnnnnnnnnnnnnnnnnnnnnnnnnnnnnnnnnnnnnnnnnnnnnnnnnnnnnnnnnnnnnnnnnnnnnnnnnnnnnnnnnnnnnnnnnnnnnnnnnnnnnnnnnnnnnnnnnnnnnnnnnnnnnnnnnnnnnnnnnnnnnnnnnnnnnnnnnnnnnnnnnnnnnnnnnnnnnnnnnnnnnnnnnnnnnnnnnnnnnnnnnnnnnnnnnnnnnnnnnnnnnnnnnnnnnnnnnnnnnnnnnnnnnnnnnnnnnnnnnnnnnnnnnnnnnnnnnnnnnnnnnnnnnnnnnnnnnnnnnnnnnnnnnnnnnnnnnnnnnnnnnnnnnnnnnnnnnnnnnnnnnnnnnnnnnnnnnnnnnnnnnnnnnnnnnnnnnnnnnnnnnnnnnnnnnnnnnnnnnnnnnnnnnnnnnnnnnnnnnnnnnnnnnnnnnnnnnnnnnnnnnnnnnnnnnnnnnnnnnnnnnnnnnnnnnnnnnnnnnnnnnnnnnnnnnnnnnnnnnnnnnnnnnnnnnnnnnnnnnnnnnnnnnnnnnnnnnnnnnnnnnnnnnnnnnnnnnnnnnnnnnnnnnnnnnnnnnnnnnnnnnnnnnnnnnnnnnnnnnnnnnnnnnnnnnnnnnnnnnnnnnnnnnnnnnnnnnnnnnnnnnnnnnnnnnnnnnnnnnnnnnnnnnnnnnnnnnnnnnnnnnnnnnnnnnnnnnnnnnnnnnnnnnnnnnnnnnnnnnnnnnnnnnnnnnnnnnnnnnnnnnnnnnnnnnnnnnnnnnnnnnnnnnnnnnnnnnnnnnnnnnnnnnnnnnnnnnnnnnnnnnnnnnnnnnnnnnnnnnnnnnnnnnnnnnnnnnnnnnnnnnnnnnnnnnnnnnnnnnnnnnnnnnnnnnnnnnnnnnnnnnnnnnnnnnnnnnnnnnnnnnnnnnnnnnnnnnnnnnnnnnnnnnnnnnnnnnnnnnnnnnnnnnnnnnnnnnnnnnnnnnnnnnnnnnnnnnnnnnnnnnnnnnnnnnnnnnnnnnnnnnnnnnnnnnnnnnnnnnnnnnnnnnnnnnnnnnnnnnnnnnnnnnnnnnnnnnnnnnnnnnnnnnnnnnnnnnnnnnnnnnnnnnnnnnnnnnnnnnnnnnnnnnnnnnnnnnnnnnnnnnnnnnnnnnnnnnnnnnnnnnnnnnnnnnnnnnnnnnnnnnnnnnnnnnnnnnnnnnnnnnnnnnnnnnnnnnnnnnnnnnnnnnnnnnnnnnnnnnnnnnnnnnnnnnnnnnnnnnnnnnnnnnnnnnnnnnnnnnnnnnnnnnnnnnnnnnnnnnnnnnnnnnnnnnnnnnnnnnnnnnnnnnnnnnnnnnnnnnnnnnnnnnnnnnnnnnnnnnnnnnnnnnnnnnnnnnnnnnnnnnnnnnnnnnnnnnnnnnnnnnnnnnnnnnnnnnnnnnnnnnnnnnnnnnnnnnnnnnnnnnnnnnnnnnnnnnnnnnnnnnnnnnnnnnnnnnnnnnnnnnnnnnnnnnnnnnnnnnnnnnnnnnnnnnnnnnnnnnnnnnnnnnnnnnnnnnnnnnnnnnnnnnnnnnnnnnnnnnnnnnnnnnnnnnnnnnnnnnnnnnnnnnnnnnnnnnnnnnnnnnnnnnnnnnnnnnnnnnnnnnnnnnnnnnnnnnnnnnnnnnnnnnnnnnnnnnnnnnnnnnnnnnnnnnnnnnnnnnnnnnnnnnnnnnnnnnnnnnnnnnnnnnnnnnnnnnnnnnnnnnnnnnnnnnnnnnnnnnnnnnnnnnnnnnnnnnnnnnnnnnnnnnnnnnnnnnnnnnnnnnnnnnnnnnnnnnnnnnnnnnnnnnnnnnnnnnnnnnnnnnnnnnnnnnnnnnnnnnnnnnnnnnnnnnnnnnnnnnnnnnnnnnnnnnnnnnnnnnnnnnnnnnnnnnnnnnnnnnnnnnnnnnnnnnnnnnnnnnnnnnnnnnnnnnnnnnnnnnnnnnnnnnnnnnnnnnnnnnnnnnnnnnnnnnnnnnnnnnnnnnnnnnnnnnnnnnnnnnnnnnnnnnnnnnnnnnnnnnnnnnnnnnnnnnnnnnnnnnnnnnnnnnnnnnnnnnnnnnnnnnnnnnnnnnnnnnnnnnnnnnnnnnnnnnnnnnnnnnnnnnnnnnnnnnnnnnnnnnnnnnnnnnnnnnnnnnnnnnnnnnnnnnnnnnnnnnnnnnnnnnnnnnnnnnnnnnnnnnnnnnnnnnnnnnnnnnnnnnnnnnnnnnnnnnnnnnnnnnnnnnnnnnnnnnnnnnnnnnnnnnnnnnnnnnnnnnnnnnnnnnnnnnnnnnnnnnnnnnnnnnnnnnnnnnnnnnnnnnnnnnnnnnnnnnnnnnnnnnnnnnnnnnnnnnnnnnnnnnnnnnnnnnnnnnnnnnnnnnnnnnnnnnnnnnnnnnnnnnnnnnnnnnnnnnnnnnnnnnnnnnnnnnnnnnnnnnnnnnnnnnnnnnnnnnnnnnnnnnnnnnnnnnnnnnnnnnnnnnnnnnnnnnnnnnnnnnnnnnnnnnnnnnnnnnnnnnnnnnnnnnnnnnnnnnnnnnnnnnnnnnnnnnnnnnnnnnnnnnnnnnnnnnnnnnnnnnnnnnnnnnnnnnnnnnnnnnnnnnnnnnnnnnnnnnnnnnnnnnnnnnnnnnnnnnnnnnnnnnnnnnnnnnnnnnnnnnnnnnnnnnnnnnnnnnnnnnnnnnnnnnnnnnnnnnnnnnnnnnnnnnnnnnnnnnnnnnnnnnnnnnnnnnnnnnnnnnnnnnnnnnnnnnnnnnnnnnnnnnnnnnnnnnnnnnnnnnnnnnnnnnnnnnnnnnnnnnnnnnnnnnnnnnnnnnnnnnnnnnnnnnnnnnnnnnnnnnnnnnnnnnnnnnnnnnnnnnnnnnnnnnnnnnnnnnnnnnnnnnnnnnnnnnnnnnnnnnnnnnnnnnnnnnnnnnnnnnnnnnnnnnnnnnnnnnnnnnnnnnnnnnnnnnnnnnnnnnnnnnnnnnnnnnnnnnnnnnnnnnnnnnnnnnnnnnnnnnnnnnnnnnnnnnnnnnnnnnnnnnnnnnnnnnnnnnnnnnnnnnnnnnnnnnnnnnnnnnnnnnnnnnnnnnnnnnnnnnnnnnnnnnnnnnnnnnnnnnnnnnnnnnnnnnnnnnnnnnnnnnnnnnnnnnnnnnnnnnnnnnnnnnnnnnnnnnnnnnnnnnnnnnnnnnnnnnnnnnnnnnnnnnnnnnnnnnnnnnnnnnnnnnnnnnnnnnnnnnnnnnnnnnnnnnnnnnnnnnnnnnnnnnnnnnnnnnnnnnnnnnnnnnnnnnnnnnnnnnnnnnnnnnnnnnnnnnnnnnnnnnnnnnnnnnnnnnnnnnnnnnnnnnnnnnnnnnnnnnnnnnnnnnnnnnnnnnnnnnnnnnnnnnnnnnnnnnnnnnnnnnnnnnnnnnnnnnnnnnnnnnnnnnnnnnnnnnnnnnnnnnnnnnnnnnnnnnnnnnnnnnnnnnnnnnnnnnnnnnnnnnnnnnnnnnnnnnnnnnnnnnnnnnnnnnnnnnnnnnnnnnnnnnnnnnnnnnnnnnnnnnnnnnnnnnnnnnnnnnnnnnnnnnnnnnnnnnnnnnnnnnnnnnnnnnnnnnnnnnnnnnnnnnnnnnnnnnnnnnnnnnnnnnnnnnnnnnnnnnnnnnnnnnnnnnnnnnnnnnnnnnnnnnnnnnnnnnnnnnnnnnnnnnnnnnnnnnnnnnnnnnnnnnnnnnnnnnnnnnnnnnnnnnnnnnnnnnnnnnnnnnnnnnnnnnnnnnnnnnnnnnnnnnnnnnnnnnnnnnnnnnnnnnnnnnnnnnnnnnnnnnnnnnnnnnnnnnnnnnnnnnnnnnnnnnnnnnnnnnnnnnnnnnnnnnnnnnnnnnnnnnnnnnnnnnnnnnnnnnnnnnnnnnnnnnnnnnnnnnnnnnnnnnnnnnnnnnnnnnnnnnnnnnnnnnnnnnnnnnnnnnnnnnnnnnnnnnnnnnnnnnnnnnnnnnnnnnnnnnnnnnnnnnnnnnnnnnnnnnnnnnnnnnnnnnnnnnnnnnnnnnnnnnnnnnnnnnnnnnnnnnnnnnnnnnnnnnnnnnnnnnnnnnnnnnnnnnnnnnnnnnnnnnnnnnnnnnnnnnnnnnnnnnnnnnnnnnnnnnnnnnnnnnnnnnnnnnnnnnnnnnnnnnnnnnnnnnnnnnnnnnnnnnnnnnnnnnnnnnnnnnnnnnnnnnnnnnnnnnnnnnnnnnnnnnnnnnnnnnnnnnnnnnnnnnnnnnnnnnnnnnnnnnnnnnnnnnnnnnnnnnnnnnnnnnnnnnnnnnnnnnnnnnnnnnnnnnnnnnnnnnnnnnnnnnnnnnnnnnnnnnnnnnnnnnnnnnnnnnnnnnnnnnnnnnnnnnnnnnnnnnnnnnnnnnnnnnnnnnnnnnnnnnnnnnnnnnnnnnnnnnnnnnnnnnnnnnnnnnnnnnnnnnnnnnnnnnnnnnnnnnnnnnnnnnnnnnnnnnnnnnnnnnnnnnnnnnnnnnnnnnnnnnnnnnnnnnnnnnnnnnnnnnnnnnnnnnnnnnnnnnnnnnnnnnnnnnnnnnnnnnnnnnnnnnnnnnnnnnnnnnnnnnnnnnnnnnnnnnnnnnnnnnnnnnnnnnnnnnnnnnnnnnnnnnnnnnnnnnnnnnnnnnnnnnnnnnnnnnnnnnnnnnnnnnnnnnnnnnnnnnnnnnnnnnnnnnnnnnnnnnnnnnnnnnnnnnnnnnnnnnnnnnnnnnnnnnnnnnnnnnnnnnnnnnnnnnnnnnnnnnnnnnnnnnnnnnnnnnnnnnnnnnnnnnnnnnnnnnnnnnnnnnnnnnnnnnnnnnnnnnnnnnnnnnnnnnnnnnnnnnnnnnnnnnnnnnnnnnnnnnnnnnnnnnnnnnnnnnnnnnnnnnnnnnnnnnnnnnnnnnnnnnnnnnnnnnnnnnnnnnnnnnnnnnnnnnnnnnnnnnnnnnnnnnnnnnnnnnnnnnnnnnnnnnnnnnnnnnnnnnnnnnnnnnnnnnnnnnnnnnnnnnnnnnnnnnnnnnnnnnnnnnnnnnnnnnnnnnnnnnnnnnnnnnnnnnnnnnnnnnnnnnnnnnnnnnnnnnnnnnnnnnnnnnnnnnnnnnnnnnnnnnnnnnnnnnnnnnnnnnnnnnnnnnnnnnnnnnnnnnnnnnnnnnnnnnnnnnnnnnnnnnnnnnnnnnnnnnnnnnnnnnnnnnnnnnnnnnnnnnnnnnnnnnnnnnnnnnnnnnnnnnnnnnnnnnnnnnnnnnnnnnnnnnnnnnnnnnnnnnnnnnnnnnnnnnnnnnnnnnnnnnnnnnnnnnnnnnnnnnnnnnnnnnnnnnnnnnnnnnnnnnnnnnnnnnnnnnnnnnnnnnnnnnnnnnnnnnnnnnnnnnnnnnnnnnnnnnnnnnnnnnnnnnnnnnnnnnnnnnnnnnnnnnnnnnnnnnnnnnnnnnnnnnnnnnnnnnnnnnnnnnnnnnnnnnnnnnnnnnnnnnnnnnnnnnnnnnnnnnnnnnnnnnnnnnnnnnnnnnnnnnnnnnnnnnnnnnnnnnnnnnnnnnnnnnnnnnnnnnnnnnnnnnnnnnnnnnnnnnnnnnnnnnnnnnnnnnnnnnnnnnnnnnnnnnnnnnnnnnnnnnnnnnnnnnnnnnnnnnnnnnnnnnnnnnnnnnnnnnnnnnnnnnnnnnnnnnnnnnnnnnnnnnnnnnnnnnnnnnnnnnnnnnnnnnnnnnnnnnnnnnnnnnnnnnnnnnnnnnnnnnnnnnnnnnnnnnnnnnnnnnnnnnnnnnnnnnnnnnnnnnnnnnnnnnnnnnnnnnnnnnnnnnnnnnnnnnnnnnnnnnnnnnnnnnnnnnnnnnnnnnnnnnnnnnnnnnnnnnnnnnnnnnnnnnnnnnnnnnnnnnnnnnnnnnnnnnnnnnnnnnnnnnnnnnnnnnnnnnnnnnnnnnnnnnnnnnnnnnnnnnnnnnnnnnnnnnnnnnnnnnnnnnnnnnnnnnnnnnnnnnnnnnnnnnnnnnnnnnnnnnnnnnnnnnnnnnnnnnnnnnnnnnnnnnnnnnnnnnnnnnnnnnnnnnnnnnnnnnnnnnnnnnnnnnnnnnnnnnnnnnnnnnnnnnnnnnnnnnnnnnnnnnnnnnnnnnnnnnnnnnnnnnnnnnnnnnnnnnnnnnnnnnnnnnnnnnnnnnnnnnnnnnnnnnnnnnnnnnnnnnnnnnnnnnnnnnnnnnnnnnnnnnnnnnnnnnnnnnnnnnnnnnnnnnnnnnnnnnnnnnnnnnnnnnnnnnnnnnnnnnnnnnnnnnnnnnnnnnnnnnnnnnnnnnnnnnnnnnnnnnnnnnnnnnnnnnnnnnnnnnnnnnnnnnnnnnnnnnnnnnnnnnnnnnnnnnnnnnnnnnnnnnnnnnnnnnnnnnnnnnnnnnnnnnnnnnnnnnnnnnnnnnnnnnnnnnnnnnnnnnnnnnnnnnnnnnnnnnnnnnnnnnnnnnnnnnnnnnnnnnnnnnnnnnnnnnnnnnnnnnnnnnnnnnnnnnnnnnnnnnnnnnnnnnnnnnnnnnnnnnnnnnnnnnnnnnnnnnnnnnnnnnnnnnnnnnnnnnnnnnnnnnnnnnnnnnnnnnnnnnnnnnnnnnnnnnnnnnnnnnnnnnnnnnnnnnnnnnnnnnnnnnnnnnnnnnnnnnnnnnnnnnnnnnnnnnnnnnnnnnnnnnnnnnnnnnnnnnnnnnnnnnnnnnnnnnnnnnnnnnnnnnnnnnnnnnnnnnnnnnnnnnnnnnnnnnnnnnnnnnnnnnnnnnnnnnnnnnnnnnnnnnnnnnnnnnnnnnnnnnnnnnnnnnnnnnnnnnnnnnnnnnnnnnnnnnnnnnnnnnnnnnnnnnnnnnnnnnnnnnnnnnnnnnnnnnnnnnnnnnnnnnnnnnnnnnnnnnnnnnnnnnnnnnnnnnnnnnnnnnnnnnnnnnnnnnnnnnnnnnnnnnnnnnnnnnnnnnnnnnnnnnnnnnnnnnnnnnnnnnnnnnnnnnnnnnnnnnnnnnnnnnnnnnnnnnnnnnnnnnnnnnnnnnnnnnnnnnnnnnnnnnnnnnnnnnnnnnnnnnnnnnnnnnnnnnnnnnnnnnnnnnnnnnnnnnnnnnnnnnnnnnnnnnnnnnnnnnnnnnnnnnnnnnnnnnnnnnnnnnnnnnnnnnnnnnnnnnnnnnnnnnnnnnnnnnnnnnnnnnnnnnnnnnnnnnnnnnnnnnnnnnnnnnnnnnnnnnnnnnnnnnnnnnnnnnnnnnnnnnnnnnnnnnnnnnnnnnnnnnnnnnnnnnnnnnnnnnnnnnnnnnnnnnnnnnnnnnnnnnnnnnnnnnnnnnnnnnnnnnnnnnnnnnnnnnnnnnnnnnnnnnnnnnnnnnnnnnnnnnnnnnnnnnnnnnnnnnnnnnnnnnnnnnnnnnnnnnnnnnnnnnnnnnnnnnnnnnnnnnnnnnnnnnnnnnnnnnnnnnnnnnnnnnnnnnnnnnnnnnnnnnnnnnnnnnnnnnnnnnnnnnnnnnnnnnnnnnnnnnnnnnnagctgcgccaggcgaagaaggccggcgacgtcacggcggagcttgaacgcgcccacgccgaggcgctggccatcgtcgcgcgctacgagtcggaaatgggcgacatgaccaactcctcgcgcaccctgaccacctactacgccctgcccgccggcatcgaactcaagggacgcctcgtcgtcgagcttgcgcgcgagcgtgatctgccgatgctcgaactggcgctgaacgcattgtcgctgcgccccgttctcggcgcccagctcgcccgcggctgcggcgagatcgcagggcgtttcgacgtgctgatcgacggcgccctcgcccgcaagatcgccatcggcggctggcaggcggcaaccgtgacggatttttccggagacgatcttgctggaacggccgcctgatccggtgttcgcgatgcgctactcaagccacccggcaaatgggtggttactagaaccggttgagggtcggcgtgtagcgtacgaatgctcaagccaccctgcaaatgggtggttactagaacatgtgcctgctgcgccgcgccgggctgatcgctcaagccaccctgcaaatgggtggttaccagaacgagcgcggcggcacctatgcgctgctggtgactcaagccaccctgtgaatgggtggttactagaacgtctggtccttgacgtaccggagtgcgtatgcttaagccaccctgcgaatgggtggttactggaatttgaagctgttccccttgcagttcggtgtaccctaatccagcccgtcgtagcgcattgacccaccatgttccgttcggttgaacagcaaacctacgcaaccattgtcgccaggcacatggcggtcgccgacgcctcgctgcttctcgaaggcgggaccggcattggcaagacgcgcgcttacctgtcggcgctggtgcgctcgggccgccgggtggcgatcgtcctcccgacgcatcaactcatcgaccagttgctgggctccggcgaccttcgggcaacccgcggcgacgccaccgtcgccgccttccgtccggcgcgcatgttcgaacgtcacgccgactacgaggccggcaagcgggccgcgatggacgcacaggtcatgctgtgcaccgcggccagcgtcatcatcgaccaccgcctcggcggcgaatacaacggcgccatcgaccgcgactacctgctcttcgacgaagccgaccagttgccggaaatggcggcgctacagagcgacttcaccatcacggccggcgaactcgccgccatgggcatccgcagcgacgacgtgcgggcggcgctgcatgcgatcctggccagacggccgcgcgtcgtcgaacccgagacccgggccgccgccaggatcatcctcgaagcaatcgacgaaccggcctggtatcagtccgccggactgagcgacgaaggcgacatcatgctgacgcaccgcctgcccggtcgcctgctgaagaagatcagcaaccgcggcaacgtcgcgttcgtctcggccacgctcaccgtcggcgggcgtttcgacgatttccggaacgccatgggcatcggacagatcagccacttgtcggacacgatcgagccgacgcagcatggcaccctcgactttcacatgatcccgatgacggtcgacacccccgagtggatcgccgccgtcgttgaggcggcgcgtgctgcgccgcccccggtgctggtcgccacgacgtcgcacgacctgtccgaaatgctcggcgaacaactgcccggcgctatcgtccgcaccgccaacgagatggcatcgcaggccgccgaacgggtcggcaacgacggcacgttgatttccgccggcgcctgggccggcctcgataccccgctccgctggcgctcgatcgtcgtgccgcgcgttccctttggccagccgatcgtcatcgacggcgaagtgacgacaagttatttcgatgcccgcaacacggcagttcgccggctgcggcaggtcatcggtcgcggcctgcgcaccccggacgccgtgtgcagcgtctatctcgtggatgcctgggcggaaaaactgaacggctttgttccaacccgctttgctacgtcatgggcaagccgcaccttctccgagggcgcccggcaggaagtcgttctgtccaaggccgaacgcagcgcggcggtacgccacgccgcgctcaggcattacgggcgcaagtgcatggcaccggattgcacctcagtcgtcagggatgtttcccaactcgaggtgcaccatctcgacccgattaccgagggccagcgcaagacgacattggctgacctggtcgttctctgcgccaactgccaccgcctcgcccatgcccgcatgcgcgcggcgtcaaaaggcaagccgcagtgaacgccgcaccggccctgttgcggtcgacgccgtaaaacaggcaaattccgcgcgccacctgttcgcctcgctgttcagcggctgatttcgacgacgacccgcccgcgcaccttgccttcgagcaggcgggcgccggtggcgatggcttccgagaggccgatttcgttcgtcatggcatcgagcttggcgatgtcgagatcgcgggcgaggcgcacccaggcttcctgacgcaccgccagcggcgccatgacgctgtcgatgccgtacagcgtcacgccgcgcaggatgaacggcgccaccgtcgccgggaaatccatgccgccggccaggccgcaggcggccacggcgccgcgatacttcgtcgtcgcgcaggcattggccagcgtctggctgcccaccgtatcgacgacgcctgcccagcgttccttgcccagcggcttgcccggcgcggacagttcgccgcgctcgatgacctcggtcgcccccagcgctttcaggtgttcggcctcggcgagacggccggtcgacgccaccaccgtgtagccgagtttcgacagcagcgcgatggccacgccgccgacgccgccattggccccggtgaccagaatttcgccgtcggccggccggatgccatgcctttcgagcgccagcacgcagagcatcgccgtgtaaccggcg

SEQ ID NO: 198 - DNA, 12267 bp, Artificial Sequence; identical to SEQ ID NO: 197
  Synthetic Oligonucleotide
  misc_feature (1)..(9207): n is a, c, g, or t

SEQ ID NO: 199 - DNA, 12243 bp, Artificial Sequence
  Synthetic Oligonucleotide
  misc_feature (1)..(7102): n is a, c, g, or t
nnnnnnnnnnnnnnnnnnnnnnnnnnnnnnnnnnnnnnnnnnnnnnnnnnnnnnnnnnnnnnnnnnnnnnnnnnnnnnnnnnnnnnnnnnnnnnnnnnnnnnnnnnnnnnnnnnnnnnnnnnnnnnnnnnnnnnnnnnnnnnnnnnnnnnnnnnnnnnnnnnnnnnnnnnnnnnnnnnnnnnnnnnnnnnnnnnnnnnnnnnnnnnnnnnnnnnnnnnnnnnnnnnnnnnnnnnnnnnnnnnnnnnnnnnnnnnnnnnnnnnnnnnnnnnnnnnnnnnnnnnnnnnnnnnnnnnnnnnnnnnnnnnnnnnnnnnnnnnnnnnnnnnnnnnnnnnnnnnnnnnnnnnnnnnnnnnnnnnnnnnnnnnnnnnnnnnnnnnnnnnnnnnnnnnnnnnnnnnnnnnnnnnnnnnnnnnnnnnnnnnnnnnnnnnnnnnnnnnnnnnnnnnnnnnnnnnnnnnnnnnnnnnnnnnnnnnnnnnnnnnnnnnnnnnnnnnnnnnnnnnnnnnnnnnnnnnnnnnnnnnnnnnnnnnnnnnnnnnnnnnnnnnnnnnnnnnnnnnnnnnnnnnnnnnnnnnnnnnnnnnnnnnnnnnnnnnnnnnnnnnnnnnnnnnnnnnnnnnnnnnnnnnnnnnnnnnnnnnnnnnnnnnnnnnnnnnnnnnnnnnnnnnnnnnnnnnnnnnnnnnnnnnnnnnnnnnnnnnnnnnnnnnnnnnnnnnnnnnnnnnnnnnnnnnnnnnnnnnnnnnnnnnnnnnnnnnnnnnnnnnnnnnnnnnnnnnnnnnnnnnnnnnnnnnnnnnnnnnnnnnnnnnnnnnnnnnnnnnnnnnnnnnnnnnnnnnnnnnnnnnnnnnnnnnnnnnnnnnnnnnnnnnnnnnnnnnnnnnnnnnnnnnnnnnnnnnnnnnnnnnnnnnnnnnnnnnnnnnnnnnnnnnnnnnnnnnnnnnnnnnnnnnnnnnnnnnnnnnnnnnnnnnnnnnnnnnnnnnnnnnnnnnnnnnnnnnnnnnnnnnnnnnnnnnnnnnnnnnnnnnnnnnnnnnnnnnnnnnnnnnnnnnnnnnnnnnnnnnnnnnnnnnnnnnnnnnnnnnnnnnnnnnnnnnnnnnnnnnnnnnnnnnnnnnnnnnnnnnnnnnnnnnnnnnnnnnnnnnnnnnnnnnnnnnnnnnnnnnnnnnnnnnnnnnnnnnnnnnnnnnnnnnnnnnnnnnnnnnnnnnnnnnnnnnnnnnnnnnnnnnnnnnnnnnnnnnnnnnnnnnnnnnnnnnnnnnnnnnnnnnnnnnnnnnnnnnnnnnnnnnnnnnnnnnnnnnnnnnnnnnnnnnnnnnnnnnnnnnnnnnnnnnnnnnnnnnnnnnnnnnnnnnnnnnnnnnnnnnnnnnnnnnnnnnnnnnnnnnnnnnnnnnnnnnnnnnnnnnnnnnnnnnnnnnnnnnnnnnnnnnnnnnnnnnnnnnnnnnnnnnnnnnnnnnnnnnnnnnnnnnnnnnnnnnnnnnnnnnnnnnnnnnnnnnnnnnnnnnnnnnnnnnnnnnnnnnnnnnnnnnnnnnnnnnnnnnnnnnnnnnnnnnnnnnnnnnnnnnnnnnnnnnnnnnnnnnnnnnnnnnnnnnnnnnnnnnnnnnnnnnnnnnnnnnnnnnnnnnnnnnnnnnnnnnnnnnnnnnnnnnnnnnnnnnnnnnnnnnnnnnnnnnnnnnnnnnnnnnnnnnnnnnnnnnnnnnnnnnnnnnnnnnnnnnnnnnnnnnnnnnnnnnnnnnnnnnnnnnnnnnnnnnnnnnnnnnnnnnnnnnnnnnnnnnnnnnnnnnnnnnnnnnnnnnnnnnnnnnnnnnnnnnnnnnnnnnnnnnnnnnnnnnnnnnnnnnnnnnnnnnnnnnnnnnnnnnnnnnnnnnnnnnnnnnnnnnnnnnnnnnnnnnnnnnnnnnnnnnnnnnnnnnnnnnnnnnnnnnnnnnnnnnnnnnnnnnnnnnnnnnnnnnnnnnnnnnnnnnnnnnnnnnnnnnnnnnnnnnnnnnnnnnnnnnnnnnnnnnnnnnnnnnnnnnnnnnnnnnnnnnnnnnnnnnnnnnnnnnnnnnnnnnnnnnnnnnnnnnnnnnnnnnnnnnnnnnnnnnnnnnnnnnnnnnnnnnnnnnnnnnnnnnnnnnnnnnnnnnnnnnnnnnnnnnnnnnnnnnnnnnnnnnnnnnnnnnnnnnnnnnnnnnnnnnnnnnnnnnnnnnnnnnnnnnnnnnnnnnnnnnnnnnnnnnnnnnnnnnnnnnnnnnnnnnnnnnnnnnnnnnnnnnnnnnnnnnnnnnnnnnnnnnnnnnnnnnnnnnnnnnnnnnnnnnnnnnnnnnnnnnnnnnnnnnnnnnnnnnnnnnnnnnnnnnnnnnnnnnnnnnnnnnnnnnnnnnnnnnnnnnnnnnnnnnnnnnnnnnnnnnnnnnnnnnnnnnnnnnnnnnnnnnnnnnnnnnnnnnnnnnnnnnnnnnnnnnnnnnnnnnnnnnnnnnnnnnnnnnnnnnnnnnnnnnnnnnnnnnnnnnnnnnnnnnnnnnnnnnnnnnnnnnnnnnnnnnnnnnnnnnnnnnnnnnnnnnnnnnnnnnnnnnnnnnnnnnnnnnnnnnnnnnnnnnnnnnnnnnnnnnnnnnnnnnnnnnnnnnnnnnnnnnnnnnnnnnnnnnnnnnnnnnnnnnnnnnnnnnnnnnnnnnnnnnnnnnnnnnnnnnnnnnnnnnnnnnnnnnnnnnnnnnnnnnnnnnnnnnnnnnnnnnnnnnnnnnnnnnnnnnnnnnnnnnnnnnnnnnnnnnnnnnnnnnnnnnnnnnnnnnnnnnnnnnnnnnnnnnnnnnnnnnnnnnnnnnnnnnnnnnnnnnnnnnnnnnnnnnnnnnnnnnnnnnnnnnnnnnnnnnnnnnnnnnnnnnnnnnnnnnnnnnnnnnnnnnnnnnnnnnnnnnnnnnnnnnnnnnnnnnnnnnnnnnnnnnnnnnnnnnnnnnnnnnnnnnnnnnnnnnnnnnnnnnnnnnnnnnnnnnnnnnnnnnnnnnnnnnnnnnnnnnnnnnnnnnnnnnnnnnnnnnnnnnnnnnnnnnnnnnnnnnnnnnnnnnnnnnnnnnnnnnnnnnnnnnnnnnnnnnnnnnnnnnnnnnnnnnnnnnnnnnnnnnnnnnnnnnnnnnnnnnnnnnnnnnnnnnnnnnnnnnnnnnnnnnnnnnnnnnnnnnnnnnnnnnnnnnnnnnnnnnnnnnnnnnnnnnnnnnnnnnnnnnnnnnnnnnnnnnnnnnnnnnnnnnnnnnnnnnnnnnnnnnnnnnnnnnnnnnnnnnnnnnnnnnnnnnnnnnnnnnnnnnnnnnnnnnnnnnnnnnnnnnnnnnnnnnnnnnnnnnnnnnnnnnnnnnnnnnnnnnnnnnnnnnnnnnnnnnnnnnnnnnnnnnnnnnnnnnnnnnnnnnnnnnnnnnnnnnnnnnnnnnnnnnnnnnnnnnnnnnnnnnnnnnnnnnnnnnnnnnnnnnnnnnnnnnnnnnnnnnnnnnnnnnnnnnnnnnnnnnnnnnnnnnnnnnnnnnnnnnnnnnnnnnnnnnnnnnnnnnnnnnnnnnnnnnnnnnnnnnnnnnnnnnnnnnnnnnnnnnnnnnnnnnnnnnnnnnnnnnnnnnnnnnnnnnnnnnnnnnnnnnnnnnnnnnnnnnnnnnnnnnnnnnnnnnnnnnnnnnnnnnnnnnnnnnnnnnnnnnnnnnnnnnnnnnnnnnnnnnnnnnnnnnnnnnnnnnnnnnnnnnnnnnnnnnnnnnnnnnnnnnnnnnnnnnnnnnnnnnnnnnnnnnnnnnnnnnnnnnnnnnnnnnnnnnnnnnnnnnnnnnnnnnnnnnnnnnnnnnnnnnnnnnnnnnnnnnnnnnnnnnnnnnnnnnnnnnnnnnnnnnnnnnnnnnnnnnnnnnnnnnnnnnnnnnnnnnnnnnnnnnnnnnnnnnnnnnnnnnnnnnnnnnnnnnnnnnnnnnnnnnnnnnnnnnnnnnnnnnnnnnnnnnnnnnnnnnnnnnnnnnnnnnnnnnnnnnnnnnnnnnnnnnnnnnnnnnnnnnnnnnnnnnnnnnnnnnnnnnnnnnnnnnnnnnnnnnnnnnnnnnnnnnnnnnnnnnnnnnnnnnnnnnnnnnnnnnnnnnnnnnnnnnnnnnnnnnnnnnnnnnnnnnnnnnnnnnnnnnnnnnnnnnnnnnnnnnnnnnnnnnnnnnnnnnnnnnnnnnnnnnnnnnnnnnnnnnnnnnnnnnnnnnnnnnnnnnnnnnnnnnnnnnnnnnnnnnnnnnnnnnnnnnnnnnnnnnnnnnnnnnnnnnnnnnnnnnnnnnnnnnnnnnnnnnnnnnnnnnnnnnnnnnnnnnnnnnnnnnnnnnnnnnnnnnnnnnnnnnnnnnnnnnnnnnnnnnnnnnnnnnnnnnnnnnnnnnnnnnnnnnnnnnnnnnnnnnnnnnnnnnnnnnnnnnnnnnnnnnnnnnnnnnnnnnnnnnnnnnnnnnnnnnnnnnnnnnnnnnnnnnnnnnnnnnnnnnnnnnnnnnnnnnnnnnnnnnnnnnnnnnnnnnnnnnnnnnnnnnnnnnnnnnnnnnnnnnnnnnnnnnnnnnnnnnnnnnnnnnnnnnnnnnnnnnnnnnnnnnnnnnnnnnnnnnnnnnnnnnnnnnnnnnnnnnnnnnnnnnnnnnnnnnnnnnnnnnnnnnnnnnnnnnnnnnnnnnnnnnnnnnnnnnnnnnnnnnnnnnnnnnnnnnnnnnnnnnnnnnnnnnnnnnnnnnnnnnnnnnnnnnnnnnnnnnnnnnnnnnnnnnnnnnnnnnnnnnnnnnnnnnnnnnnnnnnnnnnnnnnnnnnnnnnnnnnnnnnnnnnnnnnnnnnnnnnnnnnnnnnnnnnnnnnnnnnnnnnnnnnnnnnnnnnnnnnnnnnnnnnnnnnnnnnnnnnnnnnnnnnnnnnnnnnnnnnnnnnnnnnnnnnnnnnnnnnnnnnnnnnnnnnnnnnnnnnnnnnnnnnnnnnnnnnnnnnnnnnnnnnnnnnnnnnnnnnnnnnnnnnnnnnnnnnnnnnnnnnnnnnnnnnnnnnnnnnnnnnnnnnnnnnnnnnnnnnnnnnnnnnnnnnnnnnnnnnnnnnnnnnnnnnnnnnnnnnnnnnnnnnnnnnnnnnnnnnnnnnnnnnnnnnnnnnnnnnnnnnnnnnnnnnnnnnnnnnnnnnnnnnnnnnnnnnnnnnnnnnnnnnnnnnnnnnnnnnnnnnnnnnnnnnnnnnnnnnnnnnnnnnnnnnnnnnnnnnnnnnnnnnnnnnnnnnnnnnnnnnnnnnnnnnnnnnnnnnnnnnnnnnnnnnnnnnnnnnnnnnnnnnnnnnnnnnnnnnnnnnnnnnnnnnnnnnnnnnnnnnnnnnnnnnnnnnnnnnnnnnnnnnnnnnnnnnnnnnnnnnnnnnnnnnnnnnnnnnnnnnnnnnnnnnnnnnnnnnnnnnnnnnnnnnnnnnnnnnnnnnnnnnnnnnnnnnnnnnnnnnnnnnnnnnnnnnnnnnnnnnnnnnnnnnnnnnnnnnnnnnnnnnnnnnnnnnnnnnnnnnnnnnnnnnnnnnnnnnnnnnnnnnnnnnnnnnnnnnnnnnnnnnnnnnnnnnnnnnnnnnnnnnnnnnnnnnnnnnnnnnnnnnnnnnnnnnnnnnnnnnnnnnnnnnnnnnnnnnnnnnnnnnnnnnnnnnnnnnnnnnnnnnnnnnnnnnnnnnnnnnnnnnnnnnnnnnnnnnnnnnnnnnnnnnnnnnnnnnnnnnnnnnnnnnnnnnnnnnnnnnnnnnnnnnnnnnnnnnnnnnnnnnnnnnnnnnnnnnnnnnnnnnnnnnnnnnnnnnnnnnnnnnnnnnnnnnnnnnnnnnnnnnnnnnnnnnnnnnnnnnnnnnnnnnnnnnnnnnnnnnnnnnnnnnnnnnnnnnnnnnnnnnnnnnnnnnnnnnnnnnnnnnnnnnnnnnnnnnnnnnnnnnnnnnnnnnnnnnnnnnnnnnnnnnnnnnnnnnnnnnnnnnnnnnnnnnnnnnnnnnnnnnnnnnnnnnnnnnnnnnnnnnnnnnnnnnnnnnnnnnnnnnnnnnnnnnnnnnnnnnnnnnnnnnnnnnnnnnnnnnnnnnnnnnnnnnnnnnnnnnnnnnnnnnnnnnnnnnnnnnnnnnnnnnnnnnnnnnnnnnnnnnnnnnnnnnnnnnnnnnnnnnnnnnnnnnnnnnnnnnnnnnnnnnnnnnnnnnnnnnnnnnnnnnnnnnnnnnnnnnnnnnnnnnnnnnnnnnnnnnnnnnnnnnnnnnnnnnnnnnnnnnnnnnnnnnnnnnnnnnnnnnnnnnnnnnnnnnnnnnnnnnnnnnnnnnnnnnnnnnnnnnnnnnnnnnnnnnnnnnnnnnnnnnnnnnnnnnnnnnnnnnnnnnnnnnnnnnnnnnnnnnnnnnnnnnnnnnnnnnnnnnnnnnnnnnnnnnnnnnnnnnnnnnnnnnnnnnnnnnnnnnnnnnnnnnnnnnnnnnnnnnnnnnnnnnnnnnnnnnnnnnnnnnnnnnnnnnnnnnnnnnnnnnnnnnnnnnnnnnnnnnnnnnnnnnnnnnnnnnnnnnnnnnnnnnnnnnnnnnnnnnnnnnnnnnnnnnnnnnnnnnnnnnnnnnnnnnnnnnnnnnnnnnnnnnnnnnnnnnnnnnnnnnnnnnnnnnnnnnnnnnnnnnnnnnnnnnnnnnnnnnnnnnnnnnnnnnnnnnnnnnnnnnnnnnnnnnnnnnnnnnnnnnnnnnnnnnnnnnnnnnnnnnnnnnnnnnnnnnnnnnnnnnnnnnnnnnnnnnnnnnnnnnnnnnnnnnnnnnnnnnnnnnnnnnnnnnnnnnnnnnnnnnnnnnnnnnnnnnnnnnnnnnnnnnnnnnnnnnnnnnnnnnnnnnnnnnnnnnnnnnnnnnnnnnnnnnnnnnnnnnnnnnnnnnnnnnnnnnnnnnnnnnnnnnnnnnnnnnnnnnnnnnnnnnnnnnnnnnnnnnnnnnnnnnnnnnnnnnnnnnnnnnnnnnnnnnnnnnnnnnnnnnnnnnnnnnnnnnnnnnnnnnnnnnnnnnnnnnnnnnnnnnnnnnnnnnnnnnnnnnnnnnnnnnnnnnnnnnnnnnnnnnnnnnnnnnnnnnnnnnnnnnnnnnnnnnnnnnnnnnnnnnnnnnnnnnnnnnnnnnnnnnnnnnnnnnnnnnnnnnnnnnnnnnnnnnnnnnnnnnnnnnnnnnnnnnnnncgtgatgccggtaacgtggtcaatagttatgacgcaagggtatcctcatccgtcgtgtggtacgccaccggcgacaagaatgccgtgctggaggtgctgcgcgaagtgaagttcatcggaaaacggcgcgcttctggctacggcgaagttatccattgggaagcagaagacggcgaactcgacggactggtcggctatctcaacgaccccctgcgccccattcccgcccaccgctggacagaaggcggtgaccagatcgccatcgatacggcatggaagccaccctattgggcaatcgagaaccgagccaagtgcttcgcaccggaggtcgcttgaacagtgctgagttctttatgaggtactgcggcgacaagttgcttccggtcgaattgagatcaggcaatgacgtcaaggacgccgcaaccgtactggcgatgagtcatccgctctataccggtaagacgctccgtctatccagttgctggatggtcatcacagcgaccggagtgaccacatgtttcaaggcgcacccttccaccggattcgatacaagcgggaaggtcaaatacaaggacgccgtcgatgctgcgctcaaacaaggggattgcatgttgctcgaattaaacaaacggtcaatgacaccggcatacctattcattacctacgacccacgggcgaaacggttatgcaaacccggcaaggtcgaaacttctgatgccacctcggagaaaacatggacaccgtaattgacaagccagcgcggattaccggctacgcgctgcaccgtatcgtcgagcagcatcagcagggcgtgccggccttgtggtcagatgaagggagtcagctacgcatccggccaagggcagccaatgcgccggtctatgaggtggggaagttgcttggattcacggtgaccgcgtgtgtctcgttcaaatgccacggcaagcaccgctatctgccgctggatgactggcctggtcgcaaggtctggctggagaagagagccgaaaagcacggttttcagattgtcggcgtgcatgttgaacccaagatgcagagggtcgaaacgcacgacgggcgcaagttccggctggacgcgaccgatttcaccggcctcctgcgggtgaccgatcccgtgaagttcagcaaggcattgaccgatggtatcggcgtggtcggcaaggcattcggactcaacctgttaatcgtgcagtaattctttgaaccggagaacaagcgtgaagaacattttcggcaacatcaccatcaccaccgttaatcccgtgtcattcagtcaccacagtcaggaaggtctgccgatgatgactcgcggcgttgatgccgagggcaggcacctcaagacagtattcctgccggcggcaggcttgcgtgggcgcatccgccatgaggtcgcgatgtcagtgcttgagcgcgaaggcaaagccaagctggggcgcgcctacatgctggcgttggggcagtcgaccgatggtcgcgtcgaggatgaaggcgacgtgcaatacaaaattggggagcaacttgccctgcgcgagaaggagcctgtggtcgatctgtttggcacctggaagatcaatagccgcttgcaggtcagtcacctgatgcctgcggtgaatgtccagccggatatcttcagcttcattcggcgtgatctggacagcaacgaagagatgttcgcattgttcgatgcaagtgagcaggacgccttctatggtcgacagactacgctgtcgcaagcgtccaaggcaggcgacatgatcaaggtggcgaccagcgcgctgatgaaggcgaagaaagccaaggccccgcaggaagagaccaatgcgctggaagccaaggttgccgaactgaaggcactcaagaccgctcacaaggacgaggcagggggcgacggcaacaacagcaagcatttgctggaagtcgaggcgatccctgcgggtatcgatctgcttggcagcattgttgtgaagaatgccaaatcacgcgaccttgaaatgctgatcgaagcgtttgatcgcatcagtcaaaagcccaaggtgggtgcgcatacggcacgggggtgcggcgaagtgacgggtaacgccaccttcacgaacgacgacggcgaggtgctggcagttgtacgttttggtggatacaagaaagccgctgtcgagtggacaaaaaccggaaaggactacattgcagcgtgatgatcttggcgactttttggatgccgtttgacctgagtcaaggaatcatggtgattcggttgatcagatggagagccccttgtttgtggggttactagaatcgtgaaaccgcttgccctgctggcccagagatggagagcccccttgtttgaggggttactagaatggctgggtgtcgaaggtgttgccgggcacggatggagagcccccttgtgtggttactagaacggcatcggtacggctgacgtgcaaaccttcaatggagagccccctagtttgtggggttactagaaccggtagtcgcgcaccaccggcacactggcggatggagagcctccttgttgtggggttactagaacgcgatggaagcctgggcgcgcgatctgggtgatatagagccccctggtatgtggggttactagaacaacggttgggggtgccagtgctatgtggtggatgtagagcccctgtggggttactagaactagttgcgcgggatgaaagctccatgggttgatggagagcccccttttttgtggggttgctagaaccgcttgacgacgtgggtgtagatcatggtcgatggagagccccctgtttatggggttactagaacatgccgtatgcatcccccatggcgtagtcggatggagagccccttgtttgtggggttactagaactccgggatgatgccggcggcagcgtggtcgaatggagagcccccttgtctgtggggttattttaggattatcggcatgtacagaagcaaagaacaagcgcaatacgcgaagctgattaccgatgcaatcggtgtcggtgcgcctctgctcgcgggtgccgccgccggtctgggtaagacacacgggtacaccatcccgctggtgaccagtggcaagcgtgtcgcgatcagcatgtcaacacggcagttgatcgagcagtacatgcagtctgatgcgctcaagtcggcgctggaacgatcacccaccacggtcgccgtcctgcgttcgcgccgcgagttcgacagcagcaaggactaccgcgaacacaaggaacaggcactcgcggcacaggtgctggtggtaacgcacgccgccgcgctgatcgatagcttcaatcctgactatgccgatctgcggaaccgtgatgtcgtcctgttcgatgaggccgatctgctcgccgacgccgccgacctgcgctcgactttcgccatcgacggacaaggtaatgccgaccgcgatgccgtgctgcgtcgggcagagcggtctgatgatccagaggaacgtgcggcagcaagcgccatccgctacgccattgagcatccagcgttctacaaggtggtggggtttgacgacgatggcacgctgatgctcaagcaccggatgcccgggcggatgctcaagccattggtgcaggactgcaaacggatcatcttcaccagcggtacgctgcaagtgaatgggcgattcgactacttcattcgcgccattggactgaccgctattgatccgtccagccgacacattgacccagttcagcatggcaatctgaccgtcgagatcacgtctgacgacttgaccgccgagcagaaggcgcaatcgatcatggcggcagaacgtccctgccttgtgctgaccaccagtcatgccgatacagaggcgttaggcacactggtatccggcgcggtggtgcgcggaaaaggtgagccgctggcagatgcagtggcacgatgcccagcagatgccatcctgattgctgcaggcgcatggagcggtctggacgagccgaggttgcgttggaagactgtggtgatacccaaggctccgtatggcgcgccgaccgagatcgacggccagcagatcacgcactacatcgacagcaaggtgacggcgaccaggcgcatcaaccaaggtctgcaccgtgggctgcggacacaggaggcggtctgcaaattgatgctgctcgatccgcgttgcaaccgtccagagttactcgcggcgataccggcgcggtttagcgtgcagtcattcagcgagggtcagcgcgttgagttggtactgagcaaggccgagcgcgatccgctgctgagaaaggcggcattaaaggtacatggcgcggtgtgtgccgactgcggcgacatcaccctgcatcgccttgacgtccatcacctgaatcctgtcagcgagggtcagcgcaggacgacggtcaaggatgttgtggtggtctgcaagaactgccacgcagatcggcatcatgcgatgcgtgacaaccttggcgaactcgccacggtatctctgttgaattgaacagacatacggcagagcggagcgggtgaatcgtggctctggtgcgactggcgtgacacggtcgcgcagtacgccgagatgatctaggggaagacggtatatgctccttcaatagacgttcgacgaacataacgttggacagcgcggccaacggacgcaacaaaacacattggcaatgtgtatcgccctgtgattgcatgctgtatgtatgaatttgtcacgatcctgaaaggatggtggcgtccccacggggattcgaaccccggtacctaccgtgaaagggtagtgtcctaggcctctagacgatggggacctggacgacggtgtgaaccgtctgattttactgctacgacttgcgtcgttactgcttgttggaaagctgcgttaaggtgacgccgagtaacagtccgacgaagcccaatggtaccagcccgagccagacttcggccagttcgacaccatgcagcattttccaaaatccgactatcagtccgacgatgcttagaatcaaccccagcaaagtggtgatgacgcctagtttatgcatcgaacttcctgtttgttggtggaggtaagcgggatcgaaccgctgacctcttgcatgccatgcaagcgctctcccagccg

SEQ ID NO: 200 - DNA, 12229 bp, Artificial Sequence
  Synthetic Oligonucleotide
  misc_feature (1)..(4866): n is a, c, g, or t
nnnnnnnnnnnnnnnnnnnnnnnnnnnnnnnnnnnnnnnnnnnnnnnnnnnnnnnnnnnnnnnnnnnnnnnnnnnnnnnnnnnnnnnnnnnnnnnnnnnnnnnnnnnnnnnnnnnnnnnnnnnnnnnnnnnnnnnnnnnnnnnnnnnnnnnnnnnnnnnnnnnnnnnnnnnnnnnnnnnnnnnnnnnnnnnnnnnnnnnnnnnnnnnnnnnnnnnnnnnnnnnnnnnnnnnnnnnnnnnnnnnnnnnnnnnnnnnnnnnnnnnnnnnnnnnnnnnnnnnnnnnnnnnnnnnnnnnnnnnnnnnnnnnnnnnnnnnnnnnnnnnnnnnnnnnnnnnnnnnnnnnnnnnnnnnnnnnnnnnnnnnnnnnnnnnnnnnnnnnnnnnnnnnnnnnnnnnnnnnnnnnnnnnnnnnnnnnnnnnnnnnnnnnnnnnnnnnnnnnnnnnnnnnnnnnnnnnnnnnnnnnnnnnnnnnnnnnnnnnnnnnnnnnnnnnnnnnnnnnnnnnnnnnnnnnnnnnnnnnnnnnnnnnnnnnnnnnnnnnnnnnnnnnnnnnnnnnnnnnnnnnnnnnnnnnnnnnnnnnnnnnnnnnnnnnnnnnnnnnnnnnnnnnnnnnnnnnnnnnnnnnnnnnnnnnnnnnnnnnnnnnnnnnnnnnnnnnnnnnnnnnnnnnnnnnnnnnnnnnnnnnnnnnnnnnnnnnnnnnnnnnnnnnnnnnnnnnnnnnnnnnnnnnnnnnnnnnnnnnnnnnnnnnnnnnnnnnnnnnnnnnnnnnnnnnnnnnnnnnnnnnnnnnnnnnnnnnnnnnnnnnnnnnnnnnnnnnnnnnnnnnnnnnnnnnnnnnnnnnnnnnnnnnnnnnnnnnnnnnnnnnnnnnnnnnnnnnnnnnnnnnnnnnnnnnnnnnnnnnnnnnnnnnnnnnnnnnnnnnnnnnnnnnnnnnnnnnnnnnnnnnnnnnnnnnnnnnnnnnnnnnnnnnnnnnnnnnnnnnnnnnnnnnnnnnnnnnnnnnnnnnnnnnnnnnnnnnnnnnnnnnnnnnnnnnnnnnnnnnnnnnnnnnnnnnnnnnnnnnnnnnnnnnnnnnnnnnnnnnnnnnnnnnnnnnnnnnnnnnnnnnnnnnnnnnnnnnnnnnnnnnnnnnnnnnnnnnnnnnnnnnnnnnnnnnnnnnnnnnnnnnnnnnnnnnnnnnnnnnnnnnnnnnnnnnnnnnnnnnnnnnnnnnnnnnnnnnnnnnnnnnnnnnnnnnnnnnnnnnnnnnnnnnnnnnnnnnnnnnnnnnnnnnnnnnnnnnnnnnnnnnnnnnnnnnnnnnnnnnnnnnnnnnnnnnnnnnnnnnnnnnnnnnnnnnnnnnnnnnnnnnnnnnnnnnnnnnnnnnnnnnnnnnnnnnnnnnnnnnnnnnnnnnnnnnnnnnnnnnnnnnnnnnnnnnnnnnnnnnnnnnnnnnnnnnnnnnnnnnnnnnnnnnnnnnnnnnnnnnnnnnnnnnnnnnnnnnnnnnnnnnnnnnnnnnnnnnnnnnnnnnnnnnnnnnnnnnnnnnnnnnnnnnnnnnnnnnnnnnnnnnnnnnnnnnnnnnnnnnnnnnnnnnnnnnnnnnnnnnnnnnnnnnnnnnnnnnnnnnnnnnnnnnnnnnnnnnnnnnnnnnnnnnnnnnnnnnnnnnnnnnnnnnnnnnnnnnnnnnnnnnnnnnnnnnnnnnnnnnnnnnnnnnnnnnnnnnnnnnnnnnnnnnnnnnnnnnnnnnnnnnnnnnnnnnnnnnnnnnnnnnnnnnnnnnnnnnnnnnnnnnnnnnnnnnnnnnnnnnnnnnnnnnnnnnnnnnnnnnnnnnnnnnnnnnnnnnnnnnnnnnnnnnnnnnnnnnnnnnnnnnnnnnnnnnnnnnnnnnnnnnnnnnnnnnnnnnnnnnnnnnnnnnnnnnnnnnnnnnnnnnnnnnnnnnnnnnnnnnnnnnnnnnnnnnnnnnnnnnnnnnnnnnnnnnnnnnnnnnnnnnnnnnnnnnnnnnnnnnnnnnnnnnnnnnnnnnnnnnnnnnnnnnnnnnnnnnnnnnnnnnnnnnnnnnnnnnnnnnnnnnnnnnnnnnnnnnnnnnnnnnnnnnnnnnnnnnnnnnnnnnnnnnnnnnnnnnnnnnnnnnnnnnnnnnnnnnnnnnnnnnnnnnnnnnnnnnnnnnnnnnnnnnnnnnnnnnnnnnnnnnnnnnnnnnnnnnnnnnnnnnnnnnnnnnnnnnnnnnnnnnnnnnnnnnnnnnnnnnnnnnnnnnnnnnnnnnnnnnnnnnnnnnnnnnnnnnnnnnnnnnnnnnnnnnnnnnnnnnnnnnnnnnnnnnnnnnnnnnnnnnnnnnnnnnnnnnnnnnnnnnnnnnnnnnnnnnnnnnnnnnnnnnnnnnnnnnnnnnnnnnnnnnnnnnnnnnnnnnnnnnnnnnnnnnnnnnnnnnnnnnnnnnnnnnnnnnnnnnnnnnnnnnnnnnnnnnnnnnnnnnnnnnnnnnnnnnnnnnnnnnnnnnnnnnnnnnnnnnnnnnnnnnnnnnnnnnnnnnnnnnnnnnnnnnnnnnnnnnnnnnnnnnnnnnnnnnnnnnnnnnnnnnnnnnnnnnnnnnnnnnnnnnnnnnnnnnnnnnnnnnnnnnnnnnnnnnnnnnnnnnnnnnnnnnnnnnnnnnnnnnnnnnnnnnnnnnnnnnnnnnnnnnnnnnnnnnnnnnnnnnnnnnnnnnnnnnnnnnnnnnnnnnnnnnnnnnnnnnnnnnnnnnnnnnnnnnnnnnnnnnnnnnnnnnnnnnnnnnnnnnnnnnnnnnnnnnnnnnnnnnnnnnnnnnnnnnnnnnnnnnnnnnnnnnnnnnnnnnnnnnnnnnnnnnnnnnnnnnnnnnnnnnnnnnnnnnnnnnnnnnnnnnnnnnnnnnnnnnnnnnnnnnnnnnnnnnnnnnnnnnnnnnnnnnnnnnnnnnnnnnnnnnnnnnnnnnnnnnnnnnnnnnnnnnnnnnnnnnnnnnnnnnnnnnnnnnnnnnnnnnnnnnnnnnnnnnnnnnnnnnnnnnnnnnnnnnnnnnnnnnnnnnnnnnnnnnnnnnnnnnnnnnnnnnnnnnnnnnnnnnnnnnnnnnnnnnnnnnnnnnnnnnnnnnnnnnnnnnnnnnnnnnnnnnnnnnnnnnnnnnnnnnnnnnnnnnnnnnnnnnnnnnnnnnnnnnnnnnnnnnnnnnnnnnnnnnnnnnnnnnnnnnnnnnnnnnnnnnnnnnnnnnnnnnnnnnnnnnnnnnnnnnnnnnnnnnnnnnnnnnnnnnnnnnnnnnnnnnnnnnnnnnnnnnnnnnnnnnnnnnnnnnnnnnnnnnnnnnnnnnnnnnnnnnnnnnnnnnnnnnnnnnnnnnnnnnnnnnnnnnnnnnnnnnnnnnnnnnnnnnnnnnnnnnnnnnnnnnnnnnnnnnnnnnnnnnnnnnnnnnnnnnnnnnnnnnnnnnnnnnnnnnnnnnnnnnnnnnnnnnnnnnnnnnnnnnnnnnnnnnnnnnnnnnnnnnnnnnnnnnnnnnnnnnnnnnnnnnnnnnnnnnnnnnnnnnnnnnnnnnnnnnnnnnnnnnnnnnnnnnnnnnnnnnnnnnnnnnnnnnnnnnnnnnnnnnnnnnnnnnnnnnnnnnnnnnnnnnnnnnnnnnnnnnnnnnnnnnnnnnnnnnnnnnnnnnnnnnnnnnnnnnnnnnnnnnnnnnnnnnnnnnnnnnnnnnnnnnnnnnnnnnnnnnnnnnnnnnnnnnnnnnnnnnnnnnnnnnnnnnnnnnnnnnnnnnnnnnnnnnnnnnnnnnnnnnnnnnnnnnnnnnnnnnnnnnnnnnnnnnnnnnnnnnnnnnnnnnnnnnnnnnnnnnnnnnnnnnnnnnnnnnnnnnnnnnnnnnnnnnnnnnnnnnnnnnnnnnnnnnnnnnnnnnnnnnnnnnnnnnnnnnnnnnnnnnnnnnnnnnnnnnnnnnnnnnnnnnnnnnnnnnnnnnnnnnnnnnnnnnnnnnnnnnnnnnnnnnnnnnnnnnnnnnnnnnnnnnnnnnnnnnnnnnnnnnnnnnnnnnnnnnnnnnnnnnnnnnnnnnnnnnnnnnnnnnnnnnnnnnnnnnnnnnnnnnnnnnnnnnnnnnnnnnnnnnnnnnnnnnnnnnnnnnnnnnnnnnnnnnnnnnnnnnnnnnnnnnnnnnnnnnnnnnnnnnnnnnnnnnnnnnnnnnnnnnnnnnnnnnnnnnnnnnnnnnnnnnnnnnnnnnnnnnnnnnnnnnnnnnnnnnnnnnnnnnnnnnnnnnnnnnnnnnnnnnnnnnnnnnnnnnnnnnnnnnnnnnnnnnnnnnnnnnnnnnnnnnnnnnnnnnnnnnnnnnnnnnnnnnnnnnnnnnnnnnnnnnnnnnnnnnnnnnnnnnnnnnnnnnnnnnnnnnnnnnnnnnnnnnnnnnnnnnnnnnnnnnnnnnnnnnnnnnnnnnnnnnnnnnnnnnnnnnnnnnnnnnnnnnnnnnnnnnnnnnnnnnnnnnnnnnnnnnnnnnnnnnnnnnnnnnnnnnnnnnnnnnnnnnnnnnnnnnnnnnnnnnnnnnnnnnnnnnnnnnnnnnnnnnnnnnnnnnnnnnnnnnnnnnnnnnnnnnnnnnnnnnnnnnnnnnnnnnnnnnnnnnnnnnnnnnnnnnnnnnnnnnnnnnnnnnnnnnnnnnnnnnnnnnnnnnnnnnnnnnnnnnnnnnnnnnnnnnnnnnnnnnnnnnnnnnnnnnnnnnnnnnnnnnnnnnnnnnnnnnnnnnnnnnnnnnnnnnnnnnnnnnnnnnnnnnnnnnnnnnnnnnnnnnnnnnnnnnnnnnnnnnnnnnnnnnnnnnnnnnnnnnnnnnnnnnnnnnnnnnnnnnnnnnnnnnnnnnnnnnnnnnnnnnnnnnnnnnnnnnnnnnnnnnnnnnnnnnnnnnnnnnnnnnnnnnnnnnnnnnnnnnnnnnnnnagggcttgcataggcagtttttttgtcctaaatcctcgcccagtgcccctatagctcagctggtagagcaactgatttgtaatcagtaggtccgcggttcgagtccgtgtgggggcaccataaaatcaaagacttacgttaaatcaattattagtgctgtccgctggggaaactcaggggaaacaattgcgtttgttaagcctcttcccaatcctatttagatgatcataacttaacgttgagcagggggctagaatggaaaaaatattgaaactgtttggccaaaaactttttattatgtccatcttcatttttagtctgaatgtttcaatggctcataccaaatccttggacgaaattaagttgcttccaccagataggattaccgagctcgccaagatgggaaacccagatgctcagtactggcttggggaattaatttacaatggtgccatatcaaattggcacgacttaaggcatttaatgatgccctattgggaggatgcgatgcggcaggggcatgcaatggctacctacagattacttgagtgggtcaggggcggtgctgtgccagatgatatggctaaacttaagtcatcagagattaaattatatctcagtaaactcgctaatgcaggtgaagccaaagctaacatgatattgtttcgggatacgttatccgattttgtaaataaacgaaatacttctggtgagactgataatcttttaaaaagaactgcagataaatatctaattcgtgcttacgaaattggatcgagagacgctgcatatcggtatgcgatcatgttgtcttatggcagcatatctataccgcaggatcattctttagctgtaacaatttttgaagaagcctacgcaatggagccagatgaaccaaaaagagacgatggcagtttatcctgttcaatattaattatactttctgattattatggaggtcagtttctagttgatggtgaaaattactctggcgaagcggacgatgcatcttaccttcatacattatctaaaagcgtgaaagattcttgtccgatcttgatgttccgttactccacttacttaatggaaaacggggaggctgatgattatttcgacgcttatctcgtagctctagatgctttagatatcgctaaagctgatcatcttgctaccgattatatgtacgatttactgggaacgctagctctgaaactaaatgagccgctcaaagcgaaagagcatttttcaaaaatgaaagatgagcagtatattgaatggttatttaatgaatatttgggtggtggtctaaaactttgtagcgcgctggatgtttcaaaaaatgagtgcagggcttttatttttaattgagaaattcagcatagttatttttgtgtaaaaaatttcaaacaaagatgttaaacatttaaatgaaatattagacgtagtcgtattttaatctaattgctctgctagttgtgaagtgaagggtgccagtaaatattagatcctttacacgggtaactccgatatcgcggtggatggggctggggttcgttagggaaaaattactttggcagattctcaatggtagaggggggggcaaaaaacagccgcccctttctagtgatgggtgttgctctcacatttttgactgagaatgctctatgaaataattaatacgattttcaaataaatttttagtagatttctagtatcttttcgatactctctaataacctgagcaccagctgtagcaatcaaatcttgcggtgaattttatttatgtttgaacaagtgaaaattgaggcaacccttcgtactccgattattattcaggggtatatgacatttgatgcgctattaggtgcattactgtttgagcggctacaggatgtcgacaaaacgcactccagcattccaattcaatgtgatgatgggctgttttatgcttctgcagctcaggttgaagtcattgatcgtggtggtttggcaattgctgctaatctgagggcccagcatgacttgaacccaaatcatgtaaagaaaagtcgtgatggctcaaaactgcacaaaagtttaggattgaagcgccgtagacagtttggagcagttctaaataaatacagaacaatcactgtaaattctatcagttgggatgtgactggcgatattaaccagattgaagacttgcttaatgatgctttttttatcggcaaaaaaagaacagcaggttatggtgaagttataagttgggacttcaagaacagtgaaacagacggtctcatagatgcgcaaggacaggcactaaggcctattccggtagaacgttttaatggtgataagtctttgccaataattgataccgcttggaagcctgcttattggaatcctgagaacaggtcagcctgttatgctcctgagcctgtctcatgaatacatttgtttttctccgggagcattttgctagatatgttttgcctgatcttagcaatgacgcagtcgcagactgcaaacgtgcactcacgatgaaccatctccttgttaccggaaagtcggggaggttaagcggttgggtaatggttaaaaaagataaaacctatatccaagccaaaattgcagcaaagcatgcaaaccttataaccgccgatccacgtacccggtatgaagcatggtatgaggagctcgaaaatttttcaggacctacctgctttatagaatttacaaagagtacctttaatattggcaatatctttttgacccatgatgcgcgagttgtaaaaatttgtgggccagcttcgtctcaaacattcaattataccgatgaaccaaacgaagcttctggtgtagcacataaagtgctcgccaagatgcggagaaaaaatgctgtttgattataaaatattaaaatctgatgcaaaaaatgcctatgacttgcatcagcttgtcgctgccacctttaagggtgagagtggcagaaatttgttctgtgattacggcgaccacatacgtgtgcggagcacaaagcacactctaaatgcgaaacaaggtgtcgccgttactgtgcctgccgtcggcgcaatagctttcattgaattgcgagcatcctgttatgtgtctgggggaggaaaaaaatatttcctgatgcaaggtgattggagagccaggcatacctggcttgaaaaaaagagcgcccaaagtggcttttcggttttaaatgtaacctgtcaatcagaactgatgaaaatcccaaagccaggtgcacagttcacgcttgattgcaccgactttgctgcatgcatcaagatcaatgacatagaaaaattcgaaactgccttgcgcgatggaattggatcgaaaggcagagcgtttggttttggaatgcttgttttatgaataatatggagacaatgaaatggtaaatacgatctttaatatggttctaacatctgagcagcctttgagtatcacgctacccgtggccgagtacactcgggcaaataaatttgctaactctccagttatgacccgagggctcgacgcggaaggtgcgaagcaagaaacatgttacattcctgctacgacttttcgcggaatgctcaggcgtcatgtggttgtcccgctgatggaggagcgagccagaaacggtgatcactatactttggatgaagcctaccgtgatttgattgggcaggatgctgccagcgaacaacagccagatgaaattgatctgatggctttaaaaaatatgcgtgcacaaaatccaattgtcgatttgtttggtctcggtttgggtgttcaatcacgcctaaaagtcagtcactttcttccagagcataatattttgccagaggtatttaccaccgctcgaaaggacttaggcgatgcagacgatggtgcaatactggacttggttcgcgatgaagagagagaaaaatatctcaaaagagccaacgcaaattcaaagagatctgctgcagaaagccttctggcgcggctggtgaagcagaagaaaaaggacggttcatcagcagacttggatgctcaaatagttgcgacagaaagtaaggttgaagagtaccgtgatgcgatggatggcatgaccaattcttctcggaccatacttacgcattacgccatgcctgcgggtgtacagtggacgggacgtttaattattacaaactccactgaaaaagatatcgatgctctgtgtggagccttagatcgtttcagtagctatccgatgattggtgcccagcatgcccgtggatgcggtgagattagtggtattgctaatatagaaacagatagaaggctggttaaaagaattagttttggtggctttgcgccagcacaaatagacaacgtagcctaggatgaaggagctaatcatacattttttatattggaaatgcggttaaagttaacttttctaaatggttatgaaaactctgttgtggcccccattaatttgtggggcaactgaaactcgaaggtctgtattgtacggtcatagaaggttgtggcccccatttatttgtggggcaactgaaaccataaccctgacaccttctattggactaatgctgcggcccccagtagtttgaggggcaactgaaacatggagcaacaactaataaaaacactactggttgtggcccccattaatttgtggggcaactgaaacaagtcggtggccagttgggtgttgtaggatgttgtggcccccattaatttgtggggcaactgaaacgatggcttcacgcaagttatagcagccgatgttgtggcccccattaatttgtggggcaactgaaactctgcaccgaagcggatcttttgccgccccgttgtggcccccattaatttgtggggcaactgaaaccgccgcgtacccggccttatttctgcgatgttgtggcccccattaatttgtggggcaactgaaacaagatggcttgcccaggtgcgccagcctgccgttgtggcccccatcgatatgtggggcaaaataaagagagccaagcatgctagttttggctctctttaacgtaacgcaccatatgaagttggatttaactagtgtttaattcacacttttggttaggtttactaactcaaagtggaaaatcggggatgatcagaatttttagatcggaagagcaagatcagttttttaagctgatccaaaaacatatagaaacccctgatgcacctttactgctggaaggagccactggactgggtaaaacgctgccgttccttgttgccgcagcggtaagtggtaaaaaggttgcgatagttttcccaacccatcagctgatcaatcaggctttggatagctgggacttaaaagcaacacttgcggcctatcccgcagtgattgtgaaggcctttagacctaggtcatatttcgaagcctcacctgcagattacgcggcacacaaacaagaagcgttagacgcagacataatgttctgcacctcggtatccgtgatcatagaccaaagactcaatggcgattataatggctcaacagacagagatgtgattatctttgatgaggcagatcagcttcctcaatttgctgctttgacctctgatatttcactcagcagaattgatctaagaagcctcagaattaatgaatcttcgccaaaagagaccattgatgcaatcttcaaaaagaagacattgccgtcagaaatcagggcaaaggcgcgcttgatagaagaagcgttaggccttggcgatgtttggtttattaaggtgggttttgcggatgatggagccttagaggtgcgctcacgcttgcctggaaggctgttaaaacgcgtatccaaccgagcatcgacaatttttataagcgcaaccctgtctgtaaatggtacatttaaagacttttgtcgtgcgatgggaatagaagagaagagtagactgtctgcaatagttgagcccaagaaacatggggacctaaaatttgattttataactgatgaagagcttggaagcgatgcttggctggacgcagtttgtgaagcaattgaatatgccgatcatcctgtactggtcgctacaccgtcgcattctttagctcaacagattgcaagtaatgctactcaggcgaccttaagagccgcggatgaaacaacgtcgcaagctgctgcgcgtatgggagatacaaaggttctcatagcagcgggtgcatgggcagggcttgatacgccggtacaatggaaaacggttgtggtacctagaataccctacactgggccaaacaatctcagagagttttggtatgatgatgaagaggactttggcgtccagaagccagatccgatgtcatcttttatagattcaaaaaatgctgcggctcgtaggctgaagcaggtctttggcagaggcttaagaacacccgatgccgaatgctcaataatactttgcgacccgcgaattgatcgttttaataagattgcaccagccagatttcagaaaacgtattttgagggaatggccatttcagttaatgcaacaaaatctgaacgttcgcctctgcttagaaaagcagcactcgctcattatggtgaaacctgcatggcctgtgactttattcctgagtctttaaggcaattagaaatccaccatcttgagccccttgctgatcgtgggccaagccacacgaccctgaatgacgtcgtggtattgtgcagaaactgccacggtttggcacatgacactaatccgcccatacagttgccagagcttaaattacgatctcaaaagttgaaaaagaaaagacctggattgtccatgatttaaagatttcgattttcctgtacgctggtatccattaagttaaccagtcaatttggctgatcccaaacaacaattgtttgatgaatagccccagttttttgccgtactgacataccactgacacgtgactgcgcatacgcactggctaagtaactaggttttaacgaaattggatagaattttgttaaaacggaatgtcgtcgttatcaaacgaattaatatccgcaattggtggagtgttggcgttttggaaattaactgactgtgagctgttagcgtcgttaccattgcgtgaaactttccacgccttaacatccgtgtaccaacgcccattatattctcggctctccagatcgattgaaacctcaacggtttctccctgctggatattaaactgatcaatcttatcaccccaagccatgaagcagactttcttggggtattgggcctcagtctccagaacatactcttgcttgcgccattctccattcgctgactgtccggatttaacttccaatatttcaacaatcttccctgaaatttccaaagt

SEQ ID NO: 201 - DNA, 12202 bp, Artificial Sequence
  Synthetic Oligonucleotide
  misc_feature (1)..(6976): n is a, c, g, or t
nnnnnnnnnnnnnnnnnnnnnnnnnnnnnnnnnnnnnnnnnnnnnnnnnnnnnnnnnnnnnnnnnnnnnnnnnnnnnnnnnnnnnnnnnnnnnnnnnnnnnnnnnnnnnnnnnnnnnnnnnnnnnnnnnnnnnnnnnnnnnnnnnnnnnnnnnnnnnnnnnnnnnnnnnnnnnnnnnnnnnnnnnnnnnnnnnnnnnnnnnnnnnnnnnnnnnnnnnnnnnnnnnnnnnnnnnnnnnnnnnnnnnnnnnnnnnnnnnnnnnnnnnnnnnnnnnnnnnnnnnnnnnnnnnnnnnnnnnnnnnnnnnnnnnnnnnnnnnnnnnnnnnnnnnnnnnnnnnnnnnnnnnnnnnnnnnnnnnnnnnnnnnnnnnnnnnnnnnnnnnnnnnnnnnnnnnnnnnnnnnnnnnnnnnnnnnnnnnnnnnnnnnnnnnnnnnnnnnnnnnnnnnnnnnnnnnnnnnnnnnnnnnnnnnnnnnnnnnnnnnnnnnnnnnnnnnnnnnnnnnnnnnnnnnnnnnnnnnnnnnnnnnnnnnnnnnnnnnnnnnnnnnnnnnnnnnnnnnnnnnnnnnnnnnnnnnnnnnnnnnnnnnnnnnnnnnnnnnnnnnnnnnnnnnnnnnnnnnnnnnnnnnnnnnnnnnnnnnnnnnnnnnnnnnnnnnnnnnnnnnnnnnnnnnnnnnnnnnnnnnnnnnnnnnnnnnnnnnnnnnnnnnnnnnnnnnnnnnnnnnnnnnnnnnnnnnnnnnnnnnnnnnnnnnnnnnnnnnnnnnnnnnnnnnnnnnnnnnnnnnnnnnnnnnnnnnnnnnnnnnnnnnnnnnnnnnnnnnnnnnnnnnnnnnnnnnnnnnnnnnnnnnnnnnnnnnnnnnnnnnnnnnnnnnnnnnnnnnnnnnnnnnnnnnnnnnnnnnnnnnnnnnnnnnnnnnnnnnnnnnnnnnnnnnnnnnnnnnnnnnnnnnnnnnnnnnnnnnnnnnnnnnnnnnnnnnnnnnnnnnnnnnnnnnnnnnnnnnnnnnnnnnnnnnnnnnnnnnnnnnnnnnnnnnnnnnnnnnnnnnnnnnnnnnnnnnnnnnnnnnnnnnnnnnnnnnnnnnnnnnnnnnnnnnnnnnnnnnnnnnnnnnnnnnnnnnnnnnnnnnnnnnnnnnnnnnnnnnnnnnnnnnnnnnnnnnnnnnnnnnnnnnnnnnnnnnnnnnnnnnnnnnnnnnnnnnnnnnnnnnnnnnnnnnnnnnnnnnnnnnnnnnnnnnnnnnnnnnnnnnnnnnnnnnnnnnnnnnnnnnnnnnnnnnnnnnnnnnnnnnnnnnnnnnnnnnnnnnnnnnnnnnnnnnnnnnnnnnnnnnnnnnnnnnnnnnnnnnnnnnnnnnnnnnnnnnnnnnnnnnnnnnnnnnnnnnnnnnnnnnnnnnnnnnnnnnnnnnnnnnnnnnnnnnnnnnnnnnnnnnnnnnnnnnnnnnnnnnnnnnnnnnnnnnnnnnnnnnnnnnnnnnnnnnnnnnnnnnnnnnnnnnnnnnnnnnnnnnnnnnnnnnnnnnnnnnnnnnnnnnnnnnnnnnnnnnnnnnnnnnnnnnnnnnnnnnnnnnnnnnnnnnnnnnnnnnnnnnnnnnnnnnnnnnnnnnnnnnnnnnnnnnnnnnnnnnnnnnnnnnnnnnnnnnnnnnnnnnnnnnnnnnnnnnnnnnnnnnnnnnnnnnnnnnnnnnnnnnnnnnnnnnnnnnnnnnnnnnnnnnnnnnnnnnnnnnnnnnnnnnnnnnnnnnnnnnnnnnnnnnnnnnnnnnnnnnnnnnnnnnnnnnnnnnnnnnnnnnnnnnnnnnnnnnnnnnnnnnnnnnnnnnnnnnnnnnnnnnnnnnnnnnnnnnnnnnnnnnnnnnnnnnnnnnnnnnnnnnnnnnnnnnnnnnnnnnnnnnnnnnnnnnnnnnnnnnnnnnnnnnnnnnnnnnnnnnnnnnnnnnnnnnnnnnnnnnnnnnnnnnnnnnnnnnnnnnnnnnnnnnnnnnnnnnnnnnnnnnnnnnnnnnnnnnnnnnnnnnnnnnnnnnnnnnnnnnnnnnnnnnnnnnnnnnnnnnnnnnnnnnnnnnnnnnnnnnnnnnnnnnnnnnnnnnnnnnnnnnnnnnnnnnnnnnnnnnnnnnnnnnnnnnnnnnnnnnnnnnnnnnnnnnnnnnnnnnnnnnnnnnnnnnnnnnnnnnnnnnnnnnnnnnnnnnnnnnnnnnnnnnnnnnnnnnnnnnnnnnnnnnnnnnnnnnnnnnnnnnnnnnnnnnnnnnnnnnnnnnnnnnnnnnnnnnnnnnnnnnnnnnnnnnnnnnnnnnnnnnnnnnnnnnnnnnnnnnnnnnnnnnnnnnnnnnnnnnnnnnnnnnnnnnnnnnnnnnnnnnnnnnnnnnnnnnnnnnnnnnnnnnnnnnnnnnnnnnnnnnnnnnnnnnnnnnnnnnnnnnnnnnnnnnnnnnnnnnnnnnnnnnnnnnnnnnnnnnnnnnnnnnnnnnnnnnnnnnnnnnnnnnnnnnnnnnnnnnnnnnnnnnnnnnnnnnnnnnnnnnnnnnnnnnnnnnnnnnnnnnnnnnnnnnnnnnnnnnnnnnnnnnnnnnnnnnnnnnnnnnnnnnnnnnnnnnnnnnnnnnnnnnnnnnnnnnnnnnnnnnnnnnnnnnnnnnnnnnnnnnnnnnnnnnnnnnnnnnnnnnnnnnnnnnnnnnnnnnnnnnnnnnnnnnnnnnnnnnnnnnnnnnnnnnnnnnnnnnnnnnnnnnnnnnnnnnnnnnnnnnnnnnnnnnnnnnnnnnnnnnnnnnnnnnnnnnnnnnnnnnnnnnnnnnnnnnnnnnnnnnnnnnnnnnnnnnnnnnnnnnnnnnnnnnnnnnnnnnnnnnnnnnnnnnnnnnnnnnnnnnnnnnnnnnnnnnnnnnnnnnnnnnnnnnnnnnnnnnnnnnnnnnnnnnnnnnnnnnnnnnnnnnnnnnnnnnnnnnnnnnnnnnnnnnnnnnnnnnnnnnnnnnnnnnnnnnnnnnnnnnnnnnnnnnnnnnnnnnnnnnnnnnnnnnnnnnnnnnnnnnnnnnnnnnnnnnnnnnnnnnnnnnnnnnnnnnnnnnnnnnnnnnnnnnnnnnnnnnnnnnnnnnnnnnnnnnnnnnnnnnnnnnnnnnnnnnnnnnnnnnnnnnnnnnnnnnnnnnnnnnnnnnnnnnnnnnnnnnnnnnnnnnnnnnnnnnnnnnnnnnnnnnnnnnnnnnnnnnnnnnnnnnnnnnnnnnnnnnnnnnnnnnnnnnnnnnnnnnnnnnnnnnnnnnnnnnnnnnnnnnnnnnnnnnnnnnnnnnnnnnnnnnnnnnnnnnnnnnnnnnnnnnnnnnnnnnnnnnnnnnnnnnnnnnnnnnnnnnnnnnnnnnnnnnnnnnnnnnnnnnnnnnnnnnnnnnnnnnnnnnnnnnnnnnnnnnnnnnnnnnnnnnnnnnnnnnnnnnnnnnnnnnnnnnnnnnnnnnnnnnnnnnnnnnnnnnnnnnnnnnnnnnnnnnnnnnnnnnnnnnnnnnnnnnnnnnnnnnnnnnnnnnnnnnnnnnnnnnnnnnnnnnnnnnnnnnnnnnnnnnnnnnnnnnnnnnnnnnnnnnnnnnnnnnnnnnnnnnnnnnnnnnnnnnnnnnnnnnnnnnnnnnnnnnnnnnnnnnnnnnnnnnnnnnnnnnnnnnnnnnnnnnnnnnnnnnnnnnnnnnnnnnnnnnnnnnnnnnnnnnnnnnnnnnnnnnnnnnnnnnnnnnnnnnnnnnnnnnnnnnnnnnnnnnnnnnnnnnnnnnnnnnnnnnnnnnnnnnnnnnnnnnnnnnnnnnnnnnnnnnnnnnnnnnnnnnnnnnnnnnnnnnnnnnnnnnnnnnnnnnnnnnnnnnnnnnnnnnnnnnnnnnnnnnnnnnnnnnnnnnnnnnnnnnnnnnnnnnnnnnnnnnnnnnnnnnnnnnnnnnnnnnnnnnnnnnnnnnnnnnnnnnnnnnnnnnnnnnnnnnnnnnnnnnnnnnnnnnnnnnnnnnnnnnnnnnnnnnnnnnnnnnnnnnnnnnnnnnnnnnnnnnnnnnnnnnnnnnnnnnnnnnnnnnnnnnnnnnnnnnnnnnnnnnnnnnnnnnnnnnnnnnnnnnnnnnnnnnnnnnnnnnnnnnnnnnnnnnnnnnnnnnnnnnnnnnnnnnnnnnnnnnnnnnnnnnnnnnnnnnnnnnnnnnnnnnnnnnnnnnnnnnnnnnnnnnnnnnnnnnnnnnnnnnnnnnnnnnnnnnnnnnnnnnnnnnnnnnnnnnnnnnnnnnnnnnnnnnnnnnnnnnnnnnnnnnnnnnnnnnnnnnnnnnnnnnnnnnnnnnnnnnnnnnnnnnnnnnnnnnnnnnnnnnnnnnnnnnnnnnnnnnnnnnnnnnnnnnnnnnnnnnnnnnnnnnnnnnnnnnnnnnnnnnnnnnnnnnnnnnnnnnnnnnnnnnnnnnnnnnnnnnnnnnnnnnnnnnnnnnnnnnnnnnnnnnnnnnnnnnnnnnnnnnnnnnnnnnnnnnnnnnnnnnnnnnnnnnnnnnnnnnnnnnnnnnnnnnnnnnnnnnnnnnnnnnnnnnnnnnnnnnnnnnnnnnnnnnnnnnnnnnnnnnnnnnnnnnnnnnnnnnnnnnnnnnnnnnnnnnnnnnnnnnnnnnnnnnnnnnnnnnnnnnnnnnnnnnnnnnnnnnnnnnnnnnnnnnnnnnnnnnnnnnnnnnnnnnnnnnnnnnnnnnnnnnnnnnnnnnnnnnnnnnnnnnnnnnnnnnnnnnnnnnnnnnnnnnnnnnnnnnnnnnnnnnnnnnnnnnnnnnnnnnnnnnnnnnnnnnnnnnnnnnnnnnnnnnnnnnnnnnnnnnnnnnnnnnnnnnnnnnnnnnnnnnnnnnnnnnnnnnnnnnnnnnnnnnnnnnnnnnnnnnnnnnnnnnnnnnnnnnnnnnnnnnnnnnnnnnnnnnnnnnnnnnnnnnnnnnnnnnnnnnnnnnnnnnnnnnnnnnnnnnnnnnnnnnnnnnnnnnnnnnnnnnnnnnnnnnnnnnnnnnnnnnnnnnnnnnnnnnnnnnnnnnnnnnnnnnnnnnnnnnnnnnnnnnnnnnnnnnnnnnnnnnnnnnnnnnnnnnnnnnnnnnnnnnnnnnnnnnnnnnnnnnnnnnnnnnnnnnnnnnnnnnnnnnnnnnnnnnnnnnnnnnnnnnnnnnnnnnnnnnnnnnnnnnnnnnnnnnnnnnnnnnnnnnnnnnnnnnnnnnnnnnnnnnnnnnnnnnnnnnnnnnnnnnnnnnnnnnnnnnnnnnnnnnnnnnnnnnnnnnnnnnnnnnnnnnnnnnnnnnnnnnnnnnnnnnnnnnnnnnnnnnnnnnnnnnnnnnnnnnnnnnnnnnnnnnnnnnnnnnnnnnnnnnnnnnnnnnnnnnnnnnnnnnnnnnnnnnnnnnnnnnnnnnnnnnnnnnnnnnnnnnnnnnnnnnnnnnnnnnnnnnnnnnnnnnnnnnnnnnnnnnnnnnnnnnnnnnnnnnnnnnnnnnnnnnnnnnnnnnnnnnnnnnnnnnnnnnnnnnnnnnnnnnnnnnnnnnnnnnnnnnnnnnnnnnnnnnnnnnnnnnnnnnnnnnnnnnnnnnnnnnnnnnnnnnnnnnnnnnnnnnnnnnnnnnnnnnnnnnnnnnnnnnnnnnnnnnnnnnnnnnnnnnnnnnnnnnnnnnnnnnnnnnnnnnnnnnnnnnnnnnnnnnnnnnnnnnnnnnnnnnnnnnnnnnnnnnnnnnnnnnnnnnnnnnnnnnnnnnnnnnnnnnnnnnnnnnnnnnnnnnnnnnnnnnnnnnnnnnnnnnnnnnnnnnnnnnnnnnnnnnnnnnnnnnnnnnnnnnnnnnnnnnnnnnnnnnnnnnnnnnnnnnnnnnnnnnnnnnnnnnnnnnnnnnnnnnnnnnnnnnnnnnnnnnnnnnnnnnnnnnnnnnnnnnnnnnnnnnnnnnnnnnnnnnnnnnnnnnnnnnnnnnnnnnnnnnnnnnnnnnnnnnnnnnnnnnnnnnnnnnnnnnnnnnnnnnnnnnnnnnnnnnnnnnnnnnnnnnnnnnnnnnnnnnnnnnnnnnnnnnnnnnnnnnnnnnnnnnnnnnnnnnnnnnnnnnnnnnnnnnnnnnnnnnnnnnnnnnnnnnnnnnnnnnnnnnnnnnnnnnnnnnnnnnnnnnnnnnnnnnnnnnnnnnnnnnnnnnnnnnnnnnnnnnnnnnnnnnnnnnnnnnnnnnnnnnnnnnnnnnnnnnnnnnnnnnnnnnnnnnnnnnnnnnnnnnnnnnnnnnnnnnnnnnnnnnnnnnnnnnnnnnnnnnnnnnnnnnnnnnnnnnnnnnnnnnnnnnnnnnnnnnnnnnnnnnnnnnnnnnnnnnnnnnnnnnnnnnnnnnnnnnnnnnnnnnnnnnnnnnnnnnnnnnnnnnnnnnnnnnnnnnnnnnnnnnnnnnnnnnnnnnnnnnnnnnnnnnnnnnnnnnnnnnnnnnnnnnnnnnnnnnnnnnnnnnnnnnnnnnnnnnnnnnnnnnnnnnnnnnnnnnnnnnnnnnnnnnnnnnnnnnnnnnnnnnnnnnnnnnnnnnnnnnnnnnnnnnnnnnnnnnnnnnnnnnnnnnnnnnnnnnnnnnnnnnnnnnnnnnnnnnnnnnnnnnnnnnnnnnnnnnnnnnnnnnnnnnnnnnnnnnnnnnnnnnnnnnnnnnnnnnnnnnnnnnnnnnnnnnnnnnnnnnnnnnnnnnnnnnnnnnnnnnnnnnnnnnnnnnnnnnnnnnnnnnnnnnnnnnnnnnnnnnnnnnnnnnnnnnnnnnnnnnnnnnnnnnnnnnnnnnnnnnnnnnnnnnnnnnnnnnnnnnnnnnnnnnnnnnnnnnnnnnnnnnnnnnnnnnnnnnnnnnnnnnnnnnnnnnnnnnnnnnnnnnnnnnnnnnnnnnnnnnnnnnnnnnnnnnnnnnnnnnnnnnnnnnnnnnnnnnnnnnnnnnnnnnnnnnnnnnnnnnnnnnnnnnnnnnnnnnnnnnnnnnnnnnnnnnnnnnnnnnnnnnnnnnnnnnnnnnnnnnnnnnnnnnnnnnnnnnnnnnnnnnnnnnnnnnnnnnnnnnnnnnnnnnnnnnnnnnnnngaactatttaaaggtgatcaagctggagttagagttgatgctgcatggcgacccgcatattggcatccgcttaaccgtgcgatatgttttgtacctgaagcaatgtaatgaatacctttgaattttttaatcagcattttggaaaacatcttgtttcacaggaaggcgagccacatgttgctgcctacagagctttatccaaaagccataagttaactaaagggacagagagcaggctgtcttcaggttgggcaattatccggcccagcatttccagtattcaattgaaacttgccgctgctggactgcattttgatgaaagaacccgcgtagaagccttcatggaggagctagtaaagtgggacggtaatgaaccaagaatatttctaatgtttgataaggctcccgttccaatcgaaaacctctttatgtcagtcgataaaagatcaatcagaatttgctcacctgcaggcgttgagtcatttgatatgaatcaagccccgacagaagagtccggcagtattcaaaaggtaatttggaagcgcaaggcatgattgaccatcagattccaaagcctgatcgaattgttggttaccagcttcaccgaatggttgctgaactagtagaaggccactctgcattattttcagatcaaggtgatcatttaattgtacgaacagacaagctcatcacggcaagtggacgcacagtcaatgttccagaagttcactccgtcattgcatttgagttgaaggcgtgcgttgcaaccagaaaaggtgggaagaacatttacccaccaattcaagactggcgggttcgtcgctcatggctggaagatcagggcgcaaaaggcggttttgagttattagctttacatgtggatgcagatcgtcagaatgttgtagcaagtggtggaaggaagttttggattgatgccactcagttcactggtgttttaaaagtagtggatgccaccaaattttcacttgccttggcaaacggaattggtcgcgtaggaaaagctttcggcatgggaatgctagtcatttaaggatacaaaatgaaaattatcattaacgcaaaaataaaaacttaggggcctctttctataaaaatgccaaagcctgaaggcggtagagagaacgaatttgaaaacttcccagttatgacacgtggggttgatgacgaaggtaataagctacaaactggctatctaccagcaacaacattccggggctttatgcgaagagcagttacgttaagaagcatgaaattggcagctgaaagcggaaagccttacaagttgtcgcaaatttattcggaaatgattggtcaagatgccgatagcgaaaagcaagcaggagacattgaccttcttgcaatcaagaaatcacgcgaagcaagtcctattcttgatctttttggcagtggccttggaatcaaatcaagattgaaggttagccattttgtgccgcatgtgaacgtacttccagaggtttttactggtgtgcgtaaagaccttgatgacactgaagaagctttggatttgttagataaagctgacgtggcttcgtttttagggcgtagtgcaagtaatactaaaagagccacagcatctgctcttgttaagcaattggaggctgaggtcagacgaattgttaaaaagggtgatctagttccaaaggataaagaagaagcgttaaaggttgcaaaagccaatgaagagaaatttcaagcagaaatgggtgaaatgcaaaacagttcacgaactatccttcagcactttgctctcccatctggcatagagttgtctggaagaattgttgttgagaatgcacttgcgagggatatggatttgattcagtgcggtttggatgagcttagtaaaaagcctgttcttggcgcacatagtgccagaggatgtggggagattgaaggaacgtttcaaatcatggatggcgatggaaaactcttaaagtccatatcaattggtgactataaaccttcaagagtcacagatttttaatgatgaaaaggaaaatatatcaatacattaaataatttaaatcaggtcaggtaaagccaacctgcaaatgggtggctactacaacttggcccgtgtgggtgacagatcactgtcaggtgaagccaaccactaaaagtggtggctgctagaacaccaaaaggtcaactggtagaccaataatcggtgaagccaaccactaaatgggtggttactacaactctttgatccatgctgagagccaatagtctggtgaagccgctcagaaattgagtggctactacaagcagaaacttacgcgcgcgcagataagggcagtgaagccaacttgaaaatgggtggctactacaacttgaagaatttcagcaccgcaaagcctgatggtgaagccaacctgcaaatgggtggctactacaactagattcgttctgctctctctagtctggcaggtgaagccaaccagtaattgggtggctgctacaatattttccagtgtttttctcggtagttgaaagtttaagccatccattaaattggtggctactaaagctggttcatgcaccctttggctgtatggcatgatgaagccaccttttaaatgggtggctactagaatatttgagatgacgttcaaacctttgcaggttgtgaagctatccttcaactggaaggctactacaactatgagccagctggtgagaccgctgccattggtgaagccaccctttagatgggtggctaataaacaagaacttgtgtggaattgggatagggcaggttgaagtcacccagtgaatggatggctgctaaaactttataaccgcaattttatgcagcgcttgaagtgaagccacttggtaaatgagtggctactataaggttgttgtgtcaaattcccatttttttttggtgaagccaacctgtaaatggatggctatttattgaagccccaatattgggctagtcttgcttcacaatgtctttaataaaaaggaagacgatgttcaggtcgcaagagcaagctaatttcagcgccattgttgctaaacacatggctgctcctgacgcgcccttactaattgagggtgcaactggcttaggtaaaaccagagcctatttggaagctgtagtgcaggcagcaatagcaggtaaacgtatcgcaattgtcttgcctagtcatcagttaattgatcagctactcgcttcaactgacctctctaaaactcttaggaaagacatcaaagtagttgctttcaggccaattaaatactttgaaaacaggaaatctttcaatgatcacaaacagatggctcttgatgctcaagtcatgctttgcacaagtgcatcagtgatcatagatcaacgattaattgggtgctacaacgccgttttggacagggactacatcatcttcgacgaagcagatcaattgcccgatgctgctgcattgcaaagcgactgtgagataactaaatatcaatttaaggacttaaacgtacaagttgaaagcgctgaacaagctgccagagatattttaaaaaagaaggatttagaacctgaactaaaagcagccgctttaatgatacttgaggctatagatgatcctgcttggtactacaaagcaggattaactgatgatggtagcgcaatgctttttcacaaaatgccgggcagattattaaagaaggtagcaaacagaaaagcagttgcatttataagtgctactttgtctatatctgacacctttgatgatttcaaacgagcaatgggtatacaacaccaaagtaaactttctacaatcattgagcctttgcaccacggtaagctagggttttatgtgtcagatgttttagtaaatacttctgaatggttagatgtaattaaaaaaatcatatctactgctagtgcgccaatcttacttgtgactccaagccatgagcttgccaaaacactaggcgctgttatagaaaactcaactgtaaggaatgcagaagagacggctagtcaagcagcatttcgtatgggtgacagtaaagtcttgattgctgctggtgcatgggcaggactagatactccaatacagtgggcatcaattgttattcctcgagtaccgtatgacaggccagtagtaattgaggggaatcacgaaagcagttttttcgatataagaaatactgctttgaggaggatgcgtcaagttatcggacgcgggttacgatcgccagacgctgaatgtgacatctatatttgtgatggtcgatttaaaaacattgagtcatttgtgccaactagatttcgttctgcatgggttcacaaaggatttcttgaaggtagtcggcgtgaagttctactttccaaaattgaacgtgatccttcagttcgtaaggaggctttaaagcagtttggtcatcaatgcatgtgctgcggattcaagccaaaagtcatatctcagttagatgttcatcacttgtttccattgcatgagggagagcgccggactgaaattagtcatctagctgttttgtgtgccaactgccaccggttcgctcactcaactgaaccaccactaacggttgaagctatgaagtctcttgatcctcaatgttaacttctagctggttggccttttaaaaatgctaacgatctaaatagtgtgtagtttgtatcgtcaaacggtttgtataagcccttgttttttacaagaaccacatcaagacatgctactgagtatttaattgaggacaaggggccgcatgcacgtttggttgaaacagcaactctcaacaaaaaaaattttgctaaaattgacatcaaacttggtagccaattgaggggtgttatgagtgccaaagaatcggttaaacaggtcaaagaagagtattccgctgaaggcaaagctaagtatctcatcacgggaggtggcaggattacgtgcctgcgctgtacagctaaatcaacccgtaccaaactgcaatgcggtaggccagctatcaaaacatcccgaacgcagaagtgccaataccacggtggtagaccgcacacggcggagacccttaaacgcatctcagaagccaacacgctccacggtcaagccacaaaacaggccaaagaacagtacagacatagcattgagttaattcatgagctacaggatgcaatgtatgtcttgaagatgggcgaggggcctaagattcgtggcccaa

SEQ ID NO: 202 - DNA, 12202 bp, Artificial Sequence
  Synthetic Oligonucleotide
  misc_feature (1)..(5788): n is a, c, g, or t
nnnnnnnnnnnnnnnnnnnnnnnnnnnnnnnnnnnnnnnnnnnnnnnnnnnnnnnnnnnnnnnnnnnnnnnnnnnnnnnnnnnnnnnnnnnnnnnnnnnnnnnnnnnnnnnnnnnnnnnnnnnnnnnnnnnnnnnnnnnnnnnnnnnnnnnnnnnnnnnnnnnnnnnnnnnnnnnnnnnnnnnnnnnnnnnnnnnnnnnnnnnnnnnnnnnnnnnnnnnnnnnnnnnnnnnnnnnnnnnnnnnnnnnnnnnnnnnnnnnnnnnnnnnnnnnnnnnnnnnnnnnnnnnnnnnnnnnnnnnnnnnnnnnnnnnnnnnnnnnnnnnnnnnnnnnnnnnnnnnnnnnnnnnnnnnnnnnnnnnnnnnnnnnnnnnnnnnnnnnnnnnnnnnnnnnnnnnnnnnnnnnnnnnnnnnnnnnnnnnnnnnnnnnnnnnnnnnnnnnnnnnnnnnnnnnnnnnnnnnnnnnnnnnnnnnnnnnnnnnnnnnnnnnnnnnnnnnnnnnnnnnnnnnnnnnnnnnnnnnnnnnnnnnnnnnnnnnnnnnnnnnnnnnnnnnnnnnnnnnnnnnnnnnnnnnnnnnnnnnnnnnnnnnnnnnnnnnnnnnnnnnnnnnnnnnnnnnnnnnnnnnnnnnnnnnnnnnnnnnnnnnnnnnnnnnnnnnnnnnnnnnnnnnnnnnnnnnnnnnnnnnnnnnnnnnnnnnnnnnnnnnnnnnnnnnnnnnnnnnnnnnnnnnnnnnnnnnnnnnnnnnnnnnnnnnnnnnnnnnnnnnnnnnnnnnnnnnnnnnnnnnnnnnnnnnnnnnnnnnnnnnnnnnnnnnnnnnnnnnnnnnnnnnnnnnnnnnnnnnnnnnnnnnnnnnnnnnnnnnnnnnnnnnnnnnnnnnnnnnnnnnnnnnnnnnnnnnnnnnnnnnnnnnnnnnnnnnnnnnnnnnnnnnnnnnnnnnnnnnnnnnnnnnnnnnnnnnnnnnnnnnnnnnnnnnnnnnnnnnnnnnnnnnnnnnnnnnnnnnnnnnnnnnnnnnnnnnnnnnnnnnnnnnnnnnnnnnnnnnnnnnnnnnnnnnnnnnnnnnnnnnnnnnnnnnnnnnnnnnnnnnnnnnnnnnnnnnnnnnnnnnnnnnnnnnnnnnnnnnnnnnnnnnnnnnnnnnnnnnnnnnnnnnnnnnnnnnnnnnnnnnnnnnnnnnnnnnnnnnnnnnnnnnnnnnnnnnnnnnnnnnnnnnnnnnnnnnnnnnnnnnnnnnnnnnnnnnnnnnnnnnnnnnnnnnnnnnnnnnnnnnnnnnnnnnnnnnnnnnnnnnnnnnnnnnnnnnnnnnnnnnnnnnnnnnnnnnnnnnnnnnnnnnnnnnnnnnnnnnnnnnnnnnnnnnnnnnnnnnnnnnnnnnnnnnnnnnnnnnnnnnnnnnnnnnnnnnnnnnnnnnnnnnnnnnnnnnnnnnnnnnnnnnnnnnnnnnnnnnnnnnnnnnnnnnnnnnnnnnnnnnnnnnnnnnnnnnnnnnnnnnnnnnnnnnnnnnnnnnnnnnnnnnnnnnnnnnnnnnnnnnnnnnnnnnnnnnnnnnnnnnnnnnnnnnnnnnnnnnnnnnnnnnnnnnnnnnnnnnnnnnnnnnnnnnnnnnnnnnnnnnnnnnnnnnnnnnnnnnnnnnnnnnnnnnnnnnnnnnnnnnnnnnnnnnnnnnnnnnnnnnnnnnnnnnnnnnnnnnnnnnnnnnnnnnnnnnnnnnnnnnnnnnnnnnnnnnnnnnnnnnnnnnnnnnnnnnnnnnnnnnnnnnnnnnnnnnnnnnnnnnnnnnnnnnnnnnnnnnnnnnnnnnnnnnnnnnnnnnnnnnnnnnnnnnnnnnnnnnnnnnnnnnnnnnnnnnnnnnnnnnnnnnnnnnnnnnnnnnnnnnnnnnnnnnnnnnnnnnnnnnnnnnnnnnnnnnnnnnnnnnnnnnnnnnnnnnnnnnnnnnnnnnnnnnnnnnnnnnnnnnnnnnnnnnnnnnnnnnnnnnnnnnnnnnnnnnnnnnnnnnnnnnnnnnnnnnnnnnnnnnnnnnnnnnnnnnnnnnnnnnnnnnnnnnnnnnnnnnnnnnnnnnnnnnnnnnnnnnnnnnnnnnnnnnnnnnnnnnnnnnnnnnnnnnnnnnnnnnnnnnnnnnnnnnnnnnnnnnnnnnnnnnnnnnnnnnnnnnnnnnnnnnnnnnnnnnnnnnnnnnnnnnnnnnnnnnnnnnnnnnnnnnnnnnnnnnnnnnnnnnnnnnnnnnnnnnnnnnnnnnnnnnnnnnnnnnnnnnnnnnnnnnnnnnnnnnnnnnnnnnnnnnnnnnnnnnnnnnnnnnnnnnnnnnnnnnnnnnnnnnnnnnnnnnnnnnnnnnnnnnnnnnnnnnnnnnnnnnnnnnnnnnnnnnnnnnnnnnnnnnnnnnnnnnnnnnnnnnnnnnnnnnnnnnnnnnnnnnnnnnnnnnnnnnnnnnnnnnnnnnnnnnnnnnnnnnnnnnnnnnnnnnnnnnnnnnnnnnnnnnnnnnnnnnnnnnnnnnnnnnnnnnnnnnnnnnnnnnnnnnnnnnnnnnnnnnnnnnnnnnnnnnnnnnnnnnnnnnnnnnnnnnnnnnnnnnnnnnnnnnnnnnnnnnnnnnnnnnnnnnnnnnnnnnnnnnnnnnnnnnnnnnnnnnnnnnnnnnnnnnnnnnnnnnnnnnnnnnnnnnnnnnnnnnnnnnnnnnnnnnnnnnnnnnnnnnnnnnnnnnnnnnnnnnnnnnnnnnnnnnnnnnnnnnnnnnnnnnnnnnnnnnnnnnnnnnnnnnnnnnnnnnnnnnnnnnnnnnnnnnnnnnnnnnnnnnnnnnnnnnnnnnnnnnnnnnnnnnnnnnnnnnnnnnnnnnnnnnnnnnnnnnnnnnnnnnnnnnnnnnnnnnnnnnnnnnnnnnnnnnnnnnnnnnnnnnnnnnnnnnnnnnnnnnnnnnnnnnnnnnnnnnnnnnnnnnnnnnnnnnnnnnnnnnnnnnnnnnnnnnnnnnnnnnnnnnnnnnnnnnnnnnnnnnnnnnnnnnnnnnnnnnnnnnnnnnnnnnnnnnnnnnnnnnnnnnnnnnnnnnnnnnnnnnnnnnnnnnnnnnnnnnnnnnnnnnnnnnnnnnnnnnnnnnnnnnnnnnnnnnnnnnnnnnnnnnnnnnnnnnnnnnnnnnnnnnnnnnnnnnnnnnnnnnnnnnnnnnnnnnnnnnnnnnnnnnnnnnnnnnnnnnnnnnnnnnnnnnnnnnnnnnnnnnnnnnnnnnnnnnnnnnnnnnnnnnnnnnnnnnnnnnnnnnnnnnnnnnnnnnnnnnnnnnnnnnnnnnnnnnnnnnnnnnnnnnnnnnnnnnnnnnnnnnnnnnnnnnnnnnnnnnnnnnnnnnnnnnnnnnnnnnnnnnnnnnnnnnnnnnnnnnnnnnnnnnnnnnnnnnnnnnnnnnnnnnnnnnnnnnnnnnnnnnnnnnnnnnnnnnnnnnnnnnnnnnnnnnnnnnnnnnnnnnnnnnnnnnnnnnnnnnnnnnnnnnnnnnnnnnnnnnnnnnnnnnnnnnnnnnnnnnnnnnnnnnnnnnnnnnnnnnnnnnnnnnnnnnnnnnnnnnnnnnnnnnnnnnnnnnnnnnnnnnnnnnnnnnnnnnnnnnnnnnnnnnnnnnnnnnnnnnnnnnnnnnnnnnnnnnnnnnnnnnnnnnnnnnnnnnnnnnnnnnnnnnnnnnnnnnnnnnnnnnnnnnnnnnnnnnnnnnnnnnnnnnnnnnnnnnnnnnnnnnnnnnnnnnnnnnnnnnnnnnnnnnnnnnnnnnnnnnnnnnnnnnnnnnnnnnnnnnnnnnnnnnnnnnnnnnnnnnnnnnnnnnnnnnnnnnnnnnnnnnnnnnnnnnnnnnnnnnnnnnnnnnnnnnnnnnnnnnnnnnnnnnnnnnnnnnnnnnnnnnnnnnnnnnnnnnnnnnnnnnnnnnnnnnnnnnnnnnnnnnnnnnnnnnnnnnnnnnnnnnnnnnnnnnnnnnnnnnnnnnnnnnnnnnnnnnnnnnnnnnnnnnnnnnnnnnnnnnnnnnnnnnnnnnnnnnnnnnnnnnnnnnnnnnnnnnnnnnnnnnnnnnnnnnnnnnnnnnnnnnnnnnnnnnnnnnnnnnnnnnnnnnnnnnnnnnnnnnnnnnnnnnnnnnnnnnnnnnnnnnnnnnnnnnnnnnnnnnnnnnnnnnnnnnnnnnnnnnnnnnnnnnnnnnnnnnnnnnnnnnnnnnnnnnnnnnnnnnnnnnnnnnnnnnnnnnnnnnnnnnnnnnnnnnnnnnnnnnnnnnnnnnnnnnnnnnnnnnnnnnnnnnnnnnnnnnnnnnnnnnnnnnnnnnnnnnnnnnnnnnnnnnnnnnnnnnnnnnnnnnnnnnnnnnnnnnnnnnnnnnnnnnnnnnnnnnnnnnnnnnnnnnnnnnnnnnnnnnnnnnnnnnnnnnnnnnnnnnnnnnnnnnnnnnnnnnnnnnnnnnnnnnnnnnnnnnnnnnnnnnnnnnnnnnnnnnnnnnnnnnnnnnnnnnnnnnnnnnnnnnnnnnnnnnnnnnnnnnnnnnnnnnnnnnnnnnnnnnnnnnnnnnnnnnnnnnnnnnnnnnnnnnnnnnnnnnnnnnnnnnnnnnnnnnnnnnnnnnnnnnnnnnnnnnnnnnnnnnnnnnnnnnnnnnnnnnnnnnnnnnnnnnnnnnnnnnnnnnnnnnnnnnnnnnnnnnnnnnnnnnnnnnnnnnnnnnnnnnnnnnnnnnnnnnnnnnnnnnnnnnnnnnnnnnnnnnnnnnnnnnnnnnnnnnnnnnnnnnnnnnnnnnnnnnnnnnnnnnnnnnnnnnnnnnnnnnnnnnnnnnnnnnnnnnnnnnnnnnnnnnnnnnnnnnnnnnnnnnnnnnnnnnnnnnnnnnnnnnnnnnnnnnnnnnnnnnnnnnnnnnnnnnnnnnnnnnnnnnnnnnnnnnnnnnnnnnnnnnnnnnnnnnnnnnnnnnnnnnnnnnnnnnnnnnnnnnnnnnnnnnnnnnnnnnnnnnnnnnnnnnnnnnnnnnnnnnnnnnnnnnnnnnnnnnnnnnnnnnnnnnnnnnnnnnnnnnnnnnnnnnnnnnnnnnnnnnnnnnnnnnnnnnnnnnnnnnnnnnnnnnnnnnnnnnnnnnnnnnnnnnnnnnnnnnnnnnnnnnnnnnnnnnnnnnnnnnnnnnnnnnnnnnnnnnnnnnnnnnnnnnnnnnnnnnnnnnnnnnnnnnnnnnnnnnnnnnnnnnnnnnnnnnnnnnnnnnnnnnnnnnnnnnnnnnnnnnnnnnnnnnnnnnnnnnnnnnnnnnnnnnnnnnnnnnnnnnnnnnnnnnnnnnnnnnnnnnnnnnnnnnnnnnnnnnnnnnnnnnnnnnnnnnnnnnnnnnnnnnnnnnnnnnnnnnnnnnnnnnnnnnnnnnnnnnnnnnnnnnnnnnnnnnnnnnnnnnnnnnnnnnnnnnnnnnnnnnnnnnnnnnnnnnnnnnnnnnnnnnnnnnnnnnnnnnnnnnnnnnnnnnnnnnnnnnnnnnnnnnnnnnnnnnnnnnnnnnnnnnnnnnnnnnnnnnnnnnnnnnnnnnnnnnnnnnnnnnnnnnnnnnnnnnnnnnnnnnnnnnnnnnnnnnnnnnnnnnnnnnnnnnnnnnnnnnnnnnnnnnnnnnnnnnnnnnnnnnnnnnnnnnnnnnnnnnnnnnnnnnnnnnnnnnnnnnnnnnnnnnnnnnnnnnnnnnnnnnnnnnnnnnnnnnnnnnnnnnnnnnnnnnnnnnnnnnnnnnnnnnnnnnnnnnnnnnnnnnnnnnnnnnnnnnnnnnnnnnnnnnnnnnnnnnnnnnnnnnnnnnnnnnnnnnnnnnnnnnnnnnnnnnnnnnnnnnnnnnnnnnnnnnnnnnnnnnnnnnnnnnntgccatctttgttggtatcccatgaaagtgcttggaacaacttaagacaataaaaaaccccgctacgctagtaaacgtgcggggttcgatacgttatgagatgggctgagactcgtctctggttccgacaggaatctcaaaatgtcttgaaagacaataaatacaaggacttttaatttttataaattaaagtaccgacataaataccgacatttggtggtctcatgtcgttttattgagctttggcgcattttggtgagtttacttatgccaagtcactcagcccatcttaagttgtgtcgacaccccaccccttaaaaactccagcccagccagaccccacccaccccgcacccccacttattggcgatgggactcccgccagccttcgcatactattttgctcaaacgatgagcctgcggaaggccccccttcatttttgaaatgcattctgcgggggatacataaatttttggaaaaaatgcaagcgtttgcattaggacatggctgtaataatgattactatggaaactagtacatagctagcatttctgatctaacttgaacgagcgagtttcaaaagtgatactcatttatgcccatgtatctaaagttacaacatgctgataaatatataaatgtaaaaagtcatggataagctcaaaatcacattcaagcttgatagccctatcatcacaaatggtggctacatgactctggatgctttattggctgcgcttatttttgagcagacagacgatcttgaaaaagcgcatagtgaaattcccttattaaacaaaaatgggctttggcacggtagcgcagccattgttgagaaaattgacacaggtagaaaaggttttgttgccaatcttcaagctgcacacgaccttaatttggacttaattgcacagaacaaagacggtaactctcaccgcacgattggtttgactcgtcgaagagattacggcgcagttttcaatagctacaaaatgattactgcaccagaaattacttggtatgcaacaggcaacgttgatcaaattcaaagattactgtctggagtagagtttattggcaaacgaagagctagtggttttggtcaagtatcaagccttcagattgaagaggccgatgtagatggcgtaactgggcatttcggggagccactgcgcccagttccaattgaactatttaaaggtgatcaagctggagttagagttgatgctgcatggcgacccgcatattggcatccgcttaaccgtgcgatatgttttgtacctgaagcaatgtaatgaatacctttgaattttttaatcagcattttggaaaacatcttgtttcacaggaaggcgagccacatgttgctgcctacagagctttatccaaaagccataagttaactaaagggacagagagcaggctgtcttcaggttgggcaattatccggcccagcatttccagtattcaattgaaacttgccgctgctggactgcattttgatgaaagaacccgcgtagaagccttcatggaggagctagtaaagtgggacggtaatgaaccaagaatatttctaatgtttgataaggctcccgttccaatcgaaaacctctttatgtcagtcgataaaagatcaatcagaatttgctcacctgcaggcgttgagtcatttgatatgaatcaagccccgacagaagagtccggcagtattcaaaaggtaatttggaagcgcaaggcatgattgaccatcagattccaaagcctgatcgaattgttggttaccagcttcaccgaatggttgctgaactagtagaaggccactctgcattattttcagatcaaggtgatcatttaattgtacgaacagacaagctcatcacggcaagtggacgcacagtcaatgttccagaagttcactccgtcattgcatttgagttgaaggcgtgcgttgcaaccagaaaaggtgggaagaacatttacccaccaattcaagactggcgggttcgtcgctcatggctggaagatcagggcgcaaaaggcggttttgagttattagctttacatgtggatgcagatcgtcagaatgttgtagcaagtggtggaaggaagttttggattgatgccactcagttcactggtgttttaaaagtagtggatgccaccaaattttcacttgccttggcaaacggaattggtcgcgtaggaaaagctttcggcatgggaatgctagtcatttaaggatacaaaatgaaaattatcattaacgcaaaaataaaaactttggggcctctttctataaaaatgccaaagcctgaaggcggtagagagaacgaatttgaaaacttcccagttatgacacgtggggttgatgacgaaggtaataagctacaaactggctatctaccagcaacaacattccggggctttatgcgaagagcagttacgttaagaagcatgaaattggcagctgaaagcggaaagccttacaagttgtcgcaaatttattcggaaatgattggtcaagatgccgatagcgaaaagcaagcaggagacattgaccttcttgcaatcaagaaatcacgcgaagcaagtcctattcttgatctttttggcagtggccttggaatcaaatcaagattgaaggttagccattttgtgccgcatgtgaacgtacttccagaggtttttactggtgtgcgtaaagaccttgatgacactgaagaagctttggatttgttagataaagctgacgtggcttcgtttttagggcgtagtgcaagtaatactaaaagagccacagcatctgctcttgttaagcaattggaggctgaggtcagacgaattgttaaaaagggtgatctagttccaaaggataaagaagaagcgttaaaggttgcaaaagccaatgaagagaaatttcaagcagaaatgggtgaaatgcaaaacagttcacgaactatccttcagcactttgctctcccatctggcatagagttgtctggaagaattgttgttgagaatgcacttgcgagggatatggatttgattcagtgcggtttggatgagcttagtaaaaagcctgttcttggcgcacatagtgccagaggatgtggggagattgaaggaacgtttcaaatcatggatggcgatggaaaactcttaaagtccatatcaattggtgactataaaccttcaagagtcacagatttttaatgatgaaaaggaaaatatatcaatacattaaataatttaaatcaggtcaggtaaagccaacctgcaaatgggtggctactacaacttggcccgtgtgggtgacagatcactgtcaggtgaagccaaccactaaaagtggtggctgctagaacaccaaaaggtcaactggtagaccaataatcggtgaagccaaccactaaatgggtggttactacaactctttgatccatgctgagagccaatagtctggtgaagccgctcagaaattgagtggctactacaagcagaaacttacgcgcgcgcagataagggcagtgaagccaacttgaaaatgggtggctactacaacttgaagaatttcagcaccgcaaagcctgatggtgaagccaacctgcaaatgggtggctactacaactagattcgttctgctctctctagtctggcaggtgaagccaaccagtaattgggtggctgctacaatattttccagtgtttttctcggtagttgaaagtttaagccatccattaaattggtggctactaaagctggttcatgcaccctttggctgtatggcatgatgaagccaccttttaaatgggtggctactagaatatttgagatgacgttcaaacctttgcaggttgtgaagctatccttcaactggaaggctactacaactatgagccagctggtgagaccgctgccattggtgaagccaccctttagatgggtggctaataaacaagaacttgtgtggaattgggatagggcaggttgaagtcacccagtgaatggatggctgctaaaactttataaccgcaattttatgcagcgcttgaagtgaagccacttggtaaatgagtggctactataaggttgttgtgtcaaattcccatttttttttggtgaagccaacctgtaaatggatggctatttattgaagccccaatattgggctagtcttgcttcacaatgtctttaataaaaaggaagacgatgttcaggtcgcaagagcaagctaatttcagcgccattgttgctaaacacatggctgctcctgacgcgcccttactaattgagggtgcaactggcttaggtaaaaccagagcctatttggaagctgtagtgcaggcagcaatagcaggtaaacgtatcgcaattgtcttgcctagtcatcagttaattgatcagctactcgcttcaactgacctctctaaaactcttaggaaagacatcaaagtagttgctttcaggccaattaaatactttgaaaacaggaaatctttcaatgatcacaaacagatggctcttgatgctcaagtcatgctttgcacaagtgcatcagtgatcatagatcaacgattaattgggtgctacaacgccgttttggacagggactacatcatcttcgacgaagcagatcaattgcccgatgctgctgcattgcaaagcgactgtgagataactaaatatcaatttaaggacttaaacgtacaagttgaaagcgctgaacaagctgccagagatattttaaaaaagaaggatttagaacctgaactaaaagcagccgctttaatgatacttgaggctatagatgatcctgcttggtactacaaagcaggattaactgatgatggtagcgcaatgctttttcacaaaatgccgggcagattattaaagaaggtagcaaacagaaaagcagttgcatttataagtgctactttgtctatatctgacacctttgatgatttcaaacgagcaatgggtatacaacaccaaagtaaactttctacaatcattgagcctttgcaccacggtaagctagggttttatgtgtcagatgttttagtaaatacttctgaatggttagatgtaattaaaaaaatcatatctactgctagtgcgccaatcttacttgtgactccaagccatgagcttgccaaaacactaggcgctgttatagaaaactcaactgtaaggaatgcagaagagacggctagtcaagcagcatttcgtatgggtgacagtaaagtcttgattgctgctggtgcatgggcaggactagatactccaatacagtgggcatcaattgttattcctcgagtaccgtatgacaggccagtagtaattgaggggaatcacgaaagcagttttttcgatataagaaatactgctttgaggaggatgcgtcaagttatcggacgcgggttacgatcgccagacgctgaatgtgacatctatatttgtgatggtcgatttaaaaacattgagtcatttgtgccaactagatttcgttctgcatgggttcacaaaggatttcttgaaggtagtcggcgtgaagttctactttccaaaattgaacgtgatccttcagttcgtaaggaggctttaaagcagtttggtcatcaatgcatgtgctgcggattcaagccaaaagtcatatctcagttagatgttcatcacttgtttccattgcatgagggagagcgccggactgaaattagtcatctagctgttttgtgtgccaactgccaccggttcgctcactcaactgaaccaccactaacggttgaagctatgaagtctcttgatcctcaatgttaacttctagctggttggccttttaaaaatgctaacgatctaaatagtgtgtagtttgtatcgtcaaacggtttgtataagcccttgttttttacaagaaccacatcaagacatgctactgagtatttaattgaggacaaggggccgcatgcacgtttggttgaaacagcaactctcaacaaaaaaaattttgctaaaattgacatcaaacttggtagccaattgaggggtgttatgagtgccaaagaatcggttaaacaggtcaaagaagagtattccgctgaaggcaaagctaagtatctcatcacgggaggtggcaggattacgtgcctgcgctgtacagctaaatcaacccgtaccaaactgcaatgcggtaggccagctatcaaaacatcccgaacgcagaagtgccaataccacggtggtagaccgcacacggcggagacccttaaacgcatctcagaagccaacacgctccacggtcaagccacaaaacaggccaaagaacagtacagacatagcattgagttaattcatgagctacaggatgcaatgtatgtcttgaagatgggcgaggggcctaagattcgtggcccaa

SEQ ID NO: 203 - DNA, 12170 bp, Artificial Sequence
  Synthetic Oligonucleotide
  misc_feature (1)..(9109): n is a, c, g, or t
nnnnnnnnnnnnnnnnnnnnnnnnnnnnnnnnnnnnnnnnnnnnnnnnnnnnnnnnnnnnnnnnnnnnnnnnnnnnnnnnnnnnnnnnnnnnnnnnnnnnnnnnnnnnnnnnnnnnnnnnnnnnnnnnnnnnnnnnnnnnnnnnnnnnnnnnnnnnnnnnnnnnnnnnnnnnnnnnnnnnnnnnnnnnnnnnnnnnnnnnnnnnnnnnnnnnnnnnnnnnnnnnnnnnnnnnnnnnnnnnnnnnnnnnnnnnnnnnnnnnnnnnnnnnnnnnnnnnnnnnnnnnnnnnnnnnnnnnnnnnnnnnnnnnnnnnnnnnnnnnnnnnnnnnnnnnnnnnnnnnnnnnnnnnnnnnnnnnnnnnnnnnnnnnnnnnnnnnnnnnnnnnnnnnnnnnnnnnnnnnnnnnnnnnnnnnnnnnnnnnnnnnnnnnnnnnnnnnnnnnnnnnnnnnnnnnnnnnnnnnnnnnnnnnnnnnnnnnnnnnnnnnnnnnnnnnnnnnnnnnnnnnnnnnnnnnnnnnnnnnnnnnnnnnnnnnnnnnnnnnnnnnnnnnnnnnnnnnnnnnnnnnnnnnnnnnnnnnnnnnnnnnnnnnnnnnnnnnnnnnnnnnnnnnnnnnnnnnnnnnnnnnnnnnnnnnnnnnnnnnnnnnnnnnnnnnnnnnnnnnnnnnnnnnnnnnnnnnnnnnnnnnnnnnnnnnnnnnnnnnnnnnnnnnnnnnnnnnnnnnnnnnnnnnnnnnnnnnnnnnnnnnnnnnnnnnnnnnnnnnnnnnnnnnnnnnnnnnnnnnnnnnnnnnnnnnnnnnnnnnnnnnnnnnnnnnnnnnnnnnnnnnnnnnnnnnnnnnnnnnnnnnnnnnnnnnnnnnnnnnnnnnnnnnnnnnnnnnnnnnnnnnnnnnnnnnnnnnnnnnnnnnnnnnnnnnnnnnnnnnnnnnnnnnnnnnnnnnnnnnnnnnnnnnnnnnnnnnnnnnnnnnnnnnnnnnnnnnnnnnnnnnnnnnnnnnnnnnnnnnnnnnnnnnnnnnnnnnnnnnnnnnnnnnnnnnnnnnnnnnnnnnnnnnnnnnnnnnnnnnnnnnnnnnnnnnnnnnnnnnnnnnnnnnnnnnnnnnnnnnnnnnnnnnnnnnnnnnnnnnnnnnnnnnnnnnnnnnnnnnnnnnnnnnnnnnnnnnnnnnnnnnnnnnnnnnnnnnnnnnnnnnnnnnnnnnnnnnnnnnnnnnnnnnnnnnnnnnnnnnnnnnnnnnnnnnnnnnnnnnnnnnnnnnnnnnnnnnnnnnnnnnnnnnnnnnnnnnnnnnnnnnnnnnnnnnnnnnnnnnnnnnnnnnnnnnnnnnnnnnnnnnnnnnnnnnnnnnnnnnnnnnnnnnnnnnnnnnnnnnnnnnnnnnnnnnnnnnnnnnnnnnnnnnnnnnnnnnnnnnnnnnnnnnnnnnnnnnnnnnnnnnnnnnnnnnnnnnnnnnnnnnnnnnnnnnnnnnnnnnnnnnnnnnnnnnnnnnnnnnnnnnnnnnnnnnnnnnnnnnnnnnnnnnnnnnnnnnnnnnnnnnnnnnnnnnnnnnnnnnnnnnnnnnnnnnnnnnnnnnnnnnnnnnnnnnnnnnnnnnnnnnnnnnnnnnnnnnnnnnnnnnnnnnnnnnnnnnnnnnnnnnnnnnnnnnnnnnnnnnnnnnnnnnnnnnnnnnnnnnnnnnnnnnnnnnnnnnnnnnnnnnnnnnnnnnnnnnnnnnnnnnnnnnnnnnnnnnnnnnnnnnnnnnnnnnnnnnnnnnnnnnnnnnnnnnnnnnnnnnnnnnnnnnnnnnnnnnnnnnnnnnnnnnnnnnnnnnnnnnnnnnnnnnnnnnnnnnnnnnnnnnnnnnnnnnnnnnnnnnnnnnnnnnnnnnnnnnnnnnnnnnnnnnnnnnnnnnnnnnnnnnnnnnnnnnnnnnnnnnnnnnnnnnnnnnnnnnnnnnnnnnnnnnnnnnnnnnnnnnnnnnnnnnnnnnnnnnnnnnnnnnnnnnnnnnnnnnnnnnnnnnnnnnnnnnnnnnnnnnnnnnnnnnnnnnnnnnnnnnnnnnnnnnnnnnnnnnnnnnnnnnnnnnnnnnnnnnnnnnnnnnnnnnnnnnnnnnnnnnnnnnnnnnnnnnnnnnnnnnnnnnnnnnnnnnnnnnnnnnnnnnnnnnnnnnnnnnnnnnnnnnnnnnnnnnnnnnnnnnnnnnnnnnnnnnnnnnnnnnnnnnnnnnnnnnnnnnnnnnnnnnnnnnnnnnnnnnnnnnnnnnnnnnnnnnnnnnnnnnnnnnnnnnnnnnnnnnnnnnnnnnnnnnnnnnnnnnnnnnnnnnnnnnnnnnnnnnnnnnnnnnnnnnnnnnnnnnnnnnnnnnnnnnnnnnnnnnnnnnnnnnnnnnnnnnnnnnnnnnnnnnnnnnnnnnnnnnnnnnnnnnnnnnnnnnnnnnnnnnnnnnnnnnnnnnnnnnnnnnnnnnnnnnnnnnnnnnnnnnnnnnnnnnnnnnnnnnnnnnnnnnnnnnnnnnnnnnnnnnnnnnnnnnnnnnnnnnnnnnnnnnnnnnnnnnnnnnnnnnnnnnnnnnnnnnnnnnnnnnnnnnnnnnnnnnnnnnnnnnnnnnnnnnnnnnnnnnnnnnnnnnnnnnnnnnnnnnnnnnnnnnnnnnnnnnnnnnnnnnnnnnnnnnnnnnnnnnnnnnnnnnnnnnnnnnnnnnnnnnnnnnnnnnnnnnnnnnnnnnnnnnnnnnnnnnnnnnnnnnnnnnnnnnnnnnnnnnnnnnnnnnnnnnnnnnnnnnnnnnnnnnnnnnnnnnnnnnnnnnnnnnnnnnnnnnnnnnnnnnnnnnnnnnnnnnnnnnnnnnnnnnnnnnnnnnnnnnnnnnnnnnnnnnnnnnnnnnnnnnnnnnnnnnnnnnnnnnnnnnnnnnnnnnnnnnnnnnnnnnnnnnnnnnnnnnnnnnnnnnnnnnnnnnnnnnnnnnnnnnnnnnnnnnnnnnnnnnnnnnnnnnnnnnnnnnnnnnnnnnnnnnnnnnnnnnnnnnnnnnnnnnnnnnnnnnnnnnnnnnnnnnnnnnnnnnnnnnnnnnnnnnnnnnnnnnnnnnnnnnnnnnnnnnnnnnnnnnnnnnnnnnnnnnnnnnnnnnnnnnnnnnnnnnnnnnnnnnnnnnnnnnnnnnnnnnnnnnnnnnnnnnnnnnnnnnnnnnnnnnnnnnnnnnnnnnnnnnnnnnnnnnnnnnnnnnnnnnnnnnnnnnnnnnnnnnnnnnnnnnnnnnnnnnnnnnnnnnnnnnnnnnnnnnnnnnnnnnnnnnnnnnnnnnnnnnnnnnnnnnnnnnnnnnnnnnnnnnnnnnnnnnnnnnnnnnnnnnnnnnnnnnnnnnnnnnnnnnnnnnnnnnnnnnnnnnnnnnnnnnnnnnnnnnnnnnnnnnnnnnnnnnnnnnnnnnnnnnnnnnnnnnnnnnnnnnnnnnnnnnnnnnnnnnnnnnnnnnnnnnnnnnnnnnnnnnnnnnnnnnnnnnnnnnnnnnnnnnnnnnnnnnnnnnnnnnnnnnnnnnnnnnnnnnnnnnnnnnnnnnnnnnnnnnnnnnnnnnnnnnnnnnnnnnnnnnnnnnnnnnnnnnnnnnnnnnnnnnnnnnnnnnnnnnnnnnnnnnnnnnnnnnnnnnnnnnnnnnnnnnnnnnnnnnnnnnnnnnnnnnnnnnnnnnnnnnnnnnnnnnnnnnnnnnnnnnnnnnnnnnnnnnnnnnnnnnnnnnnnnnnnnnnnnnnnnnnnnnnnnnnnnnnnnnnnnnnnnnnnnnnnnnnnnnnnnnnnnnnnnnnnnnnnnnnnnnnnnnnnnnnnnnnnnnnnnnnnnnnnnnnnnnnnnnnnnnnnnnnnnnnnnnnnnnnnnnnnnnnnnnnnnnnnnnnnnnnnnnnnnnnnnnnnnnnnnnnnnnnnnnnnnnnnnnnnnnnnnnnnnnnnnnnnnnnnnnnnnnnnnnnnnnnnnnnnnnnnnnnnnnnnnnnnnnnnnnnnnnnnnnnnnnnnnnnnnnnnnnnnnnnnnnnnnnnnnnnnnnnnnnnnnnnnnnnnnnnnnnnnnnnnnnnnnnnnnnnnnnnnnnnnnnnnnnnnnnnnnnnnnnnnnnnnnnnnnnnnnnnnnnnnnnnnnnnnnnnnnnnnnnnnnnnnnnnnnnnnnnnnnnnnnnnnnnnnnnnnnnnnnnnnnnnnnnnnnnnnnnnnnnnnnnnnnnnnnnnnnnnnnnnnnnnnnnnnnnnnnnnnnnnnnnnnnnnnnnnnnnnnnnnnnnnnnnnnnnnnnnnnnnnnnnnnnnnnnnnnnnnnnnnnnnnnnnnnnnnnnnnnnnnnnnnnnnnnnnnnnnnnnnnnnnnnnnnnnnnnnnnnnnnnnnnnnnnnnnnnnnnnnnnnnnnnnnnnnnnnnnnnnnnnnnnnnnnnnnnnnnnnnnnnnnnnnnnnnnnnnnnnnnnnnnnnnnnnnnnnnnnnnnnnnnnnnnnnnnnnnnnnnnnnnnnnnnnnnnnnnnnnnnnnnnnnnnnnnnnnnnnnnnnnnnnnnnnnnnnnnnnnnnnnnnnnnnnnnnnnnnnnnnnnnnnnnnnnnnnnnnnnnnnnnnnnnnnnnnnnnnnnnnnnnnnnnnnnnnnnnnnnnnnnnnnnnnnnnnnnnnnnnnnnnnnnnnnnnnnnnnnnnnnnnnnnnnnnnnnnnnnnnnnnnnnnnnnnnnnnnnnnnnnnnnnnnnnnnnnnnnnnnnnnnnnnnnnnnnnnnnnnnnnnnnnnnnnnnnnnnnnnnnnnnnnnnnnnnnnnnnnnnnnnnnnnnnnnnnnnnnnnnnnnnnnnnnnnnnnnnnnnnnnnnnnnnnnnnnnnnnnnnnnnnnnnnnnnnnnnnnnnnnnnnnnnnnnnnnnnnnnnnnnnnnnnnnnnnnnnnnnnnnnnnnnnnnnnnnnnnnnnnnnnnnnnnnnnnnnnnnnnnnnnnnnnnnnnnnnnnnnnnnnnnnnnnnnnnnnnnnnnnnnnnnnnnnnnnnnnnnnnnnnnnnnnnnnnnnnnnnnnnnnnnnnnnnnnnnnnnnnnnnnnnnnnnnnnnnnnnnnnnnnnnnnnnnnnnnnnnnnnnnnnnnnnnnnnnnnnnnnnnnnnnnnnnnnnnnnnnnnnnnnnnnnnnnnnnnnnnnnnnnnnnnnnnnnnnnnnnnnnnnnnnnnnnnnnnnnnnnnnnnnnnnnnnnnnnnnnnnnnnnnnnnnnnnnnnnnnnnnnnnnnnnnnnnnnnnnnnnnnnnnnnnnnnnnnnnnnnnnnnnnnnnnnnnnnnnnnnnnnnnnnnnnnnnnnnnnnnnnnnnnnnnnnnnnnnnnnnnnnnnnnnnnnnnnnnnnnnnnnnnnnnnnnnnnnnnnnnnnnnnnnnnnnnnnnnnnnnnnnnnnnnnnnnnnnnnnnnnnnnnnnnnnnnnnnnnnnnnnnnnnnnnnnnnnnnnnnnnnnnnnnnnnnnnnnnnnnnnnnnnnnnnnnnnnnnnnnnnnnnnnnnnnnnnnnnnnnnnnnnnnnnnnnnnnnnnnnnnnnnnnnnnnnnnnnnnnnnnnnnnnnnnnnnnnnnnnnnnnnnnnnnnnnnnnnnnnnnnnnnnnnnnnnnnnnnnnnnnnnnnnnnnnnnnnnnnnnnnnnnnnnnnnnnnnnnnnnnnnnnnnnnnnnnnnnnnnnnnnnnnnnnnnnnnnnnnnnnnnnnnnnnnnnnnnnnnnnnnnnnnnnnnnnnnnnnnnnnnnnnnnnnnnnnnnnnnnnnnnnnnnnnnnnnnnnnnnnnnnnnnnnnnnnnnnnnnnnnnnnnnnnnnnnnnnnnnnnnnnnnnnnnnnnnnnnnnnnnnnnnnnnnnnnnnnnnnnnnnnnnnnnnnnnnnnnnnnnnnnnnnnnnnnnnnnnnnnnnnnnnnnnnnnnnnnnnnnnnnnnnnnnnnnnnnnnnnnnnnnnnnnnnnnnnnnnnnnnnnnnnnnnnnnnnnnnnnnnnnnnnnnnnnnnnnnnnnnnnnnnnnnnnnnnnnnnnnnnnnnnnnnnnnnnnnnnnnnnnnnnnnnnnnnnnnnnnnnnnnnnnnnnnnnnnnnnnnnnnnnnnnnnnnnnnnnnnnnnnnnnnnnnnnnnnnnnnnnnnnnnnnnnnnnnnnnnnnnnnnnnnnnnnnnnnnnnnnnnnnnnnnnnnnnnnnnnnnnnnnnnnnnnnnnnnnnnnnnnnnnnnnnnnnnnnnnnnnnnnnnnnnnnnnnnnnnnnnnnnnnnnnnnnnnnnnnnnnnnnnnnnnnnnnnnnnnnnnnnnnnnnnnnnnnnnnnnnnnnnnnnnnnnnnnnnnnnnnnnnnnnnnnnnnnnnnnnnnnnnnnnnnnnnnnnnnnnnnnnnnnnnnnnnnnnnnnnnnnnnnnnnnnnnnnnnnnnnnnnnnnnnnnnnnnnnnnnnnnnnnnnnnnnnnnnnnnnnnnnnnnnnnnnnnnnnnnnnnnnnnnnnnnnnnnnnnnnnnnnnnnnnnnnnnnnnnnnnnnnnnnnnnnnnnnnnnnnnnnnnnnnnnnnnnnnnnnnnnnnnnnnnnnnnnnnnnnnnnnnnnnnnnnnnnnnnnnnnnnnnnnnnnnnnnnnnnnnnnnnnnnnnnnnnnnnnnnnnnnnnnnnnnnnnnnnnnnnnnnnnnnnnnnnnnnnnnnnnnnnnnnnnnnnnnnnnnnnnnnnnnnnnnnnnnnnnnnnnnnnnnnnnnnnnnnnnnnnnnnnnnnnnnnnnnnnnnnnnnnnnnnnnnnnnnnnnnnnnnnnnnnnnnnnnnnnnnnnnnnnnnnnnnnnnnnnnnnnnnnnnnnnnnnnnnnnnnnnnnnnnnnnnnnnnnnnnnnnnnnnnnnnnnnnnnnnnnnnnnnnnnnnnnnnnnnnnnnnnnnnnnnnnnnnnnnnnnnnnnnnnnnnnnnnnnnnnnnnnnnnnnnnnnnnnnnnnnnnnnnnnnnnnnnnnnnnnnnnnnnnnnnnnnnnnnnnnnnnnnnnnnnnnnnnnnnnnnnnnnnnnnnnnnnnnnnnnnnnnnnnnnnnnnnnnnnnnnnnnnnnnnnnnnnnnnnnnnnnnnnnnnnnnnnnnnnnnnnnnnnnnnnnnnnnnnnnnnnnnnnnnnnnnnnnnnnnnnnnnnnnnnnnnnnnnnnnnnnnnnnnnnnnnnnnnnnnnnnnnnnnnnnnnnnnnnnnnnnnnnnnnnnnnnnnnnnnnnnnnnnnnnnnnnnnnnnnnnnnnnnnnnnnnnnnnnnnnnnnnnnnnnnnnnnnnnnnnnnnnnnnnnnnnnnnnnnnnnnnnnnnnnnnnnnnnnnnnnnnnnnnnnnnnnnnnnnnnnnnnnnnnnnnnnnnnnnnnnnnnnnnnnnnnnnnnnnnnnnnnnnnnnnnnnnnnnnnnnnnnnnnnnnnnnnnnnnnnnnnnnnnnnnnnnnnnnnnnnnnnnnnnnnnnnnnnnnnnnnnnnnnnnnnnnnnnnnnnnnnnnnnnnnnnnnnnnnnnnnnnnnnnnnnnnnnnnnnnnnnnnnnnnnnnnnnnnnnnnnnnnnnnnnnnnnnnnnnnnnnnnnnnnnnnnnnnnnnnnnnnnnnnnnnnnnnnnnnnnnnnnnnnnnnnnnnnnnnnnnnnnnnnnnnnnnnnnnnnnnnnnnnnnnnnnnnnnnnnnnnnnnnnnnnnnnnnnnnnnnnnnnnnnnnnnnnnnnnnnnnnnnnnnnnnnnnnnnnnnnnnnnnnnnnnnnnnnnnnnnnnnnnnnnnnnnnnnnnnnnnnnnnnnnnnnnnnnnnnnnnnnnnnnnnnnnnnnnnnnnnnnnnnnnnnnnnnnnnnnnnnnnnnnnnnnnnnnnnnnnnnnnnnnnnnnnnnnnnnnnnnnnnnnnnnnnnnnnnnnnnnnnnnnnnnnnnnnnnnnnnnnnnnnnnnnnnnnnnnnnnnnnnnnnnnnnnnnnnnnnnnnnnnnnnnnnnnnnnnnnnnnnnnnnnnnnnnnnnnnnnnnnnnnnnnnnnnnnnnnnnnnnnnnnnnnnnnnnnnnnnnnnnnnnnnnnnnnnnnnnnnnnnnnnnnnnnnnnnnnnnnnnnnnnnnnnnnnnnnnnnnnnnnnnnnnnnnnnnnnnnnnnnnnnnnnnnnnnnnnnnnnnnnnnnnnnnnnnnnnnnnnnnnnnnnnnnnnnnnnnnnnnnnnnnnnnnnnnnnnnnnnnnnnnnnnnnnnnnnnnnnnnnnnnnnnnnnnnnnnnnnnnnnnnnnnnnnnnnnnnnnnnnnnnnnnnnnnnnnnnnnnnnnnnnnnnnnnnnnnnnnnnnnnnnnnnnnnnnnnnnnnnnnnnnnnnnnnnnnnnnnnnnnnnnnnnnnnnnnnnnnnnnnnnnnnnnnnnnnnnnnnnnnnnnnnnnnnnnnnnnnnnnnnnnnnnnnnnnnnnnnnnnnnnnnnnnnnnnnnnnnnnnnnnnnnnnnnnnnnnnnnnnnnnnnnnnnnnnnnnnnnnnnnnnnnnnnnnnnnnnnnnnnnnnnnnnnnnnnnnnnnnnnnnnnnnnnnnnnnnnnnnnnnnnnnnnnnnnnnnnnnnnnnnnnnnnnnnnnnnnnnnnnnnnnnnnnnnnnnnnnnnnnnnnnnnnnnnnnnnnnnnnnnnnnnnnnnnnnnnnnnnnnnnnnnnnnnnnnnnnnnnnnnnnnnnnnnnnnnnnnnnnnnnnnnnnnnnnnnnnnnnnnnnnnnnnnnnnnnnnnnnnnnnnnnnnnnnnnnnnnnnnnnnnnnnnnnnnnnnnnnnnnnnnnnnnnnnnnnnnnnnnnnnnnnnnnnnnnnnnnnnnnnnnnnnnnnnnnnnnnnnnnnnnnnnnnnnnnnnnnnnnnnnnnnnnnnnnnnnnnnnnnnnnnnnnnnnnnnnnnnnnnnnnnnnnnnnnnnnnnnnnnnnnnnnnnnnnnnnnnnnnnnnnnnnnnnnnnnnnnnnnnnnnnnnnnnnnnnnnnnnnnnnnnnnnnnnnnnnnnnnnnnnnnnnnnnnnnnnnnnnnnnnnnnnnnnnnnnnnnnnnnnnnnnnnnnnnnnnnnnnnnnnnnnnnnnnnnnnnnnnnnnnnnnnnnnnnnnnnnnnnnnnnnnnnnnnnnnnnnnnnnnnnnnnnnnnnnnnnnnnnnnnnnnnnnnnnnnnnnnnnnnnnnnnnnnnnnnnnnnnnnnnnnnnnnnnnnnnnnnnnnnnnnnnnnnnnnnnnnnnnnnnnnnnnnnnnnnnnnnnnnnnnnnnnnnnnnnnttgccacgcaaaatctcgtcgcgcaatgcgtctacgacctgctggtaaaggggtttgaaggatggaagattcaaccgcataaactaattcattataggtttttaacttgacccagcgctagggtatttttttagtttcgaacttgactaatggattagattttttaaaaactattatcaattcaaggacttaagcttacaagttgaaagcgctgaacaagctgacagagatattataaaaaaaagaaggatttagaacctgagctaaaagcagccgccttaatgatacttgaggcaatagatgattctgcttggtactacaaagcaggatttactgatgatggcagcgcaatgctttttcacaaaatgccgggcagattattaaagaaggtggcaaacagaaaagtagttgcatttataagtgctactttgtctatatctaacagctttgatgatttcaaccgagcaacggttatacaacaccaaagcaaactttctacaatcattgagcctttgcaccacggtaagctagggttttatgtgtcagatgttttagttaatacgtctgaatggttagatgtaattcaaaatatcatatctactgctagtgcgccaatcttagttgttactccaagccatgagcttgccaaaacactaggcgctgttatagaaaactcaacaataaggggcgcagaagagacggctagtcaagcagcatttcgtatgtgtgaaagtaaagtcttgattgctgctggtgcatgggcgggattagatactccaattccgtgggcatcaattgttattcctcgtgtaccgcatgataggccggtagtaattgagggaaatcacgaaagcagttttttagatatatgaaatactgctttgaggaggatgcgtcaagttattggacgcgggttacgatcgccagaagctgaatgtgacatctatatttgtgatgatcgatttaaaaacattgagtcatttgtgccaactagatttcgtactgcatgggttcacaaaggatttcttgaaggtagtcggcgtgaggttctactttccaaaattgagcgtgatgcttcagttcgtaaggaggctttaaagcagtttggtcatcaatgcatgtcctgcgtattcaagccaaaagtcatatctcagttggatgttcatcacttgtttccattgcatgagggagcgagccggactgaatttaatcatctagctgttttgtgtgccaactgtcaccggttcgctcactcaattgaaccgccactaacggttcaagctatgaagtcttttgaccctaaatgttaacttctctccgattggccttttagaaaatgctaacgatctaactactgtgcagcttggatcctcaagtggcttgtgtaagctcgtattactttatttatacgaaccatatgagatacgacacttagtatttgattgaggccaaaggtcgcaagctcgtttggttgaaccagtaactctaaacccaaaaaacatattttgttaaaatcagcacctaagcttagtagacaattaaggggtgttatgagcgacaaagtatcggtaaaacgagtcaaagaagagtgctccgctgagggtaaagctcagtaccttcaaactgccaacggaaagatcaaatgcctgcgctgcacagcccaatcaagcaggacaaaactacaatgcggcaggccagcaatcaaatcatcccgcacgcagaagtgccaatttcatggtggcaaacctcactctgaggagaccctgaaacgcatctcagaagcgaacaccatccacggtcaatccaccaaagcagcaaaagaacagaacagacatgacagtgccctaatgcatgagttggaggatgcaatcgcagtactaaagatgggtgaggggccgcggattagaggcccaaaacccaagggttacaagccggtaaggacacaggccgatgtggtgaggatgattcaggagcggttgttgcatatagtgtgatcgctcaaacgatgagctaaattttgtttaatagctaaccccatcatccagcaattctcacgcaagagtggtttgttgaaactaaatattcaatccatcgctttaaagccatcacaccgctgaagtagcatgacccaatcggttccgatataggcatctcgctcgcggatgcacaccttagattgctgccaatttttgcagtaccaaccattgacattaaccaaatgtctgcattcaaggcaactaattcggtcatcagcgccttgttcacggtctcgtatcaaaagcttgtcagccaatgcctctgacttctctgcgtccagcccacgacttttgtaccgagaaacccgtgcttgaaaaattgcaatttcatcggtattcattgcgctgctgttgggataacaccaaaggtttgaatagctttgtaaaccatcttgatcgctggaattgatcttctggctcaaaaaatcttcaattagctcctgattctgtactgacgaaactgacgaaagtcccgaatcaggggtttcgtcagttttgacagtacggttttgcacctcttttgcaaaaatcttaactgctcgatcagtccacgatttcatttacttgcgtccaacaaacgtggattgatgtaataacggactgttggtcgcccacttggtggagtgtcctcaaaactatgtacgtggttgtgttcttctaggattgcaagagcgccttcagcatcattaactgttgtagcgccagaccattgtttacgttgcaagtcacgcgcggtaaatccatctttcaatttcccctgaattagcctcttacttattctcctagccgtagcaacttttgctacttcaatcaatccataaatacgtcgcgcatgcccagccaagtattcacaccacgaagctgctctgatggcgcagaaagcactgactgcccctatggatccctctgcaaggtgcagtatcaatgctatggagcagaacagtttttcaaatttcccgaaatgctgttgcatcatcggatcttcttctttggctatataaattttgtgtagatcctcgcaccac

SEQ ID NO: 204 - DNA, 12143 bp, Artificial Sequence
  Synthetic Oligonucleotide
  misc_feature (1)..(9113): n is a, c, g, or t
nnnnnnnnnnnnnnnnnnnnnnnnnnnnnnnnnnnnnnnnnnnnnnnnnnnnnnnnnnnnnnnnnnnnnnnnnnnnnnnnnnnnnnnnnnnnnnnnnnnnnnnnnnnnnnnnnnnnnnnnnnnnnnnnnnnnnnnnnnnnnnnnnnnnnnnnnnnnnnnnnnnnnnnnnnnnnnnnnnnnnnnnnnnnnnnnnnnnnnnnnnnnnnnnnnnnnnnnnnnnnnnnnnnnnnnnnnnnnnnnnnnnnnnnnnnnnnnnnnnnnnnnnnnnnnnnnnnnnnnnnnnnnnnnnnnnnnnnnnnnnnnnnnnnnnnnnnnnnnnnnnnnnnnnnnnnnnnnnnnnnnnnnnnnnnnnnnnnnnnnnnnnnnnnnnnnnnnnnnnnnnnnnnnnnnnnnnnnnnnnnnnnnnnnnnnnnnnnnnnnnnnnnnnnnnnnnnnnnnnnnnnnnnnnnnnnnnnnnnnnnnnnnnnnnnnnnnnnnnnnnnnnnnnnnnnnnnnnnnnnnnnnnnnnnnnnnnnnnnnnnnnnnnnnnnnnnnnnnnnnnnnnnnnnnnnnnnnnnnnnnnnnnnnnnnnnnnnnnnnnnnnnnnnnnnnnnnnnnnnnnnnnnnnnnnnnnnnnnnnnnnnnnnnnnnnnnnnnnnnnnnnnnnnnnnnnnnnnnnnnnnnnnnnnnnnnnnnnnnnnnnnnnnnnnnnnnnnnnnnnnnnnnnnnnnnnnnnnnnnnnnnnnnnnnnnnnnnnnnnnnnnnnnnnnnnnnnnnnnnnnnnnnnnnnnnnnnnnnnnnnnnnnnnnnnnnnnnnnnnnnnnnnnnnnnnnnnnnnnnnnnnnnnnnnnnnnnnnnnnnnnnnnnnnnnnnnnnnnnnnnnnnnnnnnnnnnnnnnnnnnnnnnnnnnnnnnnnnnnnnnnnnnnnnnnnnnnnnnnnnnnnnnnnnnnnnnnnnnnnnnnnnnnnnnnnnnnnnnnnnnnnnnnnnnnnnnnnnnnnnnnnnnnnnnnnnnnnnnnnnnnnnnnnnnnnnnnnnnnnnnnnnnnnnnnnnnnnnnnnnnnnnnnnnnnnnnnnnnnnnnnnnnnnnnnnnnnnnnnnnnnnnnnnnnnnnnnnnnnnnnnnnnnnnnnnnnnnnnnnnnnnnnnnnnnnnnnnnnnnnnnnnnnnnnnnnnnnnnnnnnnnnnnnnnnnnnnnnnnnnnnnnnnnnnnnnnnnnnnnnnnnnnnnnnnnnnnnnnnnnnnnnnnnnnnnnnnnnnnnnnnnnnnnnnnnnnnnnnnnnnnnnnnnnnnnnnnnnnnnnnnnnnnnnnnnnnnnnnnnnnnnnnnnnnnnnnnnnnnnnnnnnnnnnnnnnnnnnnnnnnnnnnnnnnnnnnnnnnnnnnnnnnnnnnnnnnnnnnnnnnnnnnnnnnnnnnnnnnnnnnnnnnnnnnnnnnnnnnnnnnnnnnnnnnnnnnnnnnnnnnnnnnnnnnnnnnnnnnnnnnnnnnnnnnnnnnnnnnnnnnnnnnnnnnnnnnnnnnnnnnnnnnnnnnnnnnnnnnnnnnnnnnnnnnnnnnnnnnnnnnnnnnnnnnnnnnnnnnnnnnnnnnnnnnnnnnnnnnnnnnnnnnnnnnnnnnnnnnnnnnnnnnnnnnnnnnnnnnnnnnnnnnnnnnnnnnnnnnnnnnnnnnnnnnnnnnnnnnnnnnnnnnnnnnnnnnnnnnnnnnnnnnnnnnnnnnnnnnnnnnnnnnnnnnnnnnnnnnnnnnnnnnnnnnnnnnnnnnnnnnnnnnnnnnnnnnnnnnnnnnnnnnnnnnnnnnnnnnnnnnnnnnnnnnnnnnnnnnnnnnnnnnnnnnnnnnnnnnnnnnnnnnnnnnnnnnnnnnnnnnnnnnnnnnnnnnnnnnnnnnnnnnnnnnnnnnnnnnnnnnnnnnnnnnnnnnnnnnnnnnnnnnnnnnnnnnnnnnnnnnnnnnnnnnnnnnnnnnnnnnnnnnnnnnnnnnnnnnnnnnnnnnnnnnnnnnnnnnnnnnnnnnnnnnnnnnnnnnnnnnnnnnnnnnnnnnnnnnnnnnnnnnnnnnnnnnnnnnnnnnnnnnnnnnnnnnnnnnnnnnnnnnnnnnnnnnnnnnnnnnnnnnnnnnnnnnnnnnnnnnnnnnnnnnnnnnnnnnnnnnnnnnnnnnnnnnnnnnnnnnnnnnnnnnnnnnnnnnnnnnnnnnnnnnnnnnnnnnnnnnnnnnnnnnnnnnnnnnnnnnnnnnnnnnnnnnnnnnnnnnnnnnnnnnnnnnnnnnnnnnnnnnnnnnnnnnnnnnnnnnnnnnnnnnnnnnnnnnnnnnnnnnnnnnnnnnnnnnnnnnnnnnnnnnnnnnnnnnnnnnnnnnnnnnnnnnnnnnnnnnnnnnnnnnnnnnnnnnnnnnnnnnnnnnnnnnnnnnnnnnnnnnnnnnnnnnnnnnnnnnnnnnnnnnnnnnnnnnnnnnnnnnnnnnnnnnnnnnnnnnnnnnnnnnnnnnnnnnnnnnnnnnnnnnnnnnnnnnnnnnnnnnnnnnnnnnnnnnnnnnnnnnnnnnnnnnnnnnnnnnnnnnnnnnnnnnnnnnnnnnnnnnnnnnnnnnnnnnnnnnnnnnnnnnnnnnnnnnnnnnnnnnnnnnnnnnnnnnnnnnnnnnnnnnnnnnnnnnnnnnnnnnnnnnnnnnnnnnnnnnnnnnnnnnnnnnnnnnnnnnnnnnnnnnnnnnnnnnnnnnnnnnnnnnnnnnnnnnnnnnnnnnnnnnnnnnnnnnnnnnnnnnnnnnnnnnnnnnnnnnnnnnnnnnnnnnnnnnnnnnnnnnnnnnnnnnnnnnnnnnnnnnnnnnnnnnnnnnnnnnnnnnnnnnnnnnnnnnnnnnnnnnnnnnnnnnnnnnnnnnnnnnnnnnnnnnnnnnnnnnnnnnnnnnnnnnnnnnnnnnnnnnnnnnnnnnnnnnnnnnnnnnnnnnnnnnnnnnnnnnnnnnnnnnnnnnnnnnnnnnnnnnnnnnnnnnnnnnnnnnnnnnnnnnnnnnnnnnnnnnnnnnnnnnnnnnnnnnnnnnnnnnnnnnnnnnnnnnnnnnnnnnnnnnnnnnnnnnnnnnnnnnnnnnnnnnnnnnnnnnnnnnnnnnnnnnnnnnnnnnnnnnnnnnnnnnnnnnnnnnnnnnnnnnnnnnnnnnnnnnnnnnnnnnnnnnnnnnnnnnnnnnnnnnnnnnnnnnnnnnnnnnnnnnnnnnnnnnnnnnnnnnnnnnnnnnnnnnnnnnnnnnnnnnnnnnnnnnnnnnnnnnnnnnnnnnnnnnnnnnnnnnnnnnnnnnnnnnnnnnnnnnnnnnnnnnnnnnnnnnnnnnnnnnnnnnnnnnnnnnnnnnnnnnnnnnnnnnnnnnnnnnnnnnnnnnnnnnnnnnnnnnnnnnnnnnnnnnnnnnnnnnnnnnnnnnnnnnnnnnnnnnnnnnnnnnnnnnnnnnnnnnnnnnnnnnnnnnnnnnnnnnnnnnnnnnnnnnnnnnnnnnnnnnnnnnnnnnnnnnnnnnnnnnnnnnnnnnnnnnnnnnnnnnnnnnnnnnnnnnnnnnnnnnnnnnnnnnnnnnnnnnnnnnnnnnnnnnnnnnnnnnnnnnnnnnnnnnnnnnnnnnnnnnnnnnnnnnnnnnnnnnnnnnnnnnnnnnnnnnnnnnnnnnnnnnnnnnnnnnnnnnnnnnnnnnnnnnnnnnnnnnnnnnnnnnnnnnnnnnnnnnnnnnnnnnnnnnnnnnnnnnnnnnnnnnnnnnnnnnnnnnnnnnnnnnnnnnnnnnnnnnnnnnnnnnnnnnnnnnnnnnnnnnnnnnnnnnnnnnnnnnnnnnnnnnnnnnnnnnnnnnnnnnnnnnnnnnnnnnnnnnnnnnnnnnnnnnnnnnnnnnnnnnnnnnnnnnnnnnnnnnnnnnnnnnnnnnnnnnnnnnnnnnnnnnnnnnnnnnnnnnnnnnnnnnnnnnnnnnnnnnnnnnnnnnnnnnnnnnnnnnnnnnnnnnnnnnnnnnnnnnnnnnnnnnnnnnnnnnnnnnnnnnnnnnnnnnnnnnnnnnnnnnnnnnnnnnnnnnnnnnnnnnnnnnnnnnnnnnnnnnnnnnnnnnnnnnnnnnnnnnnnnnnnnnnnnnnnnnnnnnnnnnnnnnnnnnnnnnnnnnnnnnnnnnnnnnnnnnnnnnnnnnnnnnnnnnnnnnnnnnnnnnnnnnnnnnnnnnnnnnnnnnnnnnnnnnnnnnnnnnnnnnnnnnnnnnnnnnnnnnnnnnnnnnnnnnnnnnnnnnnnnnnnnnnnnnnnnnnnnnnnnnnnnnnnnnnnnnnnnnnnnnnnnnnnnnnnnnnnnnnnnnnnnnnnnnnnnnnnnnnnnnnnnnnnnnnnnnnnnnnnnnnnnnnnnnnnnnnnnnnnnnnnnnnnnnnnnnnnnnnnnnnnnnnnnnnnnnnnnnnnnnnnnnnnnnnnnnnnnnnnnnnnnnnnnnnnnnnnnnnnnnnnnnnnnnnnnnnnnnnnnnnnnnnnnnnnnnnnnnnnnnnnnnnnnnnnnnnnnnnnnnnnnnnnnnnnnnnnnnnnnnnnnnnnnnnnnnnnnnnnnnnnnnnnnnnnnnnnnnnnnnnnnnnnnnnnnnnnnnnnnnnnnnnnnnnnnnnnnnnnnnnnnnnnnnnnnnnnnnnnnnnnnnnnnnnnnnnnnnnnnnnnnnnnnnnnnnnnnnnnnnnnnnnnnnnnnnnnnnnnnnnnnnnnnnnnnnnnnnnnnnnnnnnnnnnnnnnnnnnnnnnnnnnnnnnnnnnnnnnnnnnnnnnnnnnnnnnnnnnnnnnnnnnnnnnnnnnnnnnnnnnnnnnnnnnnnnnnnnnnnnnnnnnnnnnnnnnnnnnnnnnnnnnnnnnnnnnnnnnnnnnnnnnnnnnnnnnnnnnnnnnnnnnnnnnnnnnnnnnnnnnnnnnnnnnnnnnnnnnnnnnnnnnnnnnnnnnnnnnnnnnnnnnnnnnnnnnnnnnnnnnnnnnnnnnnnnnnnnnnnnnnnnnnnnnnnnnnnnnnnnnnnnnnnnnnnnnnnnnnnnnnnnnnnnnnnnnnnnnnnnnnnnnnnnnnnnnnnnnnnnnnnnnnnnnnnnnnnnnnnnnnnnnnnnnnnnnnnnnnnnnnnnnnnnnnnnnnnnnnnnnnnnnnnnnnnnnnnnnnnnnnnnnnnnnnnnnnnnnnnnnnnnnnnnnnnnnnnnnnnnnnnnnnnnnnnnnnnnnnnnnnnnnnnnnnnnnnnnnnnnnnnnnnnnnnnnnnnnnnnnnnnnnnnnnnnnnnnnnnnnnnnnnnnnnnnnnnnnnnnnnnnnnnnnnnnnnnnnnnnnnnnnnnnnnnnnnnnnnnnnnnnnnnnnnnnnnnnnnnnnnnnnnnnnnnnnnnnnnnnnnnnnnnnnnnnnnnnnnnnnnnnnnnnnnnnnnnnnnnnnnnnnnnnnnnnnnnnnnnnnnnnnnnnnnnnnnnnnnnnnnnnnnnnnnnnnnnnnnnnnnnnnnnnnnnnnnnnnnnnnnnnnnnnnnnnnnnnnnnnnnnnnnnnnnnnnnnnnnnnnnnnnnnnnnnnnnnnnnnnnnnnnnnnnnnnnnnnnnnnnnnnnnnnnnnnnnnnnnnnnnnnnnnnnnnnnnnnnnnnnnnnnnnnnnnnnnnnnnnnnnnnnnnnnnnnnnnnnnnnnnnnnnnnnnnnnnnnnnnnnnnnnnnnnnnnnnnnnnnnnnnnnnnnnnnnnnnnnnnnnnnnnnnnnnnnnnnnnnnnnnnnnnnnnnnnnnnnnnnnnnnnnnnnnnnnnnnnnnnnnnnnnnnnnnnnnnnnnnnnnnnnnnnnnnnnnnnnnnnnnnnnnnnnnnnnnnnnnnnnnnnnnnnnnnnnnnnnnnnnnnnnnnnnnnnnnnnnnnnnnnnnnnnnnnnnnnnnnnnnnnnnnnnnnnnnnnnnnnnnnnnnnnnnnnnnnnnnnnnnnnnnnnnnnnnnnnnnnnnnnnnnnnnnnnnnnnnnnnnnnnnnnnnnnnnnnnnnnnnnnnnnnnnnnnnnnnnnnnnnnnnnnnnnnnnnnnnnnnnnnnnnnnnnnnnnnnnnnnnnnnnnnnnnnnnnnnnnnnnnnnnnnnnnnnnnnnnnnnnnnnnnnnnnnnnnnnnnnnnnnnnnnnnnnnnnnnnnnnnnnnnnnnnnnnnnnnnnnnnnnnnnnnnnnnnnnnnnnnnnnnnnnnnnnnnnnnnnnnnnnnnnnnnnnnnnnnnnnnnnnnnnnnnnnnnnnnnnnnnnnnnnnnnnnnnnnnnnnnnnnnnnnnnnnnnnnnnnnnnnnnnnnnnnnnnnnnnnnnnnnnnnnnnnnnnnnnnnnnnnnnnnnnnnnnnnnnnnnnnnnnnnnnnnnnnnnnnnnnnnnnnnnnnnnnnnnnnnnnnnnnnnnnnnnnnnnnnnnnnnnnnnnnnnnnnnnnnnnnnnnnnnnnnnnnnnnnnnnnnnnnnnnnnnnnnnnnnnnnnnnnnnnnnnnnnnnnnnnnnnnnnnnnnnnnnnnnnnnnnnnnnnnnnnnnnnnnnnnnnnnnnnnnnnnnnnnnnnnnnnnnnnnnnnnnnnnnnnnnnnnnnnnnnnnnnnnnnnnnnnnnnnnnnnnnnnnnnnnnnnnnnnnnnnnnnnnnnnnnnnnnnnnnnnnnnnnnnnnnnnnnnnnnnnnnnnnnnnnnnnnnnnnnnnnnnnnnnnnnnnnnnnnnnnnnnnnnnnnnnnnnnnnnnnnnnnnnnnnnnnnnnnnnnnnnnnnnnnnnnnnnnnnnnnnnnnnnnnnnnnnnnnnnnnnnnnnnnnnnnnnnnnnnnnnnnnnnnnnnnnnnnnnnnnnnnnnnnnnnnnnnnnnnnnnnnnnnnnnnnnnnnnnnnnnnnnnnnnnnnnnnnnnnnnnnnnnnnnnnnnnnnnnnnnnnnnnnnnnnnnnnnnnnnnnnnnnnnnnnnnnnnnnnnnnnnnnnnnnnnnnnnnnnnnnnnnnnnnnnnnnnnnnnnnnnnnnnnnnnnnnnnnnnnnnnnnnnnnnnnnnnnnnnnnnnnnnnnnnnnnnnnnnnnnnnnnnnnnnnnnnnnnnnnnnnnnnnnnnnnnnnnnnnnnnnnnnnnnnnnnnnnnnnnnnnnnnnnnnnnnnnnnnnnnnnnnnnnnnnnnnnnnnnnnnnnnnnnnnnnnnnnnnnnnnnnnnnnnnnnnnnnnnnnnnnnnnnnnnnnnnnnnnnnnnnnnnnnnnnnnnnnnnnnnnnnnnnnnnnnnnnnnnnnnnnnnnnnnnnnnnnnnnnnnnnnnnnnnnnnnnnnnnnnnnnnnnnnnnnnnnnnnnnnnnnnnnnnnnnnnnnnnnnnnnnnnnnnnnnnnnnnnnnnnnnnnnnnnnnnnnnnnnnnnnnnnnnnnnnnnnnnnnnnnnnnnnnnnnnnnnnnnnnnnnnnnnnnnnnnnnnnnnnnnnnnnnnnnnnnnnnnnnnnnnnnnnnnnnnnnnnnnnnnnnnnnnnnnnnnnnnnnnnnnnnnnnnnnnnnnnnnnnnnnnnnnnnnnnnnnnnnnnnnnnnnnnnnnnnnnnnnnnnnnnnnnnnnnnnnnnnnnnnnnnnnnnnnnnnnnnnnnnnnnnnnnnnnnnnnnnnnnnnnnnnnnnnnnnnnnnnnnnnnnnnnnnnnnnnnnnnnnnnnnnnnnnnnnnnnnnnnnnnnnnnnnnnnnnnnnnnnnnnnnnnnnnnnnnnnnnnnnnnnnnnnnnnnnnnnnnnnnnnnnnnnnnnnnnnnnnnnnnnnnnnnnnnnnnnnnnnnnnnnnnnnnnnnnnnnnnnnnnnnnnnnnnnnnnnnnnnnnnnnnnnnnnnnnnnnnnnnnnnnnnnnnnnnnnnnnnnnnnnnnnnnnnnnnnnnnnnnnnnnnnnnnnnnnnnnnnnnnnnnnnnnnnnnnnnnnnnnnnnnnnnnnnnnnnnnnnnnnnnnnnnnnnnnnnnnnnnnnnnnnnnnnnnnnnnnnnnnnnnnnnnnnnnnnnnnnnnnnnnnnnnnnnnnnnnnnnnnnnnnnnnnnnnnnnnnnnnnnnnnnnnnnnnnnnnnnnnnnnnnnnnnnnnnnnnnnnnnnnnnnnnnnnnnnnnnnnnnnnnnnnnnnnnnnnnnnnnnnnnnnnnnnnnnnnnnnnnnnnnnnnnnnnnnnnnnnnnnnnnnnnnnnnnnnnnnnnnnnnnnnnnnnnnnnnnnnnnnnnnnnnnnnnnnnnnnnnnnnnnnnnnnnnnnnnnnnnnnnnnnnnnnnnnnnnnnnnnnnnnnnnnnnnnnnnnnnnnnnnnnnnnnnnnnnnnnnnnnnnnnnnnnnnnnnnnnnnnnnnnnnnnnnnnnnnnnnnnnnnnnnnnnnnnnnnnnnnnnnnnnnnnnnnnnnnnnnnnnnnnnnnnnnnnnnnnnnnnnnnnnnnnnnnnnnnnnnnnnnnnnnnnnnnnnnnnnnnnnnnnnnnnnnnnnnnnnnnnnnnnnnnnnnnnnnnnnnnnnnnnnnnnnnnnnnnnnnnnnnnnnnnnnnnnnnnnnnnnnnnnnnnnnnnnnnnnnnnnnnnnnnnnnnnnnnnnnnnnnnnnnnnnnnnnnnnnnnnnnnnnnnnnnnnnnnnnnnnnnnnnnnnnnnnnnnnnnnnnnnnnnnnnnnnnnnnnnnnnnnnnnnnnnnnnnnnnnnnnnnnnnnnnnnnnnnnnnnnnnnnnnnnnnnnnnnnnnnnnnnnnnnnnnnnnnnnnnnnnnnnnnnnnnnnnnnnnnnnnnnnnnnnnnnnnnnnnnnnnnnnnnnnnnnnnnnnnnnnnnnnnnnnnnnnnnnnnnnnnnnnnnnnnnnnnnnnnnnnnnnnnnnnnnnnnnnnnnnnnnnnnnnnnnnnnnnnnnnnnnnnnnnnnnnnnnnnnnnnnnnnnnnnnnnnnnnnnnnnnnnnnnnnnnnnnnnnnnnnnnnnnnnnnnnnnnnnnnnnnnnnnnnnnnnnnnnnnnnnnnnnnnnnnnnnnnnnnnnnnnnnnnnnnnnnnnnnnnnnnnnnnnnnnnnnnnnnnnnnnnnnnnnnnnnnnnnnnnnnnnnnnnnnnnnnnnnnnnnnnnnnnnnnnnnnnnnnnnnnnnnnnnnnnnnnnnnnnnnnnnnnnnnnnnnnnnnnnnnnnnnnnnnnnnnnnnnnnnnnnnnnnnnnnnnnnnnnnnnnnnnnnnnnnnnnnnnnnnnnnnnnnnnnnnnnnnnnnnnnnnnnnnnnnnnnnnnnnnnnnnnngaaagttcgagccgcaaagaacaaaaacgaagacgctggtgagctcaaaaaagaactggaagaggcggagaagctgctcgctaaacatgtcgcaggcatgggtgacatgaagaactcaagcaagacgcctggcattagttatcacgctcttcccgcctcactcgagctaaatggtcgcatcgtcattctaaatgcaaaagatcgggacttagagatgttggaatatgcgctagaccaactaagtctcaacccggtcttcggtgctcaatcagcaagaggctgcggtgaaatcagtgggaccttcgacattaatatcgaaggaaaattcgcaaaaaaaatgacaattggtggctatgaagcagccaaagtcacagttttttgaaggtagaaacacctatttcagcaatttcttcaatgcattatgcgatatctactgaagccactcccgattcgagtggttactgaaacaatcgactatcaagaaaagaactatagcggactgaagccactcccgattcgagtggttactgaaaccgagccttcgatgctttcagtgctgcctttactgaagccactcccgattcgagtggttactgaaacccaaaaggctcaacagagatcggctggggtactgaagccactcccgattcgagtggttactgaaacgtggcacctgtgtcgccgcgaggaactgtgactgaagccactcccgattcgagtggttactgaaacgtgtagagcatgtagagctggtgctgcgcactgaagccactcccgattcgagtggttactgcaacttacttccgggaaataaagaacccggtcgatctaaagccacactaattcgtgtgtggttcctttgtgtaaatagtgcaagaattattttatgttccgttcccacgaacaagaaaatttttataaaatcatcgcggcgcacctcgaggtctgcgatgcgccactgctgctcgaagggggaaccggcctcggtaaaaccagggcctacctagcggcagtcgcgaagaccgataaaaccgtcgcaatcattttaccgacgcatctattgatcaatcagcttgtcgcctcaaaggaccttgaaaacgttgggcttgaggtcacggctttcagaccatcgcgtgattttgagactagggctgactatgtggctcatagaacggcctctatggccggacgcgtgatgctttgcacagcagccagcgtaatcatcgatcagcgcctcgctgggaactacaacggtgttatcaatcgagagctgttggtctttgatgaggctgacgagcttcccgccgccgccgcgctgcagcaagaccaagaagtcacggctagtgcccttcgcgatgccaacgtgaaactgtcgactgcagaagacaccttacgaaaactccttaaaaaaaagaggctcgaaccagaaacccgagcggccgccttgatggctctcgaggccatcgaagagcctgcttggttttatcaaaccgggataaataaagatggcggcatatccctttgtcaccgattacctggcaggctccttaaacgaatagccaacaaaggaaactccatattcattagcgcgaccctatcggtcgctggaagcttcaaaaattttcaaggaagcatggggatagacgcaatcagtagcctgtcgtcgatgatagagcctgaacaccacgggactatcgaactccatacgccacttgacgaagagcctgcggaggtcgtccgtagagccgcgaagccctgtctcgttgtaacccccagcttcaagttggcggaaacaatcggcaaacagatacccaacgccactgtaagattacaaactgagaccactactgaggcggcgcaacgaataggccctgatggtgtgttgattgcggcaggggcttgggctggtttggatactccgacagtttgggcatcaatcgtcgttccgaaaattccgttttccgccccaactgtgctcgacgggaaaatcgaaagccaatacctcgatagtcggaacgttgcgatcaggcggatgcgtcaggtgataggcagaggcctgaggacaccggatgcgaaatgccaggtgtacattcttgatggtcgttacaaggccttaggcgctttcgtacctgaacgctttcaggagtcctggatcgagggtgacattcaagtctatttacaggctgaagcaaaacggatgcgagggtatcggaagaaggctctagagcattacgggagcagttgcttcgtgtgttcttttgagccgaaagtactccgccaaatacacatacatcacttggaaccaattgctgagggtgtcaggacgacgactctagaggatctgcggccactttgtgccaattgtcatgagcttgcgcatagcgagagccccccaatcacaatcgaacgcctaaaggggatggagggcccataagacaaatgccacccgtgcctaaattctgccgcatctaacgattattaagaataagaagatgggtagggagaatatgagatggcgagtagtggcattatgtggatcgattacacattcaatttagcagtgcagcttttgtatgtttgcgcagaaattctcggcataacctacgaagaaattaacgtctggctttttgtcataggctggccgctgcaaactataatcatgggtgccgtaataatatgcctctggctcaaattaaatcgtcaagaagatcatcaggttcaaaaatagccacagatttacggctagtcatttggaaccacaaagccgctattccccccgctacccccggttaacgaggagccagtctgactaatctattggcacaatcctggcacaatcagggcacattagaggccgattttcgcttgtgctagaattcgatctcgactagggcaatctctaagttgttgttttcgttgtctttttgtcttaacccgtagctcagctggatagagcgctgccctccgaaggcagaggtcagaggttcgaatcctctcgggtgcgccacttttctccataaaaacaatgac

SEQ ID NO: 205 - DNA, 12143 bp, Artificial Sequence; identical to SEQ ID NO: 204
  Synthetic Oligonucleotide
  misc_feature (1)..(9113): n is a, c, g, or t

SEQ ID NO: 206 - DNA, 12123 bp, Artificial Sequence
  Synthetic Oligonucleotide
  misc_feature (1)..(8867): n is a, c, g, or t
nnnnnnnnnnnnnnnnnnnnnnnnnnnnnnnnnnnnnnnnnnnnnnnnnnnnnnnnnnnnnnnnnnnnnnnnnnnnnnnnnnnnnnnnnnnnnnnnnnnnnnnnnnnnnnnnnnnnnnnnnnnnnnnnnnnnnnnnnnnnnnnnnnnnnnnnnnnnnnnnnnnnnnnnnnnnnnnnnnnnnnnnnnnnnnnnnnnnnnnnnnnnnnnnnnnnnnnnnnnnnnnnnnnnnnnnnnnnnnnnnnnnnnnnnnnnnnnnnnnnnnnnnnnnnnnnnnnnnnnnnnnnnnnnnnnnnnnnnnnnnnnnnnnnnnnnnnnnnnnnnnnnnnnnnnnnnnnnnnnnnnnnnnnnnnnnnnnnnnnnnnnnnnnnnnnnnnnnnnnnnnnnnnnnnnnnnnnnnnnnnnnnnnnnnnnnnnnnnnnnnnnnnnnnnnnnnnnnnnnnnnnnnnnnnnnnnnnnnnnnnnnnnnnnnnnnnnnnnnnnnnnnnnnnnnnnnnnnnnnnnnnnnnnnnnnnnnnnnnnnnnnnnnnnnnnnnnnnnnnnnnnnnnnnnnnnnnnnnnnnnnnnnnnnnnnnnnnnnnnnnnnnnnnnnnnnnnnnnnnnnnnnnnnnnnnnnnnnnnnnnnnnnnnnnnnnnnnnnnnnnnnnnnnnnnnnnnnnnnnnnnnnnnnnnnnnnnnnnnnnnnnnnnnnnnnnnnnnnnnnnnnnnnnnnnnnnnnnnnnnnnnnnnnnnnnnnnnnnnnnnnnnnnnnnnnnnnnnnnnnnnnnnnnnnnnnnnnnnnnnnnnnnnnnnnnnnnnnnnnnnnnnnnnnnnnnnnnnnnnnnnnnnnnnnnnnnnnnnnnnnnnnnnnnnnnnnnnnnnnnnnnnnnnnnnnnnnnnnnnnnnnnnnnnnnnnnnnnnnnnnnnnnnnnnnnnnnnnnnnnnnnnnnnnnnnnnnnnnnnnnnnnnnnnnnnnnnnnnnnnnnnnnnnnnnnnnnnnnnnnnnnnnnnnnnnnnnnnnnnnnnnnnnnnnnnnnnnnnnnnnnnnnnnnnnnnnnnnnnnnnnnnnnnnnnnnnnnnnnnnnnnnnnnnnnnnnnnnnnnnnnnnnnnnnnnnnnnnnnnnnnnnnnnnnnnnnnnnnnnnnnnnnnnnnnnnnnnnnnnnnnnnnnnnnnnnnnnnnnnnnnnnnnnnnnnnnnnnnnnnnnnnnnnnnnnnnnnnnnnnnnnnnnnnnnnnnnnnnnnnnnnnnnnnnnnnnnnnnnnnnnnnnnnnnnnnnnnnnnnnnnnnnnnnnnnnnnnnnnnnnnnnnnnnnnnnnnnnnnnnnnnnnnnnnnnnnnnnnnnnnnnnnnnnnnnnnnnnnnnnnnnnnnnnnnnnnnnnnnnnnnnnnnnnnnnnnnnnnnnnnnnnnnnnnnnnnnnnnnnnnnnnnnnnnnnnnnnnnnnnnnnnnnnnnnnnnnnnnnnnnnnnnnnnnnnnnnnnnnnnnnnnnnnnnnnnnnnnnnnnnnnnnnnnnnnnnnnnnnnnnnnnnnnnnnnnnnnnnnnnnnnnnnnnnnnnnnnnnnnnnnnnnnnnnnnnnnnnnnnnnnnnnnnnnnnnnnnnnnnnnnnnnnnnnnnnnnnnnnnnnnnnnnnnnnnnnnnnnnnnnnnnnnnnnnnnnnnnnnnnnnnnnnnnnnnnnnnnnnnnnnnnnnnnnnnnnnnnnnnnnnnnnnnnnnnnnnnnnnnnnnnnnnnnnnnnnnnnnnnnnnnnnnnnnnnnnnnnnnnnnnnnnnnnnnnnnnnnnnnnnnnnnnnnnnnnnnnnnnnnnnnnnnnnnnnnnnnnnnnnnnnnnnnnnnnnnnnnnnnnnnnnnnnnnnnnnnnnnnnnnnnnnnnnnnnnnnnnnnnnnnnnnnnnnnnnnnnnnnnnnnnnnnnnnnnnnnnnnnnnnnnnnnnnnnnnnnnnnnnnnnnnnnnnnnnnnnnnnnnnnnnnnnnnnnnnnnnnnnnnnnnnnnnnnnnnnnnnnnnnnnnnnnnnnnnnnnnnnnnnnnnnnnnnnnnnnnnnnnnnnnnnnnnnnnnnnnnnnnnnnnnnnnnnnnnnnnnnnnnnnnnnnnnnnnnnnnnnnnnnnnnnnnnnnnnnnnnnnnnnnnnnnnnnnnnnnnnnnnnnnnnnnnnnnnnnnnnnnnnnnnnnnnnnnnnnnnnnnnnnnnnnnnnnnnnnnnnnnnnnnnnnnnnnnnnnnnnnnnnnnnnnnnnnnnnnnnnnnnnnnnnnnnnnnnnnnnnnnnnnnnnnnnnnnnnnnnnnnnnnnnnnnnnnnnnnnnnnnnnnnnnnnnnnnnnnnnnnnnnnnnnnnnnnnnnnnnnnnnnnnnnnnnnnnnnnnnnnnnnnnnnnnnnnnnnnnnnnnnnnnnnnnnnnnnnnnnnnnnnnnnnnnnnnnnnnnnnnnnnnnnnnnnnnnnnnnnnnnnnnnnnnnnnnnnnnnnnnnnnnnnnnnnnnnnnnnnnnnnnnnnnnnnnnnnnnnnnnnnnnnnnnnnnnnnnnnnnnnnnnnnnnnnnnnnnnnnnnnnnnnnnnnnnnnnnnnnnnnnnnnnnnnnnnnnnnnnnnnnnnnnnnnnnnnnnnnnnnnnnnnnnnnnnnnnnnnnnnnnnnnnnnnnnnnnnnnnnnnnnnnnnnnnnnnnnnnnnnnnnnnnnnnnnnnnnnnnnnnnnnnnnnnnnnnnnnnnnnnnnnnnnnnnnnnnnnnnnnnnnnnnnnnnnnnnnnnnnnnnnnnnnnnnnnnnnnnnnnnnnnnnnnnnnnnnnnnnnnnnnnnnnnnnnnnnnnnnnnnnnnnnnnnnnnnnnnnnnnnnnnnnnnnnnnnnnnnnnnnnnnnnnnnnnnnnnnnnnnnnnnnnnnnnnnnnnnnnnnnnnnnnnnnnnnnnnnnnnnnnnnnnnnnnnnnnnnnnnnnnnnnnnnnnnnnnnnnnnnnnnnnnnnnnnnnnnnnnnnnnnnnnnnnnnnnnnnnnnnnnnnnnnnnnnnnnnnnnnnnnnnnnnnnnnnnnnnnnnnnnnnnnnnnnnnnnnnnnnnnnnnnnnnnnnnnnnnnnnnnnnnnnnnnnnnnnnnnnnnnnnnnnnnnnnnnnnnnnnnnnnnnnnnnnnnnnnnnnnnnnnnnnnnnnnnnnnnnnnnnnnnnnnnnnnnnnnnnnnnnnnnnnnnnnnnnnnnnnnnnnnnnnnnnnnnnnnnnnnnnnnnnnnnnnnnnnnnnnnnnnnnnnnnnnnnnnnnnnnnnnnnnnnnnnnnnnnnnnnnnnnnnnnnnnnnnnnnnnnnnnnnnnnnnnnnnnnnnnnnnnnnnnnnnnnnnnnnnnnnnnnnnnnnnnnnnnnnnnnnnnnnnnnnnnnnnnnnnnnnnnnnnnnnnnnnnnnnnnnnnnnnnnnnnnnnnnnnnnnnnnnnnnnnnnnnnnnnnnnnnnnnnnnnnnnnnnnnnnnnnnnnnnnnnnnnnnnnnnnnnnnnnnnnnnnnnnnnnnnnnnnnnnnnnnnnnnnnnnnnnnnnnnnnnnnnnnnnnnnnnnnnnnnnnnnnnnnnnnnnnnnnnnnnnnnnnnnnnnnnnnnnnnnnnnnnnnnnnnnnnnnnnnnnnnnnnnnnnnnnnnnnnnnnnnnnnnnnnnnnnnnnnnnnnnnnnnnnnnnnnnnnnnnnnnnnnnnnnnnnnnnnnnnnnnnnnnnnnnnnnnnnnnnnnnnnnnnnnnnnnnnnnnnnnnnnnnnnnnnnnnnnnnnnnnnnnnnnnnnnnnnnnnnnnnnnnnnnnnnnnnnnnnnnnnnnnnnnnnnnnnnnnnnnnnnnnnnnnnnnnnnnnnnnnnnnnnnnnnnnnnnnnnnnnnnnnnnnnnnnnnnnnnnnnnnnnnnnnnnnnnnnnnnnnnnnnnnnnnnnnnnnnnnnnnnnnnnnnnnnnnnnnnnnnnnnnnnnnnnnnnnnnnnnnnnnnnnnnnnnnnnnnnnnnnnnnnnnnnnnnnnnnnnnnnnnnnnnnnnnnnnnnnnnnnnnnnnnnnnnnnnnnnnnnnnnnnnnnnnnnnnnnnnnnnnnnnnnnnnnnnnnnnnnnnnnnnnnnnnnnnnnnnnnnnnnnnnnnnnnnnnnnnnnnnnnnnnnnnnnnnnnnnnnnnnnnnnnnnnnnnnnnnnnnnnnnnnnnnnnnnnnnnnnnnnnnnnnnnnnnnnnnnnnnnnnnnnnnnnnnnnnnnnnnnnnnnnnnnnnnnnnnnnnnnnnnnnnnnnnnnnnnnnnnnnnnnnnnnnnnnnnnnnnnnnnnnnnnnnnnnnnnnnnnnnnnnnnnnnnnnnnnnnnnnnnnnnnnnnnnnnnnnnnnnnnnnnnnnnnnnnnnnnnnnnnnnnnnnnnnnnnnnnnnnnnnnnnnnnnnnnnnnnnnnnnnnnnnnnnnnnnnnnnnnnnnnnnnnnnnnnnnnnnnnnnnnnnnnnnnnnnnnnnnnnnnnnnnnnnnnnnnnnnnnnnnnnnnnnnnnnnnnnnnnnnnnnnnnnnnnnnnnnnnnnnnnnnnnnnnnnnnnnnnnnnnnnnnnnnnnnnnnnnnnnnnnnnnnnnnnnnnnnnnnnnnnnnnnnnnnnnnnnnnnnnnnnnnnnnnnnnnnnnnnnnnnnnnnnnnnnnnnnnnnnnnnnnnnnnnnnnnnnnnnnnnnnnnnnnnnnnnnnnnnnnnnnnnnnnnnnnnnnnnnnnnnnnnnnnnnnnnnnnnnnnnnnnnnnnnnnnnnnnnnnnnnnnnnnnnnnnnnnnnnnnnnnnnnnnnnnnnnnnnnnnnnnnnnnnnnnnnnnnnnnnnnnnnnnnnnnnnnnnnnnnnnnnnnnnnnnnnnnnnnnnnnnnnnnnnnnnnnnnnnnnnnnnnnnnnnnnnnnnnnnnnnnnnnnnnnnnnnnnnnnnnnnnnnnnnnnnnnnnnnnnnnnnnnnnnnnnnnnnnnnnnnnnnnnnnnnnnnnnnnnnnnnnnnnnnnnnnnnnnnnnnnnnnnnnnnnnnnnnnnnnnnnnnnnnnnnnnnnnnnnnnnnnnnnnnnnnnnnnnnnnnnnnnnnnnnnnnnnnnnnnnnnnnnnnnnnnnnnnnnnnnnnnnnnnnnnnnnnnnnnnnnnnnnnnnnnnnnnnnnnnnnnnnnnnnnnnnnnnnnnnnnnnnnnnnnnnnnnnnnnnnnnnnnnnnnnnnnnnnnnnnnnnnnnnnnnnnnnnnnnnnnnnnnnnnnnnnnnnnnnnnnnnnnnnnnnnnnnnnnnnnnnnnnnnnnnnnnnnnnnnnnnnnnnnnnnnnnnnnnnnnnnnnnnnnnnnnnnnnnnnnnnnnnnnnnnnnnnnnnnnnnnnnnnnnnnnnnnnnnnnnnnnnnnnnnnnnnnnnnnnnnnnnnnnnnnnnnnnnnnnnnnnnnnnnnnnnnnnnnnnnnnnnnnnnnnnnnnnnnnnnnnnnnnnnnnnnnnnnnnnnnnnnnnnnnnnnnnnnnnnnnnnnnnnnnnnnnnnnnnnnnnnnnnnnnnnnnnnnnnnnnnnnnnnnnnnnnnnnnnnnnnnnnnnnnnnnnnnnnnnnnnnnnnnnnnnnnnnnnnnnnnnnnnnnnnnnnnnnnnnnnnnnnnnnnnnnnnnnnnnnnnnnnnnnnnnnnnnnnnnnnnnnnnnnnnnnnnnnnnnnnnnnnnnnnnnnnnnnnnnnnnnnnnnnnnnnnnnnnnnnnnnnnnnnnnnnnnnnnnnnnnnnnnnnnnnnnnnnnnnnnnnnnnnnnnnnnnnnnnnnnnnnnnnnnnnnnnnnnnnnnnnnnnnnnnnnnnnnnnnnnnnnnnnnnnnnnnnnnnnnnnnnnnnnnnnnnnnnnnnnnnnnnnnnnnnnnnnnnnnnnnnnnnnnnnnnnnnnnnnnnnnnnnnnnnnnnnnnnnnnnnnnnnnnnnnnnnnnnnnnnnnnnnnnnnnnnnnnnnnnnnnnnnnnnnnnnnnnnnnnnnnnnnnnnnnnnnnnnnnnnnnnnnnnnnnnnnnnnnnnnnnnnnnnnnnnnnnnnnnnnnnnnnnnnnnnnnnnnnnnnnnnnnnnnnnnnnnnnnnnnnnnnnnnnnnnnnnnnnnnnnnnnnnnnnnnnnnnnnnnnnnnnnnnnnnnnnnnnnnnnnnnnnnnnnnnnnnnnnnnnnnnnnnnnnnnnnnnnnnnnnnnnnnnnnnnnnnnnnnnnnnnnnnnnnnnnnnnnnnnnnnnnnnnnnnnnnnnnnnnnnnnnnnnnnnnnnnnnnnnnnnnnnnnnnnnnnnnnnnnnnnnnnnnnnnnnnnnnnnnnnnnnnnnnnnnnnnnnnnnnnnnnnnnnnnnnnnnnnnnnnnnnnnnnnnnnnnnnnnnnnnnnnnnnnnnnnnnnnnnnnnnnnnnnnnnnnnnnnnnnnnnnnnnnnnnnnnnnnnnnnnnnnnnnnnnnnnnnnnnnnnnnnnnnnnnnnnnnnnnnnnnnnnnnnnnnnnnnnnnnnnnnnnnnnnnnnnnnnnnnnnnnnnnnnnnnnnnnnnnnnnnnnnnnnnnnnnnnnnnnnnnnnnnnnnnnnnnnnnnnnnnnnnnnnnnnnnnnnnnnnnnnnnnnnnnnnnnnnnnnnnnnnnnnnnnnnnnnnnnnnnnnnnnnnnnnnnnnnnnnnnnnnnnnnnnnnnnnnnnnnnnnnnnnnnnnnnnnnnnnnnnnnnnnnnnnnnnnnnnnnnnnnnnnnnnnnnnnnnnnnnnnnnnnnnnnnnnnnnnnnnnnnnnnnnnnnnnnnnnnnnnnnnnnnnnnnnnnnnnnnnnnnnnnnnnnnnnnnnnnnnnnnnnnnnnnnnnnnnnnnnnnnnnnnnnnnnnnnnnnnnnnnnnnnnnnnnnnnnnnnnnnnnnnnnnnnnnnnnnnnnnnnnnnnnnnnnnnnnnnnnnnnnnnnnnnnnnnnnnnnnnnnnnnnnnnnnnnnnnnnnnnnnnnnnnnnnnnnnnnnnnnnnnnnnnnnnnnnnnnnnnnnnnnnnnnnnnnnnnnnnnnnnnnnnnnnnnnnnnnnnnnnnnnnnnnnnnnnnnnnnnnnnnnnnnnnnnnnnnnnnnnnnnnnnnnnnnnnnnnnnnnnnnnnnnnnnnnnnnnnnnnnnnnnnnnnnnnnnnnnnnnnnnnnnnnnnnnnnnnnnnnnnnnnnnnnnnnnnnnnnnnnnnnnnnnnnnnnnnnnnnnnnnnnnnnnnnnnnnnnnnnnnnnnnnnnnnnnnnnnnnnnnnnnnnnnnnnnnnnnnnnnnnnnnnnnnnnnnnnnnnnnnnnnnnnnnnnnnnnnnnnnnnnnnnnnnnnnnnnnnnnnnnnnnnnnnnnnnnnnnnnnnnnnnnnnnnnnnnnnnnnnnnnnnnnnnnnnnnnnnnnnnnnnnnnnnnnnnnnnnnnnnnnnnnnnnnnnnnnnnnnnnnnnnnnnnnnnnnnnnnnnnnnnnnnnnnnnnnnnnnnnnnnnnnnnnnnnnnnnnnnnnnnnnnnnnnnnnnnnnnnnnnnnnnnnnnnnnnnnnnnnnnnnnnnnnnnnnnnnnnnnnnnnnnnnnnnnnnnnnnnnnnnnnnnnnnnnnnnnnnnnnnnnnnnnnnnnnnnnnnnnnnnnnnnnnnnnnnnnnnnnnnnnnnnnnnnnnnnnnnnnnnnnnnnnnnnnnnnnnnnnnnnnnnnnnnnnnnnnnnnnnnnnnnnnnnnnnnnnnnnnnnnnnnnnnnnnnnnnnnnnnnnnnnnnnnnnnnnnnnnnnnnnnnnnnnnnnnnnnnnnnnnnnnnnnnnnnnnnnnnnnnnnnnnnnnnnnnnnnnnnnnnnnnnnnnnnnnnnnnnnnnnnnnnnnnnnnnnnnnnnnnnnnnnnnnnnnnnnnnnnnnnnnnnnnnnnnnnnnnnnnnnnnnnnnnnnnnnnnnnnnnnnnnnnnnnnnnnnnnnnnnnnnnnnnnnnnnnnnnnnnnnnnnnnnnnnnnnnnnnnnnnnnnnnnnnnnnnnnnnnnnnnnnnnnnnnnnnnnnnnnnnnnnnnnnnnnnnnnnnnnnnnnnnnnnnnnnnnnnnnnnnnnnnnnnnnnnnnnnnnnnnnnnnnnnnnnnnnnnnnnnnnnnnnnnnnnnnnnnnnnnnnnnnnnnnnnnnnnnnnnnnnnnnnnnnnnnnnnnnnnnnnnnnnnnnnnnnnnnnnnnnnnnnnnnnnnnnnnnnnnnnnnnnnnnnnnnnnnnnnnnnnnnnnnnnnnnnnnnnnnnnnnnnnnnnnnnnnnnnnnnnnnnnnnnnnnnnnnnnnnnnnnnnnnnnnnnnnnnnnnnnnnnnnnnnnnnnnnnnnnnnnnnnnnnnnnnnnnnnnnnnnnnnnnnnnnnnnnnnnnnnnnnnnnnnnnnnnnnnnnnnnnnnnnnnnnnnnnnnnnnnnnnnnnnnnnnnnnnnnnnnnnnnnnnnnnnnnnnnnnnnnnnnnnnnnnnnnnnnnnnnnnnnnnnnnnnnnnnnnnnnnnnnnnnnnnnnnnnnnnnnnnnnnnnnnnnnnnnnnnnnnnnnnnnnnnnnnnnnnnnnnnnnnnnnnnnnnnnnnnnnnnnnnnnnnnnnnnnnnnnnnnnnnnnnnnnnnnnnnnnnnnnnnnnnnnnnnnnnnnnnnnnnnnnnnnnnnnnnnnnnnnnnnnnnnnnnnnnnnnnnnnnnnnnnnnnnnnnnnnnnnnnnnnnnnnnnnnnnnnnnnnnnnnnnnnnnnnnnnnnnnnnnnnnnnnnnnnnnnnnnnnnnnnnnnnnnnnnnnnnnnnnnnnnnnnnnnnnnnnnnnnnnnnnnnnnnnnnnnnnnnnnnnnnnnnnnnnnnnnnnnnnnnnnnnnnnnnnnnnnnnnnnnnnnnnnnnnnnnnnnnnnnnnnnnnnnnnnnnnnnnnnnnnnnnnnnnnnnnnnnnnnnnnnnnnnnnnnnnnnnnnnnnnnnnnnnnnnnnnnnnnnnnnnnnnnnnnnnnnnnnnnnnnnnnnnnnnnnnnnnnnnnnnnnnaacgggaggcctgcagaaccggttcaagaccgcggtgaagccaccccggaattgggtggctactgaaacgtgttggccgccggcgtgaccgtcacgcggggtgaagccaccccggaattgggtggctactgaaacagtagcgggccaggtgtctcgcagtcagcgggtgaagccaccccggaattgggtggctactgaaaccgtgacaggctgaattctcgcgcgctaggaggtgaagccaccccggaattgggtggctactgaaacctcgactactctgtccatgagttcgagtggggtgaagccaccccggaattgggtggctactgaaacaggaactgtgtctcacccatgctcccgtctggtgaagccaccccggaattgggtggctactgaaacctcgatgccgattacgaggccaagcgcgctggtgaagccaccccggaattgggtggctactgaaacccgccgccgcgctgcgatgattgccccgagggtgaagccaccccggaattgggtggctactgaaacagcatcatgcgttccccatggtcttgatgtggtgaagccaccccggaattgggtggctactgaaacttcgttgttagagagggaagaaccgggcgaggtgaagccaccccggaattgggtggctactgaaaccacgccaagatcgccatggagtcgatcgccggtgaagccaccccggaattgggtggctactgaaacagcacgcgctcgacgcggtcgtaatcggccggtaaagccacccccaaattgggtggctactgaaactcgggtgttcggaaaggatggcgtcgatcatggtgaagccacccccaaattgggtggctactgaaacatcaagtcttgcgcgaggcgcttgtgaaggtgaagccacctccgaattgggtggttactgaaacggcgcttgcgagtgatcccgcggcaccaggggtgaagccacccccaaactgggtggctactgaaacatcacgaggttgttttcgagttgcgccagaggtgaagccacccctcaattgggtggcaaatgaaacgacagatcgcaaagcatgtcgcgcgctctggtgaagccacccctgttttgggtggttactggaaggacgtctgatgttccgatcatccgaacagcaaaacttcgccgcgatggtcgccgcccacatctccaaggccgacggcccgttgctgctcgaaggtggcaccggcatcgggaagacgcgcgcctatctgtcggcgctcatcggctccggcaaacgggtcgcgattgtgttgccgacccaccagctcatcgagcagctgcttgcttccaccgatctcgcagaggccaatgccagaggcatcaccgtcgccgcttttcgaccggcgtcgaagttcgataccagggccgactacttggcgaaccgtgaagtcgcggccagtgcgcaactcatgttgtgcactgccgccagtgtcatcatcgaccgccgtctggacggcaaatacaacggcgcgaccgaacgggattatcttctcttcgatgaggctgaccagttgccggcgatggccgctcttcagtccgacatggaggttaccggcgaggccctcaagacgctggggatcgaaggcgaaacgacccgtaatctggccgacgccgtcgtcgcgtccaagaaggccgagccggaacagcgcgccgccgccaagatgatcctcgaagtcctgggcgagcccgcgtggtttcatgtggcaggcaaggccgacgatggtggcatccgcctctggcatcggctaccggggcggctactgcgcgagatcgccaaccaaccaaacgtcgcctttgtcagcgccaccctgactgtcggaggtctgtttaacgacttcaagtgtgcgctcggcatccagagtgaaagcgagctgtcgggtgtcgtcgaacctgagcgacacggcacggtcgagttccggaccgttgtgtcgcaagccgtggacgccgacggctggctcgaaaaggtggcggcgaccgtcaggcaggcagaggctcccgtgctggtcgtaacgccctcgttcgaccgtgctgagaagattggcgcgctggtggaaggcgcgacggtgcggcagcgcgaggaagccgttggcgacgccatggctcgaatgggcggctcccgaaccctgattggggcagccgcctgggccggcctcgacacgcccatccagtggcggtcaattgtcgtgcctgttgtgcctttcgagcgcctgacggagatcgaagggcaagtcgagagccactacatcgatgcgcgcaacacggccgtgcgacgcctgcgccaggtgatcggtcggggactgcggtcgcccgatgcccgctgcaccgtctacttcctcgatcctcgtgtcttgaagctaccggccttctggcccagccggttttcctcggcctgggtggcccgccctcgcgatccgggtgtcctcgaaggggcgcgaggcgaggtggtcctgtccaaagccgagcgcgacacgtctcttagaaagcgcgcccttgcccactacggtctgcattgtcgggcgtgtggtctggtacccaaggtcgccgcccagatcgaggtacatcacctcgaccccatctcggaaggcatccggcgcacgacgttagcggacctgtgccccctttgtcggaactgtcactcacttgcccactccacgagcccgcctatgccggtcgaggaggttgcgaagatcgtgggggcctagggtccgaatgcaattggacgtaacgcgttgccttcaagcttcggcaatccggcaggcagcactagtctaggccgcctgttcgagcgtcgaggcgacgtcgcgcgtggtcacgcggcgcaggtcgcgcaccttggtcgtgtcgaacggccgcgcacgatgcatggtgcagcgattgtcccagatcacgaggtcgcccttcgcccagcgatggacatgcacgaagcgcggctgggtcgcgtgctcgatcaggtcgaggatgatcaggcgcccgtcggccaccggcaggcccaggatgtgcgaggcgtgcgcggcgagatagagcgtcctgcgatgcgagccgggatgggttcgcaccacccgctgcggcaccggcggcagcgaggcgcgttcctcgtcggtgtactgcacgacgcccagctgctcgcgcgaccgccagatcgaatgttcggcgaccagcccttccagctccttcttcttcgtctccggcagcgcgtcgtacgccgcgcgcaagtcg

SEQ ID NO: 207 - DNA, 12071 bp, Artificial Sequence
  Synthetic Oligonucleotide
  misc_feature (1)..(6681): n is a, c, g, or t
nnnnnnnnnnnnnnnnnnnnnnnnnnnnnnnnnnnnnnnnnnnnnnnnnnnnnnnnnnnnnnnnnnnnnnnnnnnnnnnnnnnnnnnnnnnnnnnnnnnnnnnnnnnnnnnnnnnnnnnnnnnnnnnnnnnnnnnnnnnnnnnnnnnnnnnnnnnnnnnnnnnnnnnnnnnnnnnnnnnnnnnnnnnnnnnnnnnnnnnnnnnnnnnnnnnnnnnnnnnnnnnnnnnnnnnnnnnnnnnnnnnnnnnnnnnnnnnnnnnnnnnnnnnnnnnnnnnnnnnnnnnnnnnnnnnnnnnnnnnnnnnnnnnnnnnnnnnnnnnnnnnnnnnnnnnnnnnnnnnnnnnnnnnnnnnnnnnnnnnnnnnnnnnnnnnnnnnnnnnnnnnnnnnnnnnnnnnnnnnnnnnnnnnnnnnnnnnnnnnnnnnnnnnnnnnnnnnnnnnnnnnnnnnnnnnnnnnnnnnnnnnnnnnnnnnnnnnnnnnnnnnnnnnnnnnnnnnnnnnnnnnnnnnnnnnnnnnnnnnnnnnnnnnnnnnnnnnnnnnnnnnnnnnnnnnnnnnnnnnnnnnnnnnnnnnnnnnnnnnnnnnnnnnnnnnnnnnnnnnnnnnnnnnnnnnnnnnnnnnnnnnnnnnnnnnnnnnnnnnnnnnnnnnnnnnnnnnnnnnnnnnnnnnnnnnnnnnnnnnnnnnnnnnnnnnnnnnnnnnnnnnnnnnnnnnnnnnnnnnnnnnnnnnnnnnnnnnnnnnnnnnnnnnnnnnnnnnnnnnnnnnnnnnnnnnnnnnnnnnnnnnnnnnnnnnnnnnnnnnnnnnnnnnnnnnnnnnnnnnnnnnnnnnnnnnnnnnnnnnnnnnnnnnnnnnnnnnnnnnnnnnnnnnnnnnnnnnnnnnnnnnnnnnnnnnnnnnnnnnnnnnnnnnnnnnnnnnnnnnnnnnnnnnnnnnnnnnnnnnnnnnnnnnnnnnnnnnnnnnnnnnnnnnnnnnnnnnnnnnnnnnnnnnnnnnnnnnnnnnnnnnnnnnnnnnnnnnnnnnnnnnnnnnnnnnnnnnnnnnnnnnnnnnnnnnnnnnnnnnnnnnnnnnnnnnnnnnnnnnnnnnnnnnnnnnnnnnnnnnnnnnnnnnnnnnnnnnnnnnnnnnnnnnnnnnnnnnnnnnnnnnnnnnnnnnnnnnnnnnnnnnnnnnnnnnnnnnnnnnnnnnnnnnnnnnnnnnnnnnnnnnnnnnnnnnnnnnnnnnnnnnnnnnnnnnnnnnnnnnnnnnnnnnnnnnnnnnnnnnnnnnnnnnnnnnnnnnnnnnnnnnnnnnnnnnnnnnnnnnnnnnnnnnnnnnnnnnnnnnnnnnnnnnnnnnnnnnnnnnnnnnnnnnnnnnnnnnnnnnnnnnnnnnnnnnnnnnnnnnnnnnnnnnnnnnnnnnnnnnnnnnnnnnnnnnnnnnnnnnnnnnnnnnnnnnnnnnnnnnnnnnnnnnnnnnnnnnnnnnnnnnnnnnnnnnnnnnnnnnnnnnnnnnnnnnnnnnnnnnnnnnnnnnnnnnnnnnnnnnnnnnnnnnnnnnnnnnnnnnnnnnnnnnnnnnnnnnnnnnnnnnnnnnnnnnnnnnnnnnnnnnnnnnnnnnnnnnnnnnnnnnnnnnnnnnnnnnnnnnnnnnnnnnnnnnnnnnnnnnnnnnnnnnnnnnnnnnnnnnnnnnnnnnnnnnnnnnnnnnnnnnnnnnnnnnnnnnnnnnnnnnnnnnnnnnnnnnnnnnnnnnnnnnnnnnnnnnnnnnnnnnnnnnnnnnnnnnnnnnnnnnnnnnnnnnnnnnnnnnnnnnnnnnnnnnnnnnnnnnnnnnnnnnnnnnnnnnnnnnnnnnnnnnnnnnnnnnnnnnnnnnnnnnnnnnnnnnnnnnnnnnnnnnnnnnnnnnnnnnnnnnnnnnnnnnnnnnnnnnnnnnnnnnnnnnnnnnnnnnnnnnnnnnnnnnnnnnnnnnnnnnnnnnnnnnnnnnnnnnnnnnnnnnnnnnnnnnnnnnnnnnnnnnnnnnnnnnnnnnnnnnnnnnnnnnnnnnnnnnnnnnnnnnnnnnnnnnnnnnnnnnnnnnnnnnnnnnnnnnnnnnnnnnnnnnnnnnnnnnnnnnnnnnnnnnnnnnnnnnnnnnnnnnnnnnnnnnnnnnnnnnnnnnnnnnnnnnnnnnnnnnnnnnnnnnnnnnnnnnnnnnnnnnnnnnnnnnnnnnnnnnnnnnnnnnnnnnnnnnnnnnnnnnnnnnnnnnnnnnnnnnnnnnnnnnnnnnnnnnnnnnnnnnnnnnnnnnnnnnnnnnnnnnnnnnnnnnnnnnnnnnnnnnnnnnnnnnnnnnnnnnnnnnnnnnnnnnnnnnnnnnnnnnnnnnnnnnnnnnnnnnnnnnnnnnnnnnnnnnnnnnnnnnnnnnnnnnnnnnnnnnnnnnnnnnnnnnnnnnnnnnnnnnnnnnnnnnnnnnnnnnnnnnnnnnnnnnnnnnnnnnnnnnnnnnnnnnnnnnnnnnnnnnnnnnnnnnnnnnnnnnnnnnnnnnnnnnnnnnnnnnnnnnnnnnnnnnnnnnnnnnnnnnnnnnnnnnnnnnnnnnnnnnnnnnnnnnnnnnnnnnnnnnnnnnnnnnnnnnnnnnnnnnnnnnnnnnnnnnnnnnnnnnnnnnnnnnnnnnnnnnnnnnnnnnnnnnnnnnnnnnnnnnnnnnnnnnnnnnnnnnnnnnnnnnnnnnnnnnnnnnnnnnnnnnnnnnnnnnnnnnnnnnnnnnnnnnnnnnnnnnnnnnnnnnnnnnnnnnnnnnnnnnnnnnnnnnnnnnnnnnnnnnnnnnnnnnnnnnnnnnnnnnnnnnnnnnnnnnnnnnnnnnnnnnnnnnnnnnnnnnnnnnnnnnnnnnnnnnnnnnnnnnnnnnnnnnnnnnnnnnnnnnnnnnnnnnnnnnnnnnnnnnnnnnnnnnnnnnnnnnnnnnnnnnnnnnnnnnnnnnnnnnnnnnnnnnnnnnnnnnnnnnnnnnnnnnnnnnnnnnnnnnnnnnnnnnnnnnnnnnnnnnnnnnnnnnnnnnnnnnnnnnnnnnnnnnnnnnnnnnnnnnnnnnnnnnnnnnnnnnnnnnnnnnnnnnnnnnnnnnnnnnnnnnnnnnnnnnnnnnnnnnnnnnnnnnnnnnnnnnnnnnnnnnnnnnnnnnnnnnnnnnnnnnnnnnnnnnnnnnnnnnnnnnnnnnnnnnnnnnnnnnnnnnnnnnnnnnnnnnnnnnnnnnnnnnnnnnnnnnnnnnnnnnnnnnnnnnnnnnnnnnnnnnnnnnnnnnnnnnnnnnnnnnnnnnnnnnnnnnnnnnnnnnnnnnnnnnnnnnnnnnnnnnnnnnnnnnnnnnnnnnnnnnnnnnnnnnnnnnnnnnnnnnnnnnnnnnnnnnnnnnnnnnnnnnnnnnnnnnnnnnnnnnnnnnnnnnnnnnnnnnnnnnnnnnnnnnnnnnnnnnnnnnnnnnnnnnnnnnnnnnnnnnnnnnnnnnnnnnnnnnnnnnnnnnnnnnnnnnnnnnnnnnnnnnnnnnnnnnnnnnnnnnnnnnnnnnnnnnnnnnnnnnnnnnnnnnnnnnnnnnnnnnnnnnnnnnnnnnnnnnnnnnnnnnnnnnnnnnnnnnnnnnnnnnnnnnnnnnnnnnnnnnnnnnnnnnnnnnnnnnnnnnnnnnnnnnnnnnnnnnnnnnnnnnnnnnnnnnnnnnnnnnnnnnnnnnnnnnnnnnnnnnnnnnnnnnnnnnnnnnnnnnnnnnnnnnnnnnnnnnnnnnnnnnnnnnnnnnnnnnnnnnnnnnnnnnnnnnnnnnnnnnnnnnnnnnnnnnnnnnnnnnnnnnnnnnnnnnnnnnnnnnnnnnnnnnnnnnnnnnnnnnnnnnnnnnnnnnnnnnnnnnnnnnnnnnnnnnnnnnnnnnnnnnnnnnnnnnnnnnnnnnnnnnnnnnnnnnnnnnnnnnnnnnnnnnnnnnnnnnnnnnnnnnnnnnnnnnnnnnnnnnnnnnnnnnnnnnnnnnnnnnnnnnnnnnnnnnnnnnnnnnnnnnnnnnnnnnnnnnnnnnnnnnnnnnnnnnnnnnnnnnnnnnnnnnnnnnnnnnnnnnnnnnnnnnnnnnnnnnnnnnnnnnnnnnnnnnnnnnnnnnnnnnnnnnnnnnnnnnnnnnnnnnnnnnnnnnnnnnnnnnnnnnnnnnnnnnnnnnnnnnnnnnnnnnnnnnnnnnnnnnnnnnnnnnnnnnnnnnnnnnnnnnnnnnnnnnnnnnnnnnnnnnnnnnnnnnnnnnnnnnnnnnnnnnnnnnnnnnnnnnnnnnnnnnnnnnnnnnnnnnnnnnnnnnnnnnnnnnnnnnnnnnnnnnnnnnnnnnnnnnnnnnnnnnnnnnnnnnnnnnnnnnnnnnnnnnnnnnnnnnnnnnnnnnnnnnnnnnnnnnnnnnnnnnnnnnnnnnnnnnnnnnnnnnnnnnnnnnnnnnnnnnnnnnnnnnnnnnnnnnnnnnnnnnnnnnnnnnnnnnnnnnnnnnnnnnnnnnnnnnnnnnnnnnnnnnnnnnnnnnnnnnnnnnnnnnnnnnnnnnnnnnnnnnnnnnnnnnnnnnnnnnnnnnnnnnnnnnnnnnnnnnnnnnnnnnnnnnnnnnnnnnnnnnnnnnnnnnnnnnnnnnnnnnnnnnnnnnnnnnnnnnnnnnnnnnnnnnnnnnnnnnnnnnnnnnnnnnnnnnnnnnnnnnnnnnnnnnnnnnnnnnnnnnnnnnnnnnnnnnnnnnnnnnnnnnnnnnnnnnnnnnnnnnnnnnnnnnnnnnnnnnnnnnnnnnnnnnnnnnnnnnnnnnnnnnnnnnnnnnnnnnnnnnnnnnnnnnnnnnnnnnnnnnnnnnnnnnnnnnnnnnnnnnnnnnnnnnnnnnnnnnnnnnnnnnnnnnnnnnnnnnnnnnnnnnnnnnnnnnnnnnnnnnnnnnnnnnnnnnnnnnnnnnnnnnnnnnnnnnnnnnnnnnnnnnnnnnnnnnnnnnnnnnnnnnnnnnnnnnnnnnnnnnnnnnnnnnnnnnnnnnnnnnnnnnnnnnnnnnnnnnnnnnnnnnnnnnnnnnnnnnnnnnnnnnnnnnnnnnnnnnnnnnnnnnnnnnnnnnnnnnnnnnnnnnnnnnnnnnnnnnnnnnnnnnnnnnnnnnnnnnnnnnnnnnnnnnnnnnnnnnnnnnnnnnnnnnnnnnnnnnnnnnnnnnnnnnnnnnnnnnnnnnnnnnnnnnnnnnnnnnnnnnnnnnnnnnnnnnnnnnnnnnnnnnnnnnnnnnnnnnnnnnnnnnnnnnnnnnnnnnnnnnnnnnnnnnnnnnnnnnnnnnnnnnnnnnnnnnnnnnnnnnnnnnnnnnnnnnnnnnnnnnnnnnnnnnnnnnnnnnnnnnnnnnnnnnnnnnnnnnnnnnnnnnnnnnnnnnnnnnnnnnnnnnnnnnnnnnnnnnnnnnnnnnnnnnnnnnnnnnnnnnnnnnnnnnnnnnnnnnnnnnnnnnnnnnnnnnnnnnnnnnnnnnnnnnnnnnnnnnnnnnnnnnnnnnnnnnnnnnnnnnnnnnnnnnnnnnnnnnnnnnnnnnnnnnnnnnnnnnnnnnnnnnnnnnnnnnnnnnnnnnnnnnnnnnnnnnnnnnnnnnnnnnnnnnnnnnnnnnnnnnnnnnnnnnnnnnnnnnnnnnnnnnnnnnnnnnnnnnnnnnnnnnnnnnnnnnnnnnnnnnnnnnnnnnnnnnnnnnnnnnnnnnnnnnnnnnnnnnnnnnnnnnnnnnnnnnnnnnnnnnnnnnnnnnnnnnnnnnnnnnnnnnnnnnnnnnnnnnnnnnnnnnnnnnnnnnnnnnnnnnnnnnnnnnnnnnnnnnnnnnnnnnnnnnnnnnnnnnnnnnnnnnnnnnnnnnnnnnnnnnnnnnnnnnnnnnnnnnnnnnnnnnnnnnnnnnnnnnnnnnnnnnnnnnnnnnnnnnnnnnnnnnnnnnnnnnnnnnnnnnnnnnnnnnnnnnnnnnnnnnnnnnnnnnnnnnnnnnnnnnnnnnnnnnnnnnnnnnnnnnnnnnnnnnnnnnnnnnnnnnnnnnnnnnnnnnnnnnnnnnnnnnnnnnnnnnnnnnnnnnnnnnnnnnnnnnnnnnnnnnnnnnnnnnnnnnnnnnnnnnnnnnnnnnnnnnnnnnnnnnnnnnnnnnnnnnnnnnnnnnnnnnnnnnnnnnnnnnnnnnnnnnnnnnnnnnnnnnnnnnnnnnnnnnnnnnnnnnnnnnnnnnnnnnnnnnnnnnnnnnnnnnnnnnnnnnnnnnnnnnnnnnnnnnnnnnnnnnnnnnnnnnnnnnnnnnnnnnnnnnnnnnnnnnnnnnnnnnnnnnnnnnnnnnnnnnnnnnnnnnnnnnnnnnnnnnnnnnnnnnnnnnnnnnnnnnnnnnnnnnnnnnnnnnnnnnnnnnnnnnnnnnnnnnnnnnnnnnnnnnnnnnnnnnnnnnnnnnnnnnnnnnnnnnnnnnnnnnnnnnnnnnnnnnnnnnnnnnnnnnnnnnnnnnnnnnnnnnnnnnnnnnnnnnnnnnnnnnnnnnnnnnnnnnnnnnnnnnnnnnnnnnnnnnnnnnnnnnnnnnnnnnnnnnnnnnnnnnnnnnnnnnnnnnnnnnnnnnnnnnnnnnnnnnnnnnnnnnnnnnnnnnnnnnnnnnnnnnnnnnnnnnnnnnnnnnnnnnnnnnnnnnnnnnnnnnnnnnnnnnnnnnnnnnnnnnnnnnnnnnnnnnnnnnnnnnnnnnnnnnnnnnnnnnnnnnnnnnnnnnnnnnnnnnnnnnnnnnnnnnnntgatggtggtggtggccgtggtgggcatcttggctgcagtggccattccgcaatatcaaaactacacccaacgcgcgcggtgggccgccaacctcggcgccattgccgcgttacagggtacggtcagtgagtgcctcggccaacaagccaacgacatcacgttatgcgacacgtttggcgaacttggggtcaccagtggcctgaataccgacggcgtcatgccgttgccccatggcacggttgccgtgcaagccagcggtgatgccaccgcgattcgggttgttttaacgggcgctgccaatgcgggtaattgcatcatcacagccagcttgacgcccgcagaaggagcccaaatgctgcaatgggccctcacgcgggacaccacacaaactaaatgtaccgctgccaacacgggcgttgacgcagcaggctgattcgggcgtaagatgcggctttaatttttggagcccagcatggcaaaaggtcagcaaaaaacaaacaaggaatccaaaaagcccaagaaggccgccgccgccgccgcccctgctttgaacagtgcgcaagaacccgtgcgtgccgtggtcaccacatccgtgatgcccaaaggcaaggctaaaaataaaccggccttctaatatttattagctatttattttaaaaattaaacaataaaagagtacttattgcctattatgttgtgaagtaatcgacttgccttccgcaagccgttgattcacacatggggcaggctctgcaaacattcactcgacgggcgacgctcaaaaccccggtcatcatgcgggggtacctcacgcttgatgcactgctgatggcggagttggtcactggcgacgtctcgcacttactcaagcgagatgcgcagttgtactacgccagcgccgcctttttggtggacccgcttgaggaaaagcaaaaggcatcatttgttgccagcatgcggcccgagcaccacccggagctccgcgagctcatcgcccccaacacgcacacacccaacgcgccaccgcttttgcacacgcatcggtcgcgtggcaatgtcaacgacgtggcaattggacgcgctcgccgcaaagaagcgggcaacatcctcaaccaatacgtggcccacgctgctgcagccgtcgagtggtatgccaccggccatgccgagcaggtctggcaggttgtgcaagacatcgcatttattggcaaaaagcgatcagcgggctacggcgaaatcgacgcatggcaggtgatccccggccaccttgatggcctcaccgatgacttcggagagcccttgcgccccgtgccggttgagcgatggccaacctccgcgacgcttattccctccgaggccgcatggtgcgccccgtattgggatattcgaaaccgaaccaaatgctacacgccggagccacgatgaacggcgccgacttcttaatgcaacacatcggttatcggttattgccgaaagcgatgcacaccggcgatgccgtcaccgatgccaacgcgctattcagcatcagtttgcccctacacaccggaaaaacactccggctttccagttgctggtgggtgatcacacccgatgcaacgtacaccagcgttaaggccatccccgagaccggcgccattcaggggcagttgcggcaggccgtcatcttgtcatccctaaaaacgggattgcccctcttgatcctcgcgattggcaagagccccatttacgcacgcgacctctttgtgacctacgacccacgcgcaacgcgctattgcagcgatcgcagtttgcgcaccgttgattcaactctggagaagtggtggacaccttaatcagcaagcccatccagctgtgcggctatgcgctgcaccgcttggttgcgcaacatcaaaacggtgcgccagcgctctggcgtgacgagggtgacaccgtgcgaattcgctcgcgtgacgcctgtccgcccacctacgtcacagggcaactgttgggctttgtcacattggcgtgtgtgtcgtttggtagcaaacaccggtacctgccggtcgccgattggcgtggtcgcaaagcgtggctggaggcacagggcatcaaacacggtttcgaggtggttggggtgcacgcccagggtggcatgcaaaccgtgaccacccatgacggtcgccacttcaccattgatgccacgcaattcacgggcttgctgcgcgtcacccagcctgcgccattcaacgactgtctgctcaatggcatcggcaaagtaggtaaagcctttggcctcaacttactcgtcgttcattaacccaacgcttaaaaacgcttatccggagttcaccaccatgcaagacgttcgcatcgatatcgccatcaatacgattcaacccatcaccttcacccatcacggcatcgacgggttgcccaccatggctcgcggcgttgacatggagggtcatcccctgcgcaccgtttacattccagccgcgcagtttcgcggtcggctaaggcatgaggcggcgttggcaaaaatgcgtaccgcacacggccccatcaagttggcggaagcctacatgctggccttggggcaaaacatcgacaccaaagaagacgaggctgatgagaaagtgcggttgggcgagctactcgctttacgggcggccaaccccttcattgatctcttcggaacgtggcgcatggacagccggctttacgtgtcgcacctgatgccggtcgtcaacgtcaagcccgacacctttcaccacatccgccgcgatctagacaccaacgacgcgttgtttgccgagttacccgaagccgagatcgacgtcttttacgaaaggcaagacggacagtcgcaagcctctcaagcggagagtctgattaaggtggccacccgcgaactgcgcaaagccaaaaaagaaaacgacctcgccaaatgcgacgagttcgaagccaagatcgaagaactcaaagccctcaagaaggcgcacaaagccggtgacgaatcgggaaacaccaaacacttggtggcgatggaggccgtccctgcgggaattcaattgttgtgcaaactcatcataaagcgggccacgccgctcgacctcagcatgctcacgggtgcgcttaacgcgatcagcgaattccccatgatgggtgcccagcgggcccgaggttgcggcgaggtgagtggcaccgcaaccgtctgccacacccaaggtgaggtgttggcgcaaatcgccttcggtggttttttgccagctgtattggagtggaccgatgcgggcaccgcgttcatgactggcctcgaaacggttgccgtcgccgcgtgaaaggcccttaccgcagcccacagcaggcgcaatacgccaagctcatcgagcgcgctgtcagcaaacccggtgcgcccctgttggcgggtgctgcgcccgggctcggtaagacacacggctacgccatcccgttgttgtgcagtggcaaaaaagttgccatcgccatgagcacgcgccaactgatcgatcaatttatagcgagcgatgcactcgccgctgcgcaagccgcactagaggccgaggggcggcccgctgccaccgttgtcgccttgcaaccccgccgtcaatttgaaacggcggtggcctacagcgcgcacaaaacggcggcgcttgatgccgacgtcttggtgctcacacacatgggcgtgctcatcgatacccacatcccagcctacgcccagctgcgtcagcgcgctgtcttgttgtttgacgaagccgatcttttggccgatgccgccgacttgcgcagcacctatcgcattgaggctgaggccttagcccgcgcaggcgtcgaaaacgccacaccgacaaaggcggttgaaaccatcattaaaaaatccgatgaccccgaggaaaaagcagtcgccacagccatccaacgcgctttggcagagccggcttggtacaaagtgatcggtaaagaagacaacggcgatttggtgctgacccaccgcatgccggggcgcatgttgcgcaccctcatcaatgacatggcgcggtgcattttcaccagtggcaccctcacggtatcggggcgttttgaccactttgtcaaagccatcggcctgaccgcagtggcacccgaaagccagcacattgaccccgtgcaacacggccaactgcgcgttgaggtggccagtgaggccctcaccccagaagcacaagccgaacgcatcatgcacgcggcgacaccggtattggtgctgaccaccagccacgcgactacggcggcgttgggctctttgtgccccggtgccatctgccgcgcacccggtgaagccctcatggatgcggtggcgcgatgccctgatgatggcatcttgatcgccgctggcgcctggtctggcctcgatgcgccgcgcctgccgtggcaaaccgtggtcatccccaaaacaccgtacggcaaaccactcatccttgacgcccagcagataagcgcttacgtggacagcaaggttgttgccatcaggcgcaccaaccaagggttacaccgtgggctgcgcaccaccgatgccacctgcaccttgctgttactcgatccggatagccgtcgtgccgatttacgtcaagccattccccgtcgtttcttggtggattgggacagcgtggccgagggctcgttggttttgcgcacgcacttcgcccgtgaacgaaaaaaaggtctgcgtgaaaaaaccctgagccggcgcgggcagcactgcgaacaccccggctgtacggccacccaagagcatttgctggaggtgcaccacctcaacccgattgccaacggcccccgcgacacagttactgatgacctgcgggtgctttgtaaaaatcaccacgcggatgcccaccaagccatgcgaaaagctgattttttaaaagtgaaaacaactgaaaagcgtgcagaggcagacacttaggccacagctggtcaagctacgccgtaaatgcgtagttactggaacttcgcgcgagtgcttagataggcttccatcggtcaagctacgccgtaaatgcgtagttactggaacttgcgtgtggtatcagttcagcgtggatcgggtcaagctacgccgtaaatgcgtagttactggaacgaagttcacgttgacactgccttggatacgggtcaagctacgccgtaaatgcgtagttactggaactggtagcggctgcttgttaagtaaggccgaggtcgtctggggtcaagctacgccgtaaaggcgtagttacttttagcagccagttttgctggttttaagcggtccaatggcctgacttgccgcccattttttcaagcaggcgcacgcccgtcatggtcatgccacggtcagcggctttgcacatgtcgtaaatggtcagca

SEQ ID NO: 208 - DNA, 12057 bp, Artificial Sequence
  Synthetic Oligonucleotide
  misc_feature (1)..(7236): n is a, c, g, or t
nnnnnnnnnnnnnnnnnnnnnnnnnnnnnnnnnnnnnnnnnnnnnnnnnnnnnnnnnnnnnnnnnnnnnnnnnnnnnnnnnnnnnnnnnnnnnnnnnnnnnnnnnnnnnnnnnnnnnnnnnnnnnnnnnnnnnnnnnnnnnnnnnnnnnnnnnnnnnnnnnnnnnnnnnnnnnnnnnnnnnnnnnnnnnnnnnnnnnnnnnnnnnnnnnnnnnnnnnnnnnnnnnnnnnnnnnnnnnnnnnnnnnnnnnnnnnnnnnnnnnnnnnnnnnnnnnnnnnnnnnnnnnnnnnnnnnnnnnnnnnnnnnnnnnnnnnnnnnnnnnnnnnnnnnnnnnnnnnnnnnnnnnnnnnnnnnnnnnnnnnnnnnnnnnnnnnnnnnnnnnnnnnnnnnnnnnnnnnnnnnnnnnnnnnnnnnnnnnnnnnnnnnnnnnnnnnnnnnnnnnnnnnnnnnnnnnnnnnnnnnnnnnnnnnnnnnnnnnnnnnnnnnnnnnnnnnnnnnnnnnnnnnnnnnnnnnnnnnnnnnnnnnnnnnnnnnnnnnnnnnnnnnnnnnnnnnnnnnnnnnnnnnnnnnnnnnnnnnnnnnnnnnnnnnnnnnnnnnnnnnnnnnnnnnnnnnnnnnnnnnnnnnnnnnnnnnnnnnnnnnnnnnnnnnnnnnnnnnnnnnnnnnnnnnnnnnnnnnnnnnnnnnnnnnnnnnnnnnnnnnnnnnnnnnnnnnnnnnnnnnnnnnnnnnnnnnnnnnnnnnnnnnnnnnnnnnnnnnnnnnnnnnnnnnnnnnnnnnnnnnnnnnnnnnnnnnnnnnnnnnnnnnnnnnnnnnnnnnnnnnnnnnnnnnnnnnnnnnnnnnnnnnnnnnnnnnnnnnnnnnnnnnnnnnnnnnnnnnnnnnnnnnnnnnnnnnnnnnnnnnnnnnnnnnnnnnnnnnnnnnnnnnnnnnnnnnnnnnnnnnnnnnnnnnnnnnnnnnnnnnnnnnnnnnnnnnnnnnnnnnnnnnnnnnnnnnnnnnnnnnnnnnnnnnnnnnnnnnnnnnnnnnnnnnnnnnnnnnnnnnnnnnnnnnnnnnnnnnnnnnnnnnnnnnnnnnnnnnnnnnnnnnnnnnnnnnnnnnnnnnnnnnnnnnnnnnnnnnnnnnnnnnnnnnnnnnnnnnnnnnnnnnnnnnnnnnnnnnnnnnnnnnnnnnnnnnnnnnnnnnnnnnnnnnnnnnnnnnnnnnnnnnnnnnnnnnnnnnnnnnnnnnnnnnnnnnnnnnnnnnnnnnnnnnnnnnnnnnnnnnnnnnnnnnnnnnnnnnnnnnnnnnnnnnnnnnnnnnnnnnnnnnnnnnnnnnnnnnnnnnnnnnnnnnnnnnnnnnnnnnnnnnnnnnnnnnnnnnnnnnnnnnnnnnnnnnnnnnnnnnnnnnnnnnnnnnnnnnnnnnnnnnnnnnnnnnnnnnnnnnnnnnnnnnnnnnnnnnnnnnnnnnnnnnnnnnnnnnnnnnnnnnnnnnnnnnnnnnnnnnnnnnnnnnnnnnnnnnnnnnnnnnnnnnnnnnnnnnnnnnnnnnnnnnnnnnnnnnnnnnnnnnnnnnnnnnnnnnnnnnnnnnnnnnnnnnnnnnnnnnnnnnnnnnnnnnnnnnnnnnnnnnnnnnnnnnnnnnnnnnnnnnnnnnnnnnnnnnnnnnnnnnnnnnnnnnnnnnnnnnnnnnnnnnnnnnnnnnnnnnnnnnnnnnnnnnnnnnnnnnnnnnnnnnnnnnnnnnnnnnnnnnnnnnnnnnnnnnnnnnnnnnnnnnnnnnnnnnnnnnnnnnnnnnnnnnnnnnnnnnnnnnnnnnnnnnnnnnnnnnnnnnnnnnnnnnnnnnnnnnnnnnnnnnnnnnnnnnnnnnnnnnnnnnnnnnnnnnnnnnnnnnnnnnnnnnnnnnnnnnnnnnnnnnnnnnnnnnnnnnnnnnnnnnnnnnnnnnnnnnnnnnnnnnnnnnnnnnnnnnnnnnnnnnnnnnnnnnnnnnnnnnnnnnnnnnnnnnnnnnnnnnnnnnnnnnnnnnnnnnnnnnnnnnnnnnnnnnnnnnnnnnnnnnnnnnnnnnnnnnnnnnnnnnnnnnnnnnnnnnnnnnnnnnnnnnnnnnnnnnnnnnnnnnnnnnnnnnnnnnnnnnnnnnnnnnnnnnnnnnnnnnnnnnnnnnnnnnnnnnnnnnnnnnnnnnnnnnnnnnnnnnnnnnnnnnnnnnnnnnnnnnnnnnnnnnnnnnnnnnnnnnnnnnnnnnnnnnnnnnnnnnnnnnnnnnnnnnnnnnnnnnnnnnnnnnnnnnnnnnnnnnnnnnnnnnnnnnnnnnnnnnnnnnnnnnnnnnnnnnnnnnnnnnnnnnnnnnnnnnnnnnnnnnnnnnnnnnnnnnnnnnnnnnnnnnnnnnnnnnnnnnnnnnnnnnnnnnnnnnnnnnnnnnnnnnnnnnnnnnnnnnnnnnnnnnnnnnnnnnnnnnnnnnnnnnnnnnnnnnnnnnnnnnnnnnnnnnnnnnnnnnnnnnnnnnnnnnnnnnnnnnnnnnnnnnnnnnnnnnnnnnnnnnnnnnnnnnnnnnnnnnnnnnnnnnnnnnnnnnnnnnnnnnnnnnnnnnnnnnnnnnnnnnnnnnnnnnnnnnnnnnnnnnnnnnnnnnnnnnnnnnnnnnnnnnnnnnnnnnnnnnnnnnnnnnnnnnnnnnnnnnnnnnnnnnnnnnnnnnnnnnnnnnnnnnnnnnnnnnnnnnnnnnnnnnnnnnnnnnnnnnnnnnnnnnnnnnnnnnnnnnnnnnnnnnnnnnnnnnnnnnnnnnnnnnnnnnnnnnnnnnnnnnnnnnnnnnnnnnnnnnnnnnnnnnnnnnnnnnnnnnnnnnnnnnnnnnnnnnnnnnnnnnnnnnnnnnnnnnnnnnnnnnnnnnnnnnnnnnnnnnnnnnnnnnnnnnnnnnnnnnnnnnnnnnnnnnnnnnnnnnnnnnnnnnnnnnnnnnnnnnnnnnnnnnnnnnnnnnnnnnnnnnnnnnnnnnnnnnnnnnnnnnnnnnnnnnnnnnnnnnnnnnnnnnnnnnnnnnnnnnnnnnnnnnnnnnnnnnnnnnnnnnnnnnnnnnnnnnnnnnnnnnnnnnnnnnnnnnnnnnnnnnnnnnnnnnnnnnnnnnnnnnnnnnnnnnnnnnnnnnnnnnnnnnnnnnnnnnnnnnnnnnnnnnnnnnnnnnnnnnnnnnnnnnnnnnnnnnnnnnnnnnnnnnnnnnnnnnnnnnnnnnnnnnnnnnnnnnnnnnnnnnnnnnnnnnnnnnnnnnnnnnnnnnnnnnnnnnnnnnnnnnnnnnnnnnnnnnnnnnnnnnnnnnnnnnnnnnnnnnnnnnnnnnnnnnnnnnnnnnnnnnnnnnnnnnnnnnnnnnnnnnnnnnnnnnnnnnnnnnnnnnnnnnnnnnnnnnnnnnnnnnnnnnnnnnnnnnnnnnnnnnnnnnnnnnnnnnnnnnnnnnnnnnnnnnnnnnnnnnnnnnnnnnnnnnnnnnnnnnnnnnnnnnnnnnnnnnnnnnnnnnnnnnnnnnnnnnnnnnnnnnnnnnnnnnnnnnnnnnnnnnnnnnnnnnnnnnnnnnnnnnnnnnnnnnnnnnnnnnnnnnnnnnnnnnnnnnnnnnnnnnnnnnnnnnnnnnnnnnnnnnnnnnnnnnnnnnnnnnnnnnnnnnnnnnnnnnnnnnnnnnnnnnnnnnnnnnnnnnnnnnnnnnnnnnnnnnnnnnnnnnnnnnnnnnnnnnnnnnnnnnnnnnnnnnnnnnnnnnnnnnnnnnnnnnnnnnnnnnnnnnnnnnnnnnnnnnnnnnnnnnnnnnnnnnnnnnnnnnnnnnnnnnnnnnnnnnnnnnnnnnnnnnnnnnnnnnnnnnnnnnnnnnnnnnnnnnnnnnnnnnnnnnnnnnnnnnnnnnnnnnnnnnnnnnnnnnnnnnnnnnnnnnnnnnnnnnnnnnnnnnnnnnnnnnnnnnnnnnnnnnnnnnnnnnnnnnnnnnnnnnnnnnnnnnnnnnnnnnnnnnnnnnnnnnnnnnnnnnnnnnnnnnnnnnnnnnnnnnnnnnnnnnnnnnnnnnnnnnnnnnnnnnnnnnnnnnnnnnnnnnnnnnnnnnnnnnnnnnnnnnnnnnnnnnnnnnnnnnnnnnnnnnnnnnnnnnnnnnnnnnnnnnnnnnnnnnnnnnnnnnnnnnnnnnnnnnnnnnnnnnnnnnnnnnnnnnnnnnnnnnnnnnnnnnnnnnnnnnnnnnnnnnnnnnnnnnnnnnnnnnnnnnnnnnnnnnnnnnnnnnnnnnnnnnnnnnnnnnnnnnnnnnnnnnnnnnnnnnnnnnnnnnnnnnnnnnnnnnnnnnnnnnnnnnnnnnnnnnnnnnnnnnnnnnnnnnnnnnnnnnnnnnnnnnnnnnnnnnnnnnnnnnnnnnnnnnnnnnnnnnnnnnnnnnnnnnnnnnnnnnnnnnnnnnnnnnnnnnnnnnnnnnnnnnnnnnnnnnnnnnnnnnnnnnnnnnnnnnnnnnnnnnnnnnnnnnnnnnnnnnnnnnnnnnnnnnnnnnnnnnnnnnnnnnnnnnnnnnnnnnnnnnnnnnnnnnnnnnnnnnnnnnnnnnnnnnnnnnnnnnnnnnnnnnnnnnnnnnnnnnnnnnnnnnnnnnnnnnnnnnnnnnnnnnnnnnnnnnnnnnnnnnnnnnnnnnnnnnnnnnnnnnnnnnnnnnnnnnnnnnnnnnnnnnnnnnnnnnnnnnnnnnnnnnnnnnnnnnnnnnnnnnnnnnnnnnnnnnnnnnnnnnnnnnnnnnnnnnnnnnnnnnnnnnnnnnnnnnnnnnnnnnnnnnnnnnnnnnnnnnnnnnnnnnnnnnnnnnnnnnnnnnnnnnnnnnnnnnnnnnnnnnnnnnnnnnnnnnnnnnnnnnnnnnnnnnnnnnnnnnnnnnnnnnnnnnnnnnnnnnnnnnnnnnnnnnnnnnnnnnnnnnnnnnnnnnnnnnnnnnnnnnnnnnnnnnnnnnnnnnnnnnnnnnnnnnnnnnnnnnnnnnnnnnnnnnnnnnnnnnnnnnnnnnnnnnnnnnnnnnnnnnnnnnnnnnnnnnnnnnnnnnnnnnnnnnnnnnnnnnnnnnnnnnnnnnnnnnnnnnnnnnnnnnnnnnnnnnnnnnnnnnnnnnnnnnnnnnnnnnnnnnnnnnnnnnnnnnnnnnnnnnnnnnnnnnnnnnnnnnnnnnnnnnnnnnnnnnnnnnnnnnnnnnnnnnnnnnnnnnnnnnnnnnnnnnnnnnnnnnnnnnnnnnnnnnnnnnnnnnnnnnnnnnnnnnnnnnnnnnnnnnnnnnnnnnnnnnnnnnnnnnnnnnnnnnnnnnnnnnnnnnnnnnnnnnnnnnnnnnnnnnnnnnnnnnnnnnnnnnnnnnnnnnnnnnnnnnnnnnnnnnnnnnnnnnnnnnnnnnnnnnnnnnnnnnnnnnnnnnnnnnnnnnnnnnnnnnnnnnnnnnnnnnnnnnnnnnnnnnnnnnnnnnnnnnnnnnnnnnnnnnnnnnnnnnnnnnnnnnnnnnnnnnnnnnnnnnnnnnnnnnnnnnnnnnnnnnnnnnnnnnnnnnnnnnnnnnnnnnnnnnnnnnnnnnnnnnnnnnnnnnnnnnnnnnnnnnnnnnnnnnnnnnnnnnnnnnnnnnnnnnnnnnnnnnnnnnnnnnnnnnnnnnnnnnnnnnnnnnnnnnnnnnnnnnnnnnnnnnnnnnnnnnnnnnnnnnnnnnnnnnnnnnnnnnnnnnnnnnnnnnnnnnnnnnnnnnnnnnnnnnnnnnnnnnnnnnnnnnnnnnnnnnnnnnnnnnnnnnnnnnnnnnnnnnnnnnnnnnnnnnnnnnnnnnnnnnnnnnnnnnnnnnnnnnnnnnnnnnnnnnnnnnnnnnnnnnnnnnnnnnnnnnnnnnnnnnnnnnnnnnnnnnnnnnnnnnnnnnnnnnnnnnnnnnnnnnnnnnnnnnnnnnnnnnnnnnnnnnnnnnnnnnnnnnnnnnnnnnnnnnnnnnnnnnnnnnnnnnnnnnnnnnnnnnnnnnnnnnnnnnnnnnnnnnnnnnnnnnnnnnnnnnnnnnnnnnnnnnnnnnnnnnnnnnnnnnnnnnnnnnnnnnnnnnnnnnnnnnnnnnnnnnnnnnnnnnnnnnnnnnnnnnnnnnnnnnnnnnnnnnnnnnnnnnnnnnnnnnnnnnnnnnnnnnnnnnnnnnnnnnnnnnnnnnnnnnnnnnnnnnnnnnnnnnnnnnnnnnnnnnnnnnnnnnnnnnnnnnnnnnnnnnnnnnnnnnnnnnnnnnnnnnnnnnnnnnnnnnnnnnnnnnnnnnnnnnnnnnnnnnnnnnnnnnnnnnnnnnnnnnnnnnnnnnnnnnnnnnnnnnnnnnnnnnnnnnnnnnnnnnnnnnnnnnnnnnnnnnnnnnnnnnnnnnnnnnnnnnnnnnnnnnnnnnnnnnnnnnnnnnnnnnnnnnnnnnnnnnnnnnnnnnnnnnnnnnnnnnnnnnnnnnnnnnnnnnnnnnnnnnnnnnnnnnnnnnnnnnnnnnnnnnnnnnnnnnnnnnnnnnnnnnnnnnnnnnnnnnnnnnnnnnnnnnnnnnnnnnnnnnnnnnnnnnnnnnnnnnnnnnnnnnnnnnnnnnnnnnnnnnnnnnnnnnnnnnnnnnnnnnnnnnnnnnnnnnnnnnnnnnnnnnnnnnnnnnnnnnnnnnnnnnnnnnnnnnnnnnnnnnnnnnnnnnnnnnnnnnnnnnnnnnnnnnnnnnnnnnnnnnnnnnnnnnnnnnnnnnnnnnnnnnnnnnnnnnnnnnnnnnnnnnnnnnnnnnnnnnnnnnnnnnnnnnnnnnnnnnnnnnnnnnnnnnnnnnnnnnnnnnnnnnnnnnnnnnnnnnnnnnnnnnnnnnnnnnnnnnnnnnnnnnnnnnnnnnnnnnnnnnnnnnnnnnnnnnnnnnnnnnnnnnnnnnnnnnnnnnnnnnnnnnnnnnnnnnnnnnnnnnnnnnnnnnnnnnnnnnnnnnnnnnnnnnnnnnnnnnnnnnnnnnnnnnnnnnnnnnnnnnnnnnnnnnnnnnnnnnnnnnnnnnnnnnnnnnnnnnnnnnnnnnnnnnnnnnnnnnnnnnnnnnnnnnnnnnnnnnnnnnnnnnnnnnnnnnnnnnnnnnnnnnnnnnnnnnnnnnnnnnnnnnnnnnnnnnnnnnnnnnnnnnnnnnnnnnnnnnnnnnnnnnnnnnnnnnnnnnnnnnnnnnnnnnnnnnnnnnnnnnnnnnnnnnnnnnnnnnnnnnnnnnnnnnnnnnnnnnnnnnnnnnnnnnnnnnnnnnnnnnnnnnnnnnnnnnnnnnnnnnnnnnnnnnnnnnnnnnnnnnnnnnnnnnnnnnnnnnnnnnnnncaaggaactttgaatcccctcaacttgttcatcaaaaagccagacttggtctggcttttttcatgctcacttcaacagagaccatgcaaagtgggtggtttgtttaccaatatccccacgccatccaaaccatatttaattattaaaatttattcataagatcacaatttttttttaccattatatttagtacttatagattctattgattcgacatcatctttcagagcgtcgtccattgaaaggcaggccaattgacaccatttgtacttcgtgcccacttgagcacaccattgatacggcgtggacacgtcaccttggacgcgctgttgatgtcctgtctgaccactggtgatgtatcccatttgttgttgtgcaaagatgatttgtactttgcaagttcaggttttgcagtggatgcaaacgccacccaacgcgtttcattcgttgccagtttgcgacctgagcattcaccgcaatggttggatgtacttcattccaacacaaaaaacggcgatttgaaaattggactgtcacggcagcgggacggcggcaacatcatcaatgcttacacggccacagttgcgagcgccattgagtggtacgccacaggcgatatgcaggcagtgctggccgtggtgaagtccatcccattcataggcaagcgcagaacatcaggatttgggcaagtcaagcaatgggaggtggcctcgggcgaattagatggtttggtgggttttgcagttgagccactgcggccagtgcctacagaacgctggtctgagggtggcgactggactcctgttgaagctgcttggaaagcgccctactgggatgtgcgaaaccgcacctgctgttttgttccggaggtgtgaggtgaatggccccgaatttttcatgcgttatgcaggctatcgcctgctacctgaggataaaaaaactgacgatgcggttgctgatgccgacacattgcttggcatgtcgctgcctatgcatacagggcaatctttgcgactgtcctcatgttggatggttgtgacaccgcaatgggttgccaccagcttcaaggctttagcccttgcgggatttcgccaagaaaccgaacgcaaaacagccatcgatgaggcactgaaaccaggcggaccgtgcatgcttttggcactggacaagcgctccatgacagcccgcgatttgttcgtcacctatgacgcacgtgcggcccgaatgtgcagcccaggttttgtgaagacctatgacgccaccaaggagaaatcatggacatcttgatcgacaagccagctcgcgtgaagggctatgccttgcaccgcatggtggcgcagttccgtaatggcaaacctgcattgtgggcagatgaaggccagcaactccgcatccgacccgaagaggccacaccacccgtgtatgccgcaggtcaaatgctggccttcaccaccacggcctgtgtcgccttcagtagcggacacaagcataaatacctgccgttgtctgattggcgtggacgccgcacatggctggaacaacaagcgcacaaacatggctttgaaattgtgggtgtccacgtgtcgggcggcatgcaagaggtgctcacccatgatggacgtcgcttcaaacttgatgccaccgaattcaccggcctgttgaaagtcatcgaaccccaagcctttgggctttgccttgtcaaaggcattggcaaagtaggcaaagcttttggcttgaatctcttgatcgtgcaataactcaccaaggaaaaaccatgacctcatctcataacctgattgcagacattgagctgctgaccttgcaacctttgaccttcacacaccatggcaccgagggcttgcccttgctgacgcgcggcattgacgatgaaggacgtcaccaacgaacggtctaccttcctgcagctcaactgcgtggcagggtgcggcatgaatcggccatggccgagttacgcaagaaacccgaaaaagccaagctcgaagacgcctacatgctggctttggggcaagacctgcgacccagcgaagacgatgagcccgaggatattcgcctcagcgaacaaatcaagtttcgacagaaaaacccgtttctcgacatttttggcacctggaaagttgccagccgtttgtatgtttcgcacctcttgcctgctgtgaatgtattacccgacaaagtcagccacattcgccgcgaccttgacaccaacgaagacatgatggctttgctggatgacgaggagcaaaaccgcttgtacgaccggcaagacaagcaaggcctggcttcaaaggcagaaagcttaatcaaactaaccaaccgggaattacttgccgctcgcaaagccaaagaccagaccaagttggcggatctcaatgccaagttggaagaactcaaagcgcttaagaaatcacagaagggggatgaccaatccgacaacaccaagcacttgcttgaattacaagtcattcccgcaggcatcacactcaccggcaaactcatcgttcgacatgccacagctttcgacttgaacactttggtcgaggccttcaacggcttaagtcgcaacccctatatgggtgcacaacgcgcccggggctgtggcgaagtgcaaggtcaagtccgctttcaaaatgacttgggtgaggtgttggttgtggtgaagtttggtggtctgcaagctgccaaggtggcgtggacagatgctgggcaacagtggttgctgccacagggcgaactgacaagcgcatgatttatcgaagcccagaacaacagcgctatgccaagttgatcgagggtgctcttcgcccaggcccgcccttgctggcgggggcctcagcaggtttgggcaaaacccatggttacagcatcccactggtgcgctcgggcaagcggattgccatcgccatgagcacacgccagttgatgcagcaatacctcgacagccatgccttggctacagccttgcaagggcacacatgcacggtgggggaactgcaatcccgtcaacactttgaaactgacaaggcctatcaagcgcaccgatccgaagccttgcaagcacaggtgctgttggtcacccatgccgccgccttgattgacagtttgcaaccgggctatgcccaactgcgcgagcgtgatgtggtgttgttcgatgaggccgatttattggccgacgccgcagaccttcgcagcacctttgccatcagcgcggaaacactcaaagcctgccaagctcaacatttgacgcctgaacaagcagcccacaaggtgcgtcaactcaccacatcaactgaagaccgctgtgcagcaagcgccatcttgtatgccctggccaatcctgcgccctacaaaatggtgggtcacaatgacgcaggtgacttggtgctgcgtcaccgcatgcctgggcgcatgctcaagcctttggtgaaagaggcgccacgctgtattttcaccagtggcaccctgcaagtgcacggcagctttgaccattttgtgcgggccatggggctcacggtcatggcgcccgaaagctgccacatcgaacccccgcagcatggccacttgagagttcaagccacggctgatgccttgtctttggaacagatcgcccttcgaatagccgccgctcaaaaccccaccttggtgctcaccagcagccaccgttcgagccaagaactcggggccttgttgccacacgctgtggtgcgtgaagcagatgaacctttggcagatgcggtgcaacgctgccccaccgatggggtgctgatagcagcgggtgcgtggtcgggcttggacgaacctcggctgcgttggcgcacggtggtgattcctcaaaccccatacggtcagcctgttcaggtgaatggaatttcggtgaactacttcatcgacagccaagtggtggccttgcggcgcaccaaccaaggtttgcaccggggtttgcgcacacccgatgcgcagtgcactctgctgttgctggacccgcgaagtagtcgattgactctgcggtcggccatcccagccaggttctcggtggattgggatggctttgaagaaggctcgttggtgttacaaacccatttcaaacgcgagcgcaatcaacaactgaaaaatgcagccttgaagcactacggcaaccagtgcatgtttgaaggctgtgaggtgaccaaagcccattggctggaagtccaccacaccctgcccatcagcgagggcgagcgccgaaccacgctagaagatgtgcaggttttatgcagcaaccaccacaaagaagcccatcatttgctgcgcatggctgctttttctgatgaaaaatcaactgaaatttcaacggagtcaacaacttaaaacgcttcaggtcaagctgccatgtgaatgtgcagttactagaacttgaatggcggtattgaggatggcgcacgaggtcaagctgccatgtgaatgtgcagttactagaactgataagttgttggtaagcagggtcagcgtaggtcaagctgccatgtgaatgtgcagttactagaacgccacagcgttcatccgtgcgccccctccgggtcaagctgccatgtgaatgtgcagttactagaactcgctcgcattaaagtgattagcgcggtggggtcaagctgccatgtgaatgtgcagttactagaactcgccttccatgttcatcatcgccattgcgggtcaagctgccatgtgaatgtgcagttactagaacaggtagggttcattacccacccaactattgggtcaagctgccatgtgaatgtgcagttactagaacttagctgtgttgga

SEQ ID NO: 209 - DNA, 12055 bp, Artificial Sequence
  Synthetic Oligonucleotide
  misc_feature (1)..(2382): n is a, c, g, or t
nnnnnnnnnnnnnnnnnnnnnnnnnnnnnnnnnnnnnnnnnnnnnnnnnnnnnnnnnnnnnnnnnnnnnnnnnnnnnnnnnnnnnnnnnnnnnnnnnnnnnnnnnnnnnnnnnnnnnnnnnnnnnnnnnnnnnnnnnnnnnnnnnnnnnnnnnnnnnnnnnnnnnnnnnnnnnnnnnnnnnnnnnnnnnnnnnnnnnnnnnnnnnnnnnnnnnnnnnnnnnnnnnnnnnnnnnnnnnnnnnnnnnnnnnnnnnnnnnnnnnnnnnnnnnnnnnnnnnnnnnnnnnnnnnnnnnnnnnnnnnnnnnnnnnnnnnnnnnnnnnnnnnnnnnnnnnnnnnnnnnnnnnnnnnnnnnnnnnnnnnnnnnnnnnnnnnnnnnnnnnnnnnnnnnnnnnnnnnnnnnnnnnnnnnnnnnnnnnnnnnnnnnnnnnnnnnnnnnnnnnnnnnnnnnnnnnnnnnnnnnnnnnnnnnnnnnnnnnnnnnnnnnnnnnnnnnnnnnnnnnnnnnnnnnnnnnnnnnnnnnnnnnnnnnnnnnnnnnnnnnnnnnnnnnnnnnnnnnnnnnnnnnnnnnnnnnnnnnnnnnnnnnnnnnnnnnnnnnnnnnnnnnnnnnnnnnnnnnnnnnnnnnnnnnnnnnnnnnnnnnnnnnnnnnnnnnnnnnnnnnnnnnnnnnnnnnnnnnnnnnnnnnnnnnnnnnnnnnnnnnnnnnnnnnnnnnnnnnnnnnnnnnnnnnnnnnnnnnnnnnnnnnnnnnnnnnnnnnnnnnnnnnnnnnnnnnnnnnnnnnnnnnnnnnnnnnnnnnnnnnnnnnnnnnnnnnnnnnnnnnnnnnnnnnnnnnnnnnnnnnnnnnnnnnnnnnnnnnnnnnnnnnnnnnnnnnnnnnnnnnnnnnnnnnnnnnnnnnnnnnnnnnnnnnnnnnnnnnnnnnnnnnnnnnnnnnnnnnnnnnnnnnnnnnnnnnnnnnnnnnnnnnnnnnnnnnnnnnnnnnnnnnnnnnnnnnnnnnnnnnnnnnnnnnnnnnnnnnnnnnnnnnnnnnnnnnnnnnnnnnnnnnnnnnnnnnnnnnnnnnnnnnnnnnnnnnnnnnnnnnnnnnnnnnnnnnnnnnnnnnnnnnnnnnnnnnnnnnnnnnnnnnnnnnnnnnnnnnnnnnnnnnnnnnnnnnnnnnnnnnnnnnnnnnnnnnnnnnnnnnnnnnnnnnnnnnnnnnnnnnnnnnnnnnnnnnnnnnnnnnnnnnnnnnnnnnnnnnnnnnnnnnnnnnnnnnnnnnnnnnnnnnnnnnnnnnnnnnnnnnnnnnnnnnnnnnnnnnnnnnnnnnnnnnnnnnnnnnnnnnnnnnnnnnnnnnnnnnnnnnnnnnnnnnnnnnnnnnnnnnnnnnnnnnnnnnnnnnnnnnnnnnnnnnnnnnnnnnnnnnnnnnnnnnnnnnnnnnnnnnnnnnnnnnnnnnnnnnnnnnnnnnnnnnnnnnnnnnnnnnnnnnnnnnnnnnnnnnnnnnnnnnnnnnnnnnnnnnnnnnnnnnnnnnnnnnnnnnnnnnnnnnnnnnnnnnnnnnnnnnnnnnnnnnnnnnnnnnnnnnnnnnnnnnnnnnnnnnnnnnnnnnnnnnnnnnnnnnnnnnnnnnnnnnnnnnnnnnnnnnnnnnnnnnnnnnnnnnnnnnnnnnnnnnnnnnnnnnnnnnnnnnnnnnnnnnnnnnnnnnnnnnnnnnnnnnnnnnnnnnnnnnnnnnnnnnnnnnnnnnnnnnnnnnnnnnnnnnnnnnnnnnnnnnnnnnnnnnnnnnnnnnnnnnnnnnnnnnnnnnnnnnnnnnnnnnnnnnnnnnnnnnnnnnnnnnnnnnnnnnnnnnnnnnnnnnnnnnnnnnnnnnnnnnnnnnnnnnnnnnnnnnnnnnnnnnnnnnnnnnnnnnnnnnnnnnnnnnnnnnnnnnnnnnnnnnnnnnnnnnnnnnnnnnnnnnnnnnnnnnnnnnnnnnnnnnnnnnnnnnnnnnnnnnnnnnnnnnnnnnnnnnnnnnnnnnnnnnnnnnnnnnnnnnnnnnnnnnnnnnnnnnnnnnnnnnnnnnnnnnnnnnnnnnnnnnnnnnnnnnnnnnnnnnnnnnnnnnnnnnnnnnnnnnnnnnnnnnnnnnnnnnnnnnnnnnnnnnnnnnnnnnnnnnnnnnnnnnnnnnnnnnnnnnnnnnnnnnnnnnnnnnnnnnnnnnnnnnnnnnnnnnnnnnnnnnnnnnnnnnnnnnnnnnnnnnnnnnnnnnnnnnnnnnnnnnnnnnnnnnnnnnnnnnnnnnnnnnnnnnnnnnnnnnnnnnnnnnnnnnnnnnnnnnnnnnnnnnnnnnnnnnnnnnnnnnnnnnnnnnnnnnnnnnnnnnnnnnnnnnnnnnnnnnnnnnnnnnnnnnnnnnnnnnnnnnnnnnnnnnngcgatgtgatacacgcccagcagcgcaatggtgatgaaccacaccacggtgatggggccaaacaacttgccaatgccactggtgccgtgcttttgcaccgcaaacaaacaaaacaaaatcaccaaggtcaggggcaccacatatttggagagccctggagaaatcacctccaagccctccaccgccgacagcaccgagatggccggggtgatcaccccgtcgccataaaacaaacaggtcccaaaaatgcccaccaccagcagcacccggcgcagcttgggcttgtctttgaccgattgcgaagccagcgccaacatggccaccaaaccaccctcgccgttgttgtcggcccgcagcaccaaactcacatatttgagcgaaacaatgacggtcaaggtccaaaagaagatggacaaaatgccgtaaatattgtcgggggtgaaggccacatggcccgagccaaacacctctttgaccgcatacaagacactggtgccgatgtcgccgtagaccacaccaatggcccccaaggtgagggcggccaaagaagatttttgatgttgcatgaaattcgcacgaagccgggcaagagcggcattatgcgagcttccgggcgtttggaaacccttttcgatcggctggcgactctaaatatcgcgcctgaggcctttaatcgtaaatttccgcgtccgggtcggtcgactccagctcgtagctggccgccaacatggccaaacggccaatcacgccgtacatgtaaaagcggttgggcacgctggcccccgctttgacgccaggttggggcgtgtgggcgctttgctcgaacgccaagggcacaaagctcgaccctggggcgttgaggttttcgtccacgccgcgctcggcatgcacccggtaaaagccgcccaccacatagcggtccatcatgtagaccaccggctcggccaccgcgtcgttgatgcgctcgttggtcagcacaccctcttggatgatgacctcgctcacctcttgaccgtctttgatgacgctcattttgttgcgggttttgcggttgatcacctccaggtctttgacatcgcgcaccgtcatgatgcccatgccataggtgccgttgtcggccttgaccaccacaaacggcttttcattgatgccgtactctttgtatttgcgccgggttttggtcagcaaagcgtccacatggctgcgcaagaactccatgcccgcgctttcgctgaaatccacctcgccgcactggctgaacatggggttgatcaaccacgggtcgatgcccagcaacttgccaaagcgcttggagacctcctcataacaggcaaagtgctggctcttgcgccgcacgcaccaacccgcatgcagcgggggcagcaaaaactgctcgtgcaggtcttccaagatgccagggatgcccgcgctcaagtcgttgttgagcaagatggtgcaggggtcaaagtctttcagccccaagcgcgatttgttgcggatcaccggttccagggtcaccgcatcgccattgggcagatcgatggtggtgttctctttgatatcggggttgatcgagccaatgcgcacattcaggcccgccatgttgaagatgcgcgccagttgcgccacattgctcaaataaaaggtgttgcgggtgtggttctcggggatcagcagcaggttgcgcgcttcggggcaaattttctcaatcgcggccatcgccgcttgcaccgccaagggcagcatttcgggcgtgaggttgttccagccgccggggtagaggttggtgtccacgggggccaacttgaaacccgcattgcgcacgtccaccgaggtgtagaacggcggcgtgtgctccatccactccatgcgaaaccagcgctcaatggcgggcatggagtcgaggatgcgttgctcgagctcgttgatggggccagtgagcgcggtgatgaggtgaggaaccatggggtcgcttatagatatgagagtggtggttaagtgggggtgattctgacagcttcaagctggggcagtccctgccatgcccctgccatgacctggctcagggcccacaccgccccgcttcctctgtgacctctgacccgttgtgccccagctctgaatggtggcgctggcgcaacaagtaatctttttggcctcattaaatagcttaatacgattatttaaggtttaaatatgtacactttaatacccaatttacaggagaaatcatgaaaaaactattgatctgcttggccgccacggccgctgtgtgttccgcccaggcccaatcgggcgacttcaccggattttcggcggggggtaacttggcgatgaatgctggaaatttcacacagccatacgatgtctattcagagttttcatttggcatgcaatctattggtgttggtggctttgcgggttacgggctttccattggaaacgccgctgtgctgactttgggttttgattactcattctcggatatcaaagcttctgaattaaaaggtgccacctcctcaacctcaaaattgcaaaacctctggtcggtgtccattgcccccggcacgatgctgaacgataaaactctagcctacttcaaactgggttttgaaaatggcaaagccgtttattctggcgccacagagttgtcgaaaaacatcactgggaccagttggggggttggcatgaaaaccttattcgacaaaaacatttttatgcaaatcgaggtcaagcaggccaacttcggaacagcccgttacgatggcgggaccgtcgatttcacggcccgcggtacgaccggttcggtgggcgtgggcttcatgttctaaaccttctgatgaagggaaaaaagccacttcggtggctttttttacgccattggcatcccagggcctggcgtacaaaacccaacattcaggccgcgccactgtgtctttgcgccttcaagtgcgccccatcgaggtactgcgccagcagtcccatgtcagcatcgcgcacgtgatggcttttgaacgcggcttgccactgggccacgaacccggcgatgtctttgaccacctggttggccacgtcttttgtcaacccaaaggcagcggcctctgacagtgcattggccatgctggcttcgtggccctgcgcacccacccgcatttgctgataacccaagccttgcgcggcgggcagcacatcaaaggctggtgtcagggcgtaaaagccgtcgtcgctacgcaccaaggcatggtttttttcatggtcgtcggtgttgtcgatcaagatgttgaacaccatgcgcctgaacaactcttgctgttgtgcccgcacctggtcggggcggcccaagcgccgcaacagttgcgacaactctgggtagcccatggcttcgccagctgcgcgcagcgccacacgggccgactgcacatgcaagcgttggctgcccgcgcggtcaaagcggcgcacggccaaggcgtggccttggggcaagggcagcaaaagggtgtctgcggtgtgaatgccgcagcggcgggccaactgcatgctggcatgctcgatcaatggcgtgtccagttcaccgccttcggcaaacttgaccacccacgacgcgccatcgatgcgcatcagcgacttgggccgcgccccgcccatggacacaccgggttgcaacaggcggcgctgatgctcgctgatggcctcaccggccatgacgcgttgcaccgcgttgtgcatgtcgctcaaaccctcaaacgtggacagggctgctgtggcggcgggaacatatgtttcggtctgcagcgacacgcccaaggccccaaagcggtcatcgcctgcaaagtacaaatactccagcacagacaagcgggcgggccgctcgatcaaacggatgacgcgctcaccccattggtcagggcgtgcatcatcgaccgctccaacgaccgtgccatgctcgtcgggcagcatcaggcccgtttgcaatggcaagtcttcgctcaaggcaaagccttgcccgggcgccaaccattcggcggcataggtcaagcccactttgcgccggttgtcttgcaaagagatggtgccaatgcgccgaggatttgccgcatcagccagccaccacaggcccatgctgtcttgcggttggtaagggcggttcacaacggcgactccggcttgcgtgacatccgccggctgcgttggcgcaccgcttcaatgtcttgttctagggcgttggtgtcgtgcacgggcgcggccacctcggccaaggcggcatgacggcccatgagccacaaggccgtggcgtaaacgcccatgcccaccgatgggtcgcccctttccatgcgcatgagcgtgggcaccgacaccgccatgcggctggcccaagcgcgcaggctttccttgcggcgctggcgcgcaagtgcgaggttctcccccaagtccaccagtgctttggcggcagaggccgggagttgatcggcggctgaagacggctttggcatcacacaaactttaacacagcgttaaatatgtgtggttttgatttacctcatgacctcaagttgctttttctttgtatcccattgaaatcaccggtctttagtcaccgcatgcgcttgaacgtattggcgcaacacaccgtccatgcggctttgccagccttcgccagtggctttgaaatacgccacaacctctgggctgtaacgaaccgaaaccaagagctttttttcggctgacttcggcctgccgcgcaaagccttcatgggcaccatcgcctgcaactgcttgggcgtcagcggcaaggcgtccgggtctgttctggcagcagcgttgatgcagcggtcctctgccaccgtgggcatcaccacagcaagacgtttaagtgttttcgacatggtgtttaacctctctgcggttggctcggcgcaagcgccttcatcttgcattcatgatattcaaatcgcccatcgatccaggccagtgccacaccccagcatcgtttgaatttgttaaaagtaattcttaagatcatattttgatctttttatctattaatatgggttctcattgattactttttgatctgtggcggccttggtcaaaacgattggagaccctttggaaccctttgtcctccgcgcacacctgcgcacccccgtgattcggcgtggtcatgtcaccttggatgcactgctcatgtcgagcttggcctgtggtgatatatcccacctgctgcggtgcgaaaacggcttgtactttgccagttcgggctttgcagtagaagcccacgccacgcaacgtgcttcgtttgtggccagtatgcggccagaacattcaccgcattggctggaggtgttgcagcccaacacccaagacaaagatttgcggatcggcctgtccaggcaacgcgaggcgggcaacatcatcaacgcctacaccgcgactgttgccaacgccatcgagtggtatgccactggtgacatgcaagcagtgttgaaggtggtgcgctccatccctttcataggcaagcgcagaaccgcaggctatggcgaagtagttcgttgggatgcagaggttggcgagttggacggtgtggtgggctatgcagacgatcccttgcgccctgtgcccactgagcgctggacacaaggcggcgattgggttcctgtcgaagccgcttggaaagccccttattgggatgtgcgcaaccgcacccgctgctttgcgccacaggtgtgagccatgaacggccccgaatttttcatgcgccatgttggttaccggctgctgccacctgaccaacacacccaagacgcggtcacggatgccgaccggctttttggcctttccttgcccctgcacacctgcaagacactgcgtttgtcatcttgctggatggtggtcaccccgcaatgggtggccaccagcttcaaagcgttgacaagccttggctttcgccacgacatggagcgcaaaaccgctattcatgccgccctccagtcgggcgagccttgtttgctattggcattgggcaaacgcaccatggcggcacgcgacctgtttgtcacctacgacccgcgtgccgcacgcttgtgcagcgagggcgaagtcaaaacatttgacgccactcaggagaaaacatggacatcttgatagacaaaccagcgcgtgtgcggggctatgccctgcaccgcatcgttgagcaataccgaaacggcaaacccgctttgtgggcagacgaaggtcaacaactgcgcatccgccccgaagaggccacaccgccccactacgacattggcaagttgctggctttcaccaccaccgcttgcgtgtcgttcagcagcggccacaaacacaaatacctgcccttggccgattggcgtggtcgcagggcttggctggacaaacaaggcatgaagcacggctttgaaattgtcggcgtacacatcacccccggcatgcaagaagtgcaaacccatgacggcagacgcttcaaattagacgccaccgaattcactggcctattgaaagtgctcgagcccgcagtgtttgccctgtgcctgagcaaaggcattggcaaggtgggcaaagcctttggcctgaacctcttgatcgttcaataaccccgaaagaccacaccatgacctcaaacctcaccttggttgccgccatcgacatgtacaccatgcaacccctgaccttcacccaccacggcacagaaggcctgcccttgctgacccgtggcatcgacgccgaaggtcgccaccagcgcagcgtctacatccccgccgcgcaactgcgggggcgcttgcgccacgaggctgctttggccgaactgcgcggccgcccccacaaagccaagctggaagatgcatatttgttggcactgggacaagacctgcgccccaacgaagacgaagagcccgaagccgttcgcctcaaagagcaaatcacatttcgccaacaaaaccccttgctcgatatctttggcacttggaaagtggcaagccgcctgtttgtgtcgcacctcttgccagcggtcaacgtcttgcccgacaaagtcagccacattcgccgcgacttggacaccaaccaagacatgatgaacttgctcgatgacgcggaacatgaccgcttttatgagcgccaaggcaaacagggcttggcctccaaagccgagggcttgatcaaactcagcatgcgcgaactggccgccgcccgcaaagccaaagacacggccaagatggatgacatcaacgccaaactggaagaactcaaagccttgaagcaaacccgaaagggcgacgatacatctgacaacaccaaacacttgctggaattacaagtgattccttcgggcatcaccctcagcggcaagctcaccatgatgcatgcccaagccttcgatctgcaaaccttggtcaccgcctttaacggcctgagccgaaaaccgttcatgggtgcgcaacaagctaggggctatggcgaggtcaagggtcgagtgcgcttcagcagtgccgatggagaggtgttgttggtgctggattttggtggcctgcaagcggccactttggactggacccaagcgggcttggacttgcttcaaaccgccaacatgaccacggcggcatgagctttcgcagccctgagcaacagcgctacgccaagctgatcgagaccgcgctgcgccctggcccacccttgctggcaggtgcggcggcaggtttgggtaaaacccatggctacagcattcccttggtgcgatcgggcaagcgcatcgccattgccatgagcacacgtcagctgatgcagcaataccttgaaagcgacgccctgaaagccgccctgcaaggccaggccatcagcgtggtggctttgcaaacccgccacagttttgccagcgaacaggactaccaaacgcaccgcgaccaagccatgcaagcgcaagtgctggtgctgacccacgcggcggcattgatcgacagctggcaacccagctatgcccaactgcgccaacgcgatgtggtgctgtttgacgaggccgatttgctggccgatgccgccgatctgcgcagcaccttccacctcagcgccgccacccttgccgactgcggtgctgcctcgttggcaccggcaattaccgcgcaaaaagtgctgcaacacgccacccagcccgaagaccgctgcgccgccagtgccatcttgtatgccttggcccaccctgcggcctacaaagtggtgggttatgacgacgaaggcgctttgctgctcaagcaccgcatgccggggcgcatgctcaagcccttggtgcgcgatgtgccgcgctgcgtcttcaccagcggtacgctgcaagtcaatgggcgtttcgaccatttcgtgcgctgccttggcctgcaagccattgcccccgaaagccgccacctcgaccccgcacagcatggcaagctgagggtggaagtggccaccgaaaccctgacccacgaagccatggcccagcgcatcgcccatgccgccaaaccgtgcttggtgctgaccaacagccaccacatgagcgcccaactgggtgcgttgttgcccgacgcggtggtccgcacgccgcaagaacccttggctgacgccgtgcaacgctgccccgatggcggggtgctgatcgcagcgggtgcgtggtcgggcttggacgaacctcgcttgcgctggcagaccgtggtcatcccgcaaacgccctatggccagcccatggaagtgaacgggcaagccctcaaccacttcatcgacagccaagtggtggcgctgcgccgcacccaccaaggcttgcaccgagggctgcgcacccccgacgcccaatgcaccctgctgttgctggacccccgcagcagccgcatggctttgcgccccgccattcctgaacgcttccatgtggactggggcggttttgaagagggtgctgaagtcttgcaaacccatctccagcgcgagcgcaacgcgcagctgcgcgctgccgctttgaagcaccatggcccccaatgcatgcatgccgattgcagcgtgaccgccctgcatttgctggatgtgcaccacacccgccccatcagcgaaggagagcggcgcaccacgctcgatgaggtgaaagttttgtgcaaaaaccaccatgcccaagcccaccatgacctgcgccatgccatttttttgcaagcccaaatcccagaaaaccctttggcgtcaagcgcttgaagcgggtctgctccagccgccatgtatttgtgcggttactagaacttgtaatcaggatggttggctgattccttttgctccagccgccatgtatttgtgcggttactagaactcaaagtcatctgcatcccattcgcatggggctccagccgccatgtatttgtgcggttactagaaccgaatcacaagacttgttgtccgtagttgaggctccagccgccatgtatttgtgcggttactagaactcgcaggcataccgcaaagcatcaataacagctccagccgccatgtatttgtgcggttactagaaccaagaaactcctgcggatgggtgtgattaagctccagccgccatgtatttgtgcggttactagaactatgcgactgtgatgccgtaggctgtgcctgctccagccgccatgtatttgtgcggttactagaactaatggtaaga

SEQ ID NO: 210 - DNA, 12005 bp, Artificial Sequence
  Synthetic Oligonucleotide
  misc_feature (1)..(8027): n is a, c, g, or t
nnnnnnnnnnnnnnnnnnnnnnnnnnnnnnnnnnnnnnnnnnnnnnnnnnnnnnnnnnnnnnnnnnnnnnnnnnnnnnnnnnnnnnnnnnnnnnnnnnnnnnnnnnnnnnnnnnnnnnnnnnnnnnnnnnnnnnnnnnnnnnnnnnnnnnnnnnnnnnnnnnnnnnnnnnnnnnnnnnnnnnnnnnnnnnnnnnnnnnnnnnnnnnnnnnnnnnnnnnnnnnnnnnnnnnnnnnnnnnnnnnnnnnnnnnnnnnnnnnnnnnnnnnnnnnnnnnnnnnnnnnnnnnnnnnnnnnnnnnnnnnnnnnnnnnnnnnnnnnnnnnnnnnnnnnnnnnnnnnnnnnnnnnnnnnnnnnnnnnnnnnnnnnnnnnnnnnnnnnnnnnnnnnnnnnnnnnnnnnnnnnnnnnnnnnnnnnnnnnnnnnnnnnnnnnnnnnnnnnnnnnnnnnnnnnnnnnnnnnnnnnnnnnnnnnnnnnnnnnnnnnnnnnnnnnnnnnnnnnnnnnnnnnnnnnnnnnnnnnnnnnnnnnnnnnnnnnnnnnnnnnnnnnnnnnnnnnnnnnnnnnnnnnnnnnnnnnnnnnnnnnnnnnnnnnnnnnnnnnnnnnnnnnnnnnnnnnnnnnnnnnnnnnnnnnnnnnnnnnnnnnnnnnnnnnnnnnnnnnnnnnnnnnnnnnnnnnnnnnnnnnnnnnnnnnnnnnnnnnnnnnnnnnnnnnnnnnnnnnnnnnnnnnnnnnnnnnnnnnnnnnnnnnnnnnnnnnnnnnnnnnnnnnnnnnnnnnnnnnnnnnnnnnnnnnnnnnnnnnnnnnnnnnnnnnnnnnnnnnnnnnnnnnnnnnnnnnnnnnnnnnnnnnnnnnnnnnnnnnnnnnnnnnnnnnnnnnnnnnnnnnnnnnnnnnnnnnnnnnnnnnnnnnnnnnnnnnnnnnnnnnnnnnnnnnnnnnnnnnnnnnnnnnnnnnnnnnnnnnnnnnnnnnnnnnnnnnnnnnnnnnnnnnnnnnnnnnnnnnnnnnnnnnnnnnnnnnnnnnnnnnnnnnnnnnnnnnnnnnnnnnnnnnnnnnnnnnnnnnnnnnnnnnnnnnnnnnnnnnnnnnnnnnnnnnnnnnnnnnnnnnnnnnnnnnnnnnnnnnnnnnnnnnnnnnnnnnnnnnnnnnnnnnnnnnnnnnnnnnnnnnnnnnnnnnnnnnnnnnnnnnnnnnnnnnnnnnnnnnnnnnnnnnnnnnnnnnnnnnnnnnnnnnnnnnnnnnnnnnnnnnnnnnnnnnnnnnnnnnnnnnnnnnnnnnnnnnnnnnnnnnnnnnnnnnnnnnnnnnnnnnnnnnnnnnnnnnnnnnnnnnnnnnnnnnnnnnnnnnnnnnnnnnnnnnnnnnnnnnnnnnnnnnnnnnnnnnnnnnnnnnnnnnnnnnnnnnnnnnnnnnnnnnnnnnnnnnnnnnnnnnnnnnnnnnnnnnnnnnnnnnnnnnnnnnnnnnnnnnnnnnnnnnnnnnnnnnnnnnnnnnnnnnnnnnnnnnnnnnnnnnnnnnnnnnnnnnnnnnnnnnnnnnnnnnnnnnnnnnnnnnnnnnnnnnnnnnnnnnnnnnnnnnnnnnnnnnnnnnnnnnnnnnnnnnnnnnnnnnnnnnnnnnnnnnnnnnnnnnnnnnnnnnnnnnnnnnnnnnnnnnnnnnnnnnnnnnnnnnnnnnnnnnnnnnnnnnnnnnnnnnnnnnnnnnnnnnnnnnnnnnnnnnnnnnnnnnnnnnnnnnnnnnnnnnnnnnnnnnnnnnnnnnnnnnnnnnnnnnnnnnnnnnnnnnnnnnnnnnnnnnnnnnnnnnnnnnnnnnnnnnnnnnnnnnnnnnnnnnnnnnnnnnnnnnnnnnnnnnnnnnnnnnnnnnnnnnnnnnnnnnnnnnnnnnnnnnnnnnnnnnnnnnnnnnnnnnnnnnnnnnnnnnnnnnnnnnnnnnnnnnnnnnnnnnnnnnnnnnnnnnnnnnnnnnnnnnnnnnnnnnnnnnnnnnnnnnnnnnnnnnnnnnnnnnnnnnnnnnnnnnnnnnnnnnnnnnnnnnnnnnnnnnnnnnnnnnnnnnnnnnnnnnnnnnnnnnnnnnnnnnnnnnnnnnnnnnnnnnnnnnnnnnnnnnnnnnnnnnnnnnnnnnnnnnnnnnnnnnnnnnnnnnnnnnnnnnnnnnnnnnnnnnnnnnnnnnnnnnnnnnnnnnnnnnnnnnnnnnnnnnnnnnnnnnnnnnnnnnnnnnnnnnnnnnnnnnnnnnnnnnnnnnnnnnnnnnnnnnnnnnnnnnnnnnnnnnnnnnnnnnnnnnnnnnnnnnnnnnnnnnnnnnnnnnnnnnnnnnnnnnnnnnnnnnnnnnnnnnnnnnnnnnnnnnnnnnnnnnnnnnnnnnnnnnnnnnnnnnnnnnnnnnnnnnnnnnnnnnnnnnnnnnnnnnnnnnnnnnnnnnnnnnnnnnnnnnnnnnnnnnnnnnnnnnnnnnnnnnnnnnnnnnnnnnnnnnnnnnnnnnnnnnnnnnnnnnnnnnnnnnnnnnnnnnnnnnnnnnnnnnnnnnnnnnnnnnnnnnnnnnnnnnnnnnnnnnnnnnnnnnnnnnnnnnnnnnnnnnnnnnnnnnnnnnnnnnnnnnnnnnnnnnnnnnnnnnnnnnnnnnnnnnnnnnnnnnnnnnnnnnnnnnnnnnnnnnnnnnnnnnnnnnnnnnnnnnnnnnnnnnnnnnnnnnnnnnnnnnnnnnnnnnnnnnnnnnnnnnnnnnnnnnnnnnnnnnnnnnnnnnnnnnnnnnnnnnnnnnnnnnnnnnnnnnnnnnnnnnnnnnnnnnnnnnnnnnnnnnnnnnnnnnnnnnnnnnnnnnnnnnnnnnnnnnnnnnnnnnnnnnnnnnnnnnnnnnnnnnnnnnnnnnnnnnnnnnnnnnnnnnnnnnnnnnnnnnnnnnnnnnnnnnnnnnnnnnnnnnnnnnnnnnnnnnnnnnnnnnnnnnnnnnnnnnnnnnnnnnnnnnnnnnnnnnnnnnnnnnnnnnnnnnnnnnnnnnnnnnnnnnnnnnnnnnnnnnnnnnnnnnnnnnnnnnnnnnnnnnnnnnnnnnnnnnnnnnnnnnnnnnnnnnnnnnnnnnnnnnnnnnnnnnnnnnnnnnnnnnnnnnnnnnnnnnnnnnnnnnnnnnnnnnnnnnnnnnnnnnnnnnnnnnnnnnnnnnnnnnnnnnnnnnnnnnnnnnnnnnnnnnnnnnnnnnnnnnnnnnnnnnnnnnnnnnnnnnnnnnnnnnnnnnnnnnnnnnnnnnnnnnnnnnnnnnnnnnnnnnnnnnnnnnnnnnnnnnnnnnnnnnnnnnnnnnnnnnnnnnnnnnnnnnnnnnnnnnnnnnnnnnnnnnnnnnnnnnnnnnnnnnnnnnnnnnnnnnnnnnnnnnnnnnnnnnnnnnnnnnnnnnnnnnnnnnnnnnnnnnnnnnnnnnnnnnnnnnnnnnnnnnnnnnnnnnnnnnnnnnnnnnnnnnnnnnnnnnnnnnnnnnnnnnnnnnnnnnnnnnnnnnnnnnnnnnnnnnnnnnnnnnnnnnnnnnnnnnnnnnnnnnnnnnnnnnnnnnnnnnnnnnnnnnnnnnnnnnnnnnnnnnnnnnnnnnnnnnnnnnnnnnnnnnnnnnnnnnnnnnnnnnnnnnnnnnnnnnnnnnnnnnnnnnnnnnnnnnnnnnnnnnnnnnnnnnnnnnnnnnnnnnnnnnnnnnnnnnnnnnnnnnnnnnnnnnnnnnnnnnnnnnnnnnnnnnnnnnnnnnnnnnnnnnnnnnnnnnnnnnnnnnnnnnnnnnnnnnnnnnnnnnnnnnnnnnnnnnnnnnnnnnnnnnnnnnnnnnnnnnnnnnnnnnnnnnnnnnnnnnnnnnnnnnnnnnnnnnnnnnnnnnnnnnnnnnnnnnnnnnnnnnnnnnnnnnnnnnnnnnnnnnnnnnnnnnnnnnnnnnnnnnnnnnnnnnnnnnnnnnnnnnnnnnnnnnnnnnnnnnnnnnnnnnnnnnnnnnnnnnnnnnnnnnnnnnnnnnnnnnnnnnnnnnnnnnnnnnnnnnnnnnnnnnnnnnnnnnnnnnnnnnnnnnnnnnnnnnnnnnnnnnnnnnnnnnnnnnnnnnnnnnnnnnnnnnnnnnnnnnnnnnnnnnnnnnnnnnnnnnnnnnnnnnnnnnnnnnnnnnnnnnnnnnnnnnnnnnnnnnnnnnnnnnnnnnnnnnnnnnnnnnnnnnnnnnnnnnnnnnnnnnnnnnnnnnnnnnnnnnnnnnnnnnnnnnnnnnnnnnnnnnnnnnnnnnnnnnnnnnnnnnnnnnnnnnnnnnnnnnnnnnnnnnnnnnnnnnnnnnnnnnnnnnnnnnnnnnnnnnnnnnnnnnnnnnnnnnnnnnnnnnnnnnnnnnnnnnnnnnnnnnnnnnnnnnnnnnnnnnnnnnnnnnnnnnnnnnnnnnnnnnnnnnnnnnnnnnnnnnnnnnnnnnnnnnnnnnnnnnnnnnnnnnnnnnnnnnnnnnnnnnnnnnnnnnnnnnnnnnnnnnnnnnnnnnnnnnnnnnnnnnnnnnnnnnnnnnnnnnnnnnnnnnnnnnnnnnnnnnnnnnnnnnnnnnnnnnnnnnnnnnnnnnnnnnnnnnnnnnnnnnnnnnnnnnnnnnnnnnnnnnnnnnnnnnnnnnnnnnnnnnnnnnnnnnnnnnnnnnnnnnnnnnnnnnnnnnnnnnnnnnnnnnnnnnnnnnnnnnnnnnnnnnnnnnnnnnnnnnnnnnnnnnnnnnnnnnnnnnnnnnnnnnnnnnnnnnnnnnnnnnnnnnnnnnnnnnnnnnnnnnnnnnnnnnnnnnnnnnnnnnnnnnnnnnnnnnnnnnnnnnnnnnnnnnnnnnnnnnnnnnnnnnnnnnnnnnnnnnnnnnnnnnnnnnnnnnnnnnnnnnnnnnnnnnnnnnnnnnnnnnnnnnnnnnnnnnnnnnnnnnnnnnnnnnnnnnnnnnnnnnnnnnnnnnnnnnnnnnnnnnnnnnnnnnnnnnnnnnnnnnnnnnnnnnnnnnnnnnnnnnnnnnnnnnnnnnnnnnnnnnnnnnnnnnnnnnnnnnnnnnnnnnnnnnnnnnnnnnnnnnnnnnnnnnnnnnnnnnnnnnnnnnnnnnnnnnnnnnnnnnnnnnnnnnnnnnnnnnnnnnnnnnnnnnnnnnnnnnnnnnnnnnnnnnnnnnnnnnnnnnnnnnnnnnnnnnnnnnnnnnnnnnnnnnnnnnnnnnnnnnnnnnnnnnnnnnnnnnnnnnnnnnnnnnnnnnnnnnnnnnnnnnnnnnnnnnnnnnnnnnnnnnnnnnnnnnnnnnnnnnnnnnnnnnnnnnnnnnnnnnnnnnnnnnnnnnnnnnnnnnnnnnnnnnnnnnnnnnnnnnnnnnnnnnnnnnnnnnnnnnnnnnnnnnnnnnnnnnnnnnnnnnnnnnnnnnnnnnnnnnnnnnnnnnnnnnnnnnnnnnnnnnnnnnnnnnnnnnnnnnnnnnnnnnnnnnnnnnnnnnnnnnnnnnnnnnnnnnnnnnnnnnnnnnnnnnnnnnnnnnnnnnnnnnnnnnnnnnnnnnnnnnnnnnnnnnnnnnnnnnnnnnnnnnnnnnnnnnnnnnnnnnnnnnnnnnnnnnnnnnnnnnnnnnnnnnnnnnnnnnnnnnnnnnnnnnnnnnnnnnnnnnnnnnnnnnnnnnnnnnnnnnnnnnnnnnnnnnnnnnnnnnnnnnnnnnnnnnnnnnnnnnnnnnnnnnnnnnnnnnnnnnnnnnnnnnnnnnnnnnnnnnnnnnnnnnnnnnnnnnnnnnnnnnnnnnnnnnnnnnnnnnnnnnnnnnnnnnnnnnnnnnnnnnnnnnnnnnnnnnnnnnnnnnnnnnnnnnnnnnnnnnnnnnnnnnnnnnnnnnnnnnnnnnnnnnnnnnnnnnnnnnnnnnnnnnnnnnnnnnnnnnnnnnnnnnnnnnnnnnnnnnnnnnnnnnnnnnnnnnnnnnnnnnnnnnnnnnnnnnnnnnnnnnnnnnnnnnnnnnnnnnnnnnnnnnnnnnnnnnnnnnnnnnnnnnnnnnnnnnnnnnnnnnnnnnnnnnnnnnnnnnnnnnnnnnnnnnnnnnnnnnnnnnnnnnnnnnnnnnnnnnnnnnnnnnnnnnnnnnnnnnnnnnnnnnnnnnnnnnnnnnnnnnnnnnnnnnnnnnnnnnnnnnnnnnnnnnnnnnnnnnnnnnnnnnnnnnnnnnnnnnnnnnnnnnnnnnnnnnnnnnnnnnnnnnnnnnnnnnnnnnnnnnnnnnnnnnnnnnnnnnnnnnnnnnnnnnnnnnnnnnnnnnnnnnnnnnnnnnnnnnnnnnnnnnnnnnnnnnnnnnnnnnnnnnnnnnnnnnnnnnnnnnnnnnnnnnnnnnnnnnnnnnnnnnnnnnnnnnnnnnnnnnnnnnnnnnnnnnnnnnnnnnnnnnnnnnnnnnnnnnnnnnnnnnnnnnnnnnnnnnnnnnnnnnnnnnnnnnnnnnnnnnnnnnnnnnnnnnnnnnnnnnnnnnnnnnnnnnnnnnnnnnnnnnnnnnnnnnnnnnnnnnnnnnnnnnnnnnnnnnnnnnnnnnnnnnnnnnnnnnnnnnnnnnnnnnnnnnnnnnnnnnnnnnnnnnnnnnnnnnnnnnnnnnnnnnnnnnnnnnnnnnnnnnnnnnnnnnnnnnnnnnnnnnnnnnnnnnnnnnnnnnnnnnnnnnnnnnnnnnnnnnnnnnnnnnnnnnnnnnnnnnnnnnnnnnnnnnnnnnnnnnnnnnnnnnnnnnnnnnnnnnnnnnnnnnnnnnnnnnnnnnnnnnnnnnnnnnnnnnnnnnnnnnnnnnnnnnnnnnnnnnnnnnnnnnnnnnnnnnnnnnnnnnnnnnnnnnnnnnnnnnnnnnnnnnnnnnnnnnnnnnnnnnnnnnnnnnnnnnnnnnnnnnnnnnnnnnnnnnnnnnnnnnnnnnnnnnnnnnnnnnnnnnnnnnnnnnnnnnnnnnnnnnnnnnnnnnnnnnnnnnnnnnnnnnnnnnnnnnnnnnnnnnnnnnnnnnnnnnnnnnnnnnnnnnnnnnnnnnnnnnnnnnnnnnnnnnnnnnnnnnnnnnnnnnnnnnnnnnnnnnnnnnnnnnnnnnnnnnnnnnnnnnnnnnnnnnnnnnnnnnnnnnnnnnnnnnnnnnnnnnnnnnnnnnnnnnnnnnnnnnnnnnnnnnnnnnnnnnnnnnnnnnnnnnnnnnnnnnnnnnnnnnnnnnnnnnnnnnnnnnnnnnnnnnnnnnnnnnnnnnnnnnnnnnnnnnnnnnnnnnnnnnnnnnnnnnnnnnnnnnnnnnnnnnnnnnnnnnnnnnnnnnnnnnnnnnnnnnnnnnnnnnnnnnnnnnnnnnnnnnnnnnnnnnnnnnnnnnnnnnnnnnnnnnnnnnnnnnnnnnnnnnnnnnnnnnnnnnnnnnnnnnnnnnnnnnnnnnnnnnnnnnnnnnnnnnnnnnnnnnnnnnnnnnnnnnnnnnnnnnnnnnnnnnnnnnnnnnnnnnnnnnnnnnnnnnnnnnnnnnnnnnnnnnnnnnnnnnnnnnnnnnnnnnnnnnnnnnnnnnnnnnnnnnnnnnnnnnnnnnnnnnnnnnnnnnnnnnnnnnnnnnnnnnnnnnnnnnnnnnnnnnnnnnnnnnnnnnnnnnnnnnnnnnnnnnnnnnnnnnnnnnnnnnnnnnnnnnnnnnnnnnnnnnnnnnnnnnnnnnnnnnnnnnnnnnnnnnnnnnnnnnnnnnnnnnnnnnnnnnnnnnnnnnnnnnnnnnnnnnnnnnnnnnnnnnnnnnnnnnnnnnnnnnnnnnnnnnnnnnnnnnnnnnnnnnnnnnnnnnnnnnnnnnnnnnnnnnnnnnnnnnnnnnnnnnnnnnnnnnnnnnnnnnnnnnnnnnnnnnnnnnnnnnnnnnnnnnnnnnnnnnnnnnnnnnnnnnnnnnnnnnnnnnnnnnnnnnnnnnnnnnnnnnnnnnnnnnnnnnnnnnnnnnnnnnnnnnnnnnnnnnnnnnnnnnnnnnnnnnnnnnnnnnnnnnnnnnnnnnnnnnnnnnnnnnnnnnnnnnnnnnnnnnnnnnnnnnnnnnnnnnnnnnnnnnnnnnnnnnnnnnnnnnnnnnnnnnnnnnnnnnnnnnnnnnnnnnnnnnnnnnnnnnnnnnnnnnnnnnnnnnnnnnnnnnnnnnngggccgccggcggcgactgggttcccgtggaggcggcctggaaggcgccctactgggacgtgcgcaaccgcacccgctgcttcgtgccggagaccgtggcatgaacggcgccgagttcttcatgcgccatgccggctatcggctgctgcccgccgagatggccacgggtgacgcggtggatgacgccaacaccgtgctgggcatcagcctgccgcagcacacaggcaagttcctcaggctgtcttcgtgctggatggtcatcacgcccaaaggcgtggccaccagcttcaaggccctgccatccaccggcttcgacactgccatcgaccgcaagacggccatgctgaccgccttgaagtccggcgagccctgcatgttgttgctgctgggcaagcgcacgatgaccgcgcgcgacctgttcgtcacctacgacccccgggcggcgcgcgagtgcagccagggccacaccaagacctacgacgcgacgaaggagaagtcatggacatcctgatcgacaagccgccgcgcgtgcgcggctatgccctgcaccgcatcgtcgaacagttccgccagggcaagccggccctgtgggccgacgaaggcgcgcagttgcgcatccgcccttgcgaggcccagcccccggctcacccggcgggcaagctgctgggcttcaccaccaccgcctgcgtggccctgcgcgacggcaggcgccaccgctacctgccgctggcagactggcgcggcaggcgcgactggctggacaaggagggcagcaagcacggcttcgaggtggtgggcgtccacgtctcgggcggcatgcaggaggtgcaggcccacgacggccggcgcttcaccgtcgacgccacggagttcaccgggttgctgcgagtcaccgagcccgaggccttcgcccggtgtctggtcaacggcatcggccgcgtcggcaaggccttcgggctcaatctgctcatcgtccagtaaccagggagaccgccatgaactccagccccttcatcttcggcgccatcaccgtgagcacggtgaacccggtcagcttcacgcaccacagcatcgaaggcttgccgctgatgacgcgcggggtcgacgccgagggccggcaccagcgcacggtcttcgtcccagcctcccaactgcgtggccgtatccgccatgaggccgctgcggccgagctcatgcggggccagaaggtcaagctcgaggtcgcctacatggccgcgctcggccaggacctgcgcccggaagaagacaccgagatcgaacaggtccgtttggcagagcagcaggcacagcgcgatcgtcagccgctgctggatctcttcggcacctggaagatggccagccgcctgatggtgtcccacctcatgccgacggtcaacgtggccgcggagtccttcagcgtcatccgtcgcgacctggacgccaaccgcgacctcatggacttgctcggtgacgaggagcaggacgcgctctacgagcggcgcgatcggcaggcttcggcctccaaggtcgagaacatgatcaaggtcacccagcgggagctgatgaaggccaagcgcgccaacaagacgcaagaagtcgaggagatggagaccaagctcgaagagctgaaggcccagaagaaggccgccaagggcgacgacgactccgagaacaccaagcacctgctccagatccaggccatccccgcgggcatcgacctgaccggcaagctggtggtgcagcgcgcgcggccccgtgacctggacatcctggtcggcgccttcgagcgcatcagcctcaagccggtgctgggcgcgcatctggcgcgtgggttcggcgaggtctcgggcaaggtcatcttcacgcgggacggtggcgaggtgctggtcgtcgtgggcttcggcggctacgggccggctcaggtgcagtggaccgaggccggccgcgcctacacgcaggagcctgcggccgcatgacctaccgcagcgccgagcaggcgtcctacgcccgcttgatcgagggcgccctggcgccgggtgccccgctgctggccggcgccgcggcgggcctgggcaagacccatggcttcagcatcccgctgctgcgctcggggcgtcgcgtggccatctcgatgagcacgcgccagttgatcgagcagtacctgtcgagtgcagccctggccgcagccagggatggcatcgacgtcgacgtggaggtgctgcagcctcgactggcgttcgactccgaccgcgcgcatcgtgagcaccgggagcgcgccttgcaggcccgcgtgctggtggtcacgcacgcggcggcgctgatcgacagcctgaacccgggctacgctggcctgcgatcacgcgaggtcgtgctgttcgacgaagccgatctcctggccgacgcggccgacttgcgcagcaccttcgtcatcggcgccaagaccctcgaggaggtcgccccgcgagagaccgacccacgccgcgccgcggagcgcgtcaagtcccaggcagtcgaggccgaggaccgcgcgagcgcggcggccatcctgcacgcgctggaccatcctgcttggtacaaggaggtcggatggaccgacgacggcgatctggcgctgcgccaccgcatgcccgggcgcatgctgcggccgctgctgcgtgaggtgccccgtgccatcttcaccagcggcacgctgcaggtgtcgggccggttcgaccacttcgtcagcagcctggggctgccggctgtggaccccgccagccgccacatcgaccccaaggtccatggacgtctgacggtggagttggcgcacgccggcctgagcgacgaggagaaggcgctgcgcatcctgcaggcgcccaggccggccctggtcttgaccacgagccacgtcgacaccctgaccctgggcgcgctgctgcctggggccgtgctgcgcaccgcccaggagcccctgctggccgcggtggcccgctgcggcgatgacggcatcctggtggccgcgggggcgtggtcgggcctggacgagccgcgcctgcggtggaagagcgtggcgctgcccaaggccccctacggcgcgccggtggtgctggacggccgcgctatcagccgctacatcgacagccgcgtggtcgcggtccggcgcacctgccagggcctgcaccgcgggctgcgcacgcccgatgcccagtgcctgctgctgctgctggacccgcggtccggccggcccgaactgcgcgaggccgtgcccgcgcgcttcagcgtcgactgggatggcgaggtctcggcccaggagggcggccccgagtgggtggcccacttccagcgagagcgcaatcccagcctgcgcaacaaggccctggcccatcacggccaacgctgccagtggccggactgcgaggtcacctccatgcacctgctcgacgttcaccatgcccgccccctggcgcagggcgcccggacgacgacgctggccgatctgcaggtgctgtgcaaaaaccaccatgccgaggcccactaccgaatgcgggtggagggtttcggcggcgtcgaagaggaggtttcgcctgttgtgacagggacttgagagagatcgggttcaagccgccccttggtggggtggttactggaagcgcgccccattggggcagaggggaccacgcgttcaagccgccccttggtggggtggttactggaagatcagcgcgccgatcgccagaccgatcagcgttcaagccgccccttggtggggtggttactggagggtcgggcaccgttgcccgcgtggcgatgttgttcaagccgcagggtttcgtgacggtcacgaaaggcgaaggagcatgagcgcgtcccccgatccgcaagcccagcggtagggccggtcaggcgcgtcgcgccccgatgggcaccaccttggcgccaccctcgaccaggcggtccaagtagtcggcccaccgctgcatggcctcgacgcgctgctcc

SEQ ID NO: 211 - DNA, 12001 bp, Artificial Sequence
  Synthetic Oligonucleotide
  misc_feature (1)..(6625): n is a, c, g, or t
nnnnnnnnnnnnnnnnnnnnnnnnnnnnnnnnnnnnnnnnnnnnnnnnnnnnnnnnnnnnnnnnnnnnnnnnnnnnnnnnnnnnnnnnnnnnnnnnnnnnnnnnnnnnnnnnnnnnnnnnnnnnnnnnnnnnnnnnnnnnnnnnnnnnnnnnnnnnnnnnnnnnnnnnnnnnnnnnnnnnnnnnnnnnnnnnnnnnnnnnnnnnnnnnnnnnnnnnnnnnnnnnnnnnnnnnnnnnnnnnnnnnnnnnnnnnnnnnnnnnnnnnnnnnnnnnnnnnnnnnnnnnnnnnnnnnnnnnnnnnnnnnnnnnnnnnnnnnnnnnnnnnnnnnnnnnnnnnnnnnnnnnnnnnnnnnnnnnnnnnnnnnnnnnnnnnnnnnnnnnnnnnnnnnnnnnnnnnnnnnnnnnnnnnnnnnnnnnnnnnnnnnnnnnnnnnnnnnnnnnnnnnnnnnnnnnnnnnnnnnnnnnnnnnnnnnnnnnnnnnnnnnnnnnnnnnnnnnnnnnnnnnnnnnnnnnnnnnnnnnnnnnnnnnnnnnnnnnnnnnnnnnnnnnnnnnnnnnnnnnnnnnnnnnnnnnnnnnnnnnnnnnnnnnnnnnnnnnnnnnnnnnnnnnnnnnnnnnnnnnnnnnnnnnnnnnnnnnnnnnnnnnnnnnnnnnnnnnnnnnnnnnnnnnnnnnnnnnnnnnnnnnnnnnnnnnnnnnnnnnnnnnnnnnnnnnnnnnnnnnnnnnnnnnnnnnnnnnnnnnnnnnnnnnnnnnnnnnnnnnnnnnnnnnnnnnnnnnnnnnnnnnnnnnnnnnnnnnnnnnnnnnnnnnnnnnnnnnnnnnnnnnnnnnnnnnnnnnnnnnnnnnnnnnnnnnnnnnnnnnnnnnnnnnnnnnnnnnnnnnnnnnnnnnnnnnnnnnnnnnnnnnnnnnnnnnnnnnnnnnnnnnnnnnnnnnnnnnnnnnnnnnnnnnnnnnnnnnnnnnnnnnnnnnnnnnnnnnnnnnnnnnnnnnnnnnnnnnnnnnnnnnnnnnnnnnnnnnnnnnnnnnnnnnnnnnnnnnnnnnnnnnnnnnnnnnnnnnnnnnnnnnnnnnnnnnnnnnnnnnnnnnnnnnnnnnnnnnnnnnnnnnnnnnnnnnnnnnnnnnnnnnnnnnnnnnnnnnnnnnnnnnnnnnnnnnnnnnnnnnnnnnnnnnnnnnnnnnnnnnnnnnnnnnnnnnnnnnnnnnnnnnnnnnnnnnnnnnnnnnnnnnnnnnnnnnnnnnnnnnnnnnnnnnnnnnnnnnnnnnnnnnnnnnnnnnnnnnnnnnnnnnnnnnnnnnnnnnnnnnnnnnnnnnnnnnnnnnnnnnnnnnnnnnnnnnnnnnnnnnnnnnnnnnnnnnnnnnnnnnnnnnnnnnnnnnnnnnnnnnnnnnnnnnnnnnnnnnnnnnnnnnnnnnnnnnnnnnnnnnnnnnnnnnnnnnnnnnnnnnnnnnnnnnnnnnnnnnnnnnnnnnnnnnnnnnnnnnnnnnnnnnnnnnnnnnnnnnnnnnnnnnnnnnnnnnnnnnnnnnnnnnnnnnnnnnnnnnnnnnnnnnnnnnnnnnnnnnnnnnnnnnnnnnnnnnnnnnnnnnnnnnnnnnnnnnnnnnnnnnnnnnnnnnnnnnnnnnnnnnnnnnnnnnnnnnnnnnnnnnnnnnnnnnnnnnnnnnnnnnnnnnnnnnnnnnnnnnnnnnnnnnnnnnnnnnnnnnnnnnnnnnnnnnnnnnnnnnnnnnnnnnnnnnnnnnnnnnnnnnnnnnnnnnnnnnnnnnnnnnnnnnnnnnnnnnnnnnnnnnnnnnnnnnnnnnnnnnnnnnnnnnnnnnnnnnnnnnnnnnnnnnnnnnnnnnnnnnnnnnnnnnnnnnnnnnnnnnnnnnnnnnnnnnnnnnnnnnnnnnnnnnnnnnnnnnnnnnnnnnnnnnnnnnnnnnnnnnnnnnnnnnnnnnnnnnnnnnnnnnnnnnnnnnnnnnnnnnnnnnnnnnnnnnnnnnnnnnnnnnnnnnnnnnnnnnnnnnnnnnnnnnnnnnnnnnnnnnnnnnnnnnnnnnnnnnnnnnnnnnnnnnnnnnnnnnnnnnnnnnnnnnnnnnnnnnnnnnnnnnnnnnnnnnnnnnnnnnnnnnnnnnnnnnnnnnnnnnnnnnnnnnnnnnnnnnnnnnnnnnnnnnnnnnnnnnnnnnnnnnnnnnnnnnnnnnnnnnnnnnnnnnnnnnnnnnnnnnnnnnnnnnnnnnnnnnnnnnnnnnnnnnnnnnnnnnnnnnnnnnnnnnnnnnnnnnnnnnnnnnnnnnnnnnnnnnnnnnnnnnnnnnnnnnnnnnnnnnnnnnnnnnnnnnnnnnnnnnnnnnnnnnnnnnnnnnnnnnnnnnnnnnnnnnnnnnnnnnnnnnnnnnnnnnnnnnnnnnnnnnnnnnnnnnnnnnnnnnnnnnnnnnnnnnnnnnnnnnnnnnnnnnnnnnnnnnnnnnnnnnnnnnnnnnnnnnnnnnnnnnnnnnnnnnnnnnnnnnnnnnnnnnnnnnnnnnnnnnnnnnnnnnnnnnnnnnnnnnnnnnnnnnnnnnnnnnnnnnnnnnnnnnnnnnnnnnnnnnnnnnnnnnnnnnnnnnnnnnnnnnnnnnnnnnnnnnnnnnnnnnnnnnnnnnnnnnnnnnnnnnnnnnnnnnnnnnnnnnnnnnnnnnnnnnnnnnnnnnnnnnnnnnnnnnnnnnnnnnnnnnnnnnnnnnnnnnnnnnnnnnnnnnnnnnnnnnnnnnnnnnnnnnnnnnnnnnnnnnnnnnnnnnnnnnnnnnnnnnnnnnnnnnnnnnnnnnnnnnnnnnnnnnnnnnnnnnnnnnnnnnnnnnnnnnnnnnnnnnnnnnnnnnnnnnnnnnnnnnnnnnnnnnnnnnnnnnnnnnnnnnnnnnnnnnnnnnnnnnnnnnnnnnnnnnnnnnnnnnnnnnnnnnnnnnnnnnnnnnnnnnnnnnnnnnnnnnnnnnnnnnnnnnnnnnnnnnnnnnnnnnnnnnnnnnnnnnnnnnnnnnnnnnnnnnnnnnnnnnnnnnnnnnnnnnnnnnnnnnnnnnnnnnnnnnnnnnnnnnnnnnnnnnnnnnnnnnnnnnnnnnnnnnnnnnnnnnnnnnnnnnnnnnnnnnnnnnnnnnnnnnnnnnnnnnnnnnnnnnnnnnnnnnnnnnnnnnnnnnnnnnnnnnnnnnnnnnnnnnnnnnnnnnnnnnnnnnnnnnnnnnnnnnnnnnnnnnnnnnnnnnnnnnnnnnnnnnnnnnnnnnnnnnnnnnnnnnnnnnnnnnnnnnnnnnnnnnnnnnnnnnnnnnnnnnnnnnnnnnnnnnnnnnnnnnnnnnnnnnnnnnnnnnnnnnnnnnnnnnnnnnnnnnnnnnnnnnnnnnnnnnnnnnnnnnnnnnnnnnnnnnnnnnnnnnnnnnnnnnnnnnnnnnnnnnnnnnnnnnnnnnnnnnnnnnnnnnnnnnnnnnnnnnnnnnnnnnnnnnnnnnnnnnnnnnnnnnnnnnnnnnnnnnnnnnnnnnnnnnnnnnnnnnnnnnnnnnnnnnnnnnnnnnnnnnnnnnnnnnnnnnnnnnnnnnnnnnnnnnnnnnnnnnnnnnnnnnnnnnnnnnnnnnnnnnnnnnnnnnnnnnnnnnnnnnnnnnnnnnnnnnnnnnnnnnnnnnnnnnnnnnnnnnnnnnnnnnnnnnnnnnnnnnnnnnnnnnnnnnnnnnnnnnnnnnnnnnnnnnnnnnnnnnnnnnnnnnnnnnnnnnnnnnnnnnnnnnnnnnnnnnnnnnnnnnnnnnnnnnnnnnnnnnnnnnnnnnnnnnnnnnnnnnnnnnnnnnnnnnnnnnnnnnnnnnnnnnnnnnnnnnnnnnnnnnnnnnnnnnnnnnnnnnnnnnnnnnnnnnnnnnnnnnnnnnnnnnnnnnnnnnnnnnnnnnnnnnnnnnnnnnnnnnnnnnnnnnnnnnnnnnnnnnnnnnnnnnnnnnnnnnnnnnnnnnnnnnnnnnnnnnnnnnnnnnnnnnnnnnnnnnnnnnnnnnnnnnnnnnnnnnnnnnnnnnnnnnnnnnnnnnnnnnnnnnnnnnnnnnnnnnnnnnnnnnnnnnnnnnnnnnnnnnnnnnnnnnnnnnnnnnnnnnnnnnnnnnnnnnnnnnnnnnnnnnnnnnnnnnnnnnnnnnnnnnnnnnnnnnnnnnnnnnnnnnnnnnnnnnnnnnnnnnnnnnnnnnnnnnnnnnnnnnnnnnnnnnnnnnnnnnnnnnnnnnnnnnnnnnnnnnnnnnnnnnnnnnnnnnnnnnnnnnnnnnnnnnnnnnnnnnnnnnnnnnnnnnnnnnnnnnnnnnnnnnnnnnnnnnnnnnnnnnnnnnnnnnnnnnnnnnnnnnnnnnnnnnnnnnnnnnnnnnnnnnnnnnnnnnnnnnnnnnnnnnnnnnnnnnnnnnnnnnnnnnnnnnnnnnnnnnnnnnnnnnnnnnnnnnnnnnnnnnnnnnnnnnnnnnnnnnnnnnnnnnnnnnnnnnnnnnnnnnnnnnnnnnnnnnnnnnnnnnnnnnnnnnnnnnnnnnnnnnnnnnnnnnnnnnnnnnnnnnnnnnnnnnnnnnnnnnnnnnnnnnnnnnnnnnnnnnnnnnnnnnnnnnnnnnnnnnnnnnnnnnnnnnnnnnnnnnnnnnnnnnnnnnnnnnnnnnnnnnnnnnnnnnnnnnnnnnnnnnnnnnnnnnnnnnnnnnnnnnnnnnnnnnnnnnnnnnnnnnnnnnnnnnnnnnnnnnnnnnnnnnnnnnnnnnnnnnnnnnnnnnnnnnnnnnnnnnnnnnnnnnnnnnnnnnnnnnnnnnnnnnnnnnnnnnnnnnnnnnnnnnnnnnnnnnnnnnnnnnnnnnnnnnnnnnnnnnnnnnnnnnnnnnnnnnnnnnnnnnnnnnnnnnnnnnnnnnnnnnnnnnnnnnnnnnnnnnnnnnnnnnnnnnnnnnnnnnnnnnnnnnnnnnnnnnnnnnnnnnnnnnnnnnnnnnnnnnnnnnnnnnnnnnnnnnnnnnnnnnnnnnnnnnnnnnnnnnnnnnnnnnnnnnnnnnnnnnnnnnnnnnnnnnnnnnnnnnnnnnnnnnnnnnnnnnnnnnnnnnnnnnnnnnnnnnnnnnnnnnnnnnnnnnnnnnnnnnnnnnnnnnnnnnnnnnnnnnnnnnnnnnnnnnnnnnnnnnnnnnnnnnnnnnnnnnnnnnnnnnnnnnnnnnnnnnnnnnnnnnnnnnnnnnnnnnnnnnnnnnnnnnnnnnnnnnnnnnnnnnnnnnnnnnnnnnnnnnnnnnnnnnnnnnnnnnnnnnnnnnnnnnnnnnnnnnnnnnnnnnnnnnnnnnnnnnnnnnnnnnnnnnnnnnnnnnnnnnnnnnnnnnnnnnnnnnnnnnnnnnnnnnnnnnnnnnnnnnnnnnnnnnnnnnnnnnnnnnnnnnnnnnnnnnnnnnnnnnnnnnnnnnnnnnnnnnnnnnnnnnnnnnnnnnnnnnnnnnnnnnnnnnnnnnnnnnnnnnnnnnnnnnnnnnnnnnnnnnnnnnnnnnnnnnnnnnnnnnnnnnnnnnnnnnnnnnnnnnnnnnnnnnnnnnnnnnnnnnnnnnnnnnnnnnnnnnnnnnnnnnnnnnnnnnnnnnnnnnnnnnnnnnnnnnnnnnnnnnnnnnnnnnnnnnnnnnnnnnnnnnnnnnnnnnnnnnnnnnnnnnnnnnnnnnnnnnnnnnnnnnnnnnnnnnnnnnnnnnnnnnnnnnnnnnnnnnnnnnnnnnnnnnnnnnnnnnnnnnnnnnnnnnnnnnnnnnnnnnnnnnnnnnnnnnnnnnnnnnnnnnnnnnnnnnnnnnnnnnnnnnnnnnnnnnnnnnnnnnnnnnnnnnnnnnnnnnnnnnnnnnnnnnnnnnnnnnnnnnnnnnnnnnnnnnnnnnnnnnnnnnnnnnnnnnnnnnnnnnnnnnnnnnnnnnnnnnnnnnnnnnnnnnnnnnnnnnnnnnnnnnnnnnnnnnnnnnnnnnnnnnnnnnnnnnnnnnnnnnnnnnnnnnnnnnnnnnnnnnnnnnnnnnnnnnnnnnnnnnnnnnnnnnnnnnnnnnnnnnnnnnnnnnnnnnnnnnnnnnnnnnnnnnnnnnnnnnnnnnnnnnnnnnnnnnnnnnnnnnnnnnnnnnnnnnnnnnnnnnnnnnnnnnnnnnnnnnnnnnnnnnnnnnnnnnnnnnnnnnnnnnnnnnnnnnnnnnnnnnnnnnnnnnnnnnnnnnnnnnnnnnnnnnnnnnnnnnnnnnnnnnnnnnnnnnnnnnnnnnnnnnnnnnnnnnnnnnnnnnnnnnnnnnnnnnnnnnnnnnnnnnnnnnnnnnnnnnnnnnnnnnnnnnnnnnnnnnnnnnnnnnnnnnnnnnnnnnnnnnnnnnnnnnnnnnnnnnnnnnnnnnnnnnnnnnnnnnnnnnnnnnnnnnnnnnnnnnnnnnnnnnnnnnnnnnnnnnnnnnnnnnnnnnnnnnnnnnnnnnnnnnnnnnnnnnnnnnnnnnnnnnnnnnnnnnnnnnnnnnnnnnnnnnnnnnnnnnnnnnnnnnnnnnnnnnnnnnnnnnnnnnnnnnnnnnnnnnnnnnnnnnnnnnnnnnnnnnnnnnnnnnnnnnnnnnnnnnnnnnnnnnnnnnnnnnnnnnnnnnnnnnnnnnnnnnnnnnnnnnnnnnnnnnnnnnnnnnnnnnnnnnnnnnnnnnnnnnnnnnnnnnnnnnnnnnnnnnnnnnnnnnnggagggagccaatggaatacacaatcacaaagccaccggccgttgatggctatgctgtccaccgcatggttgccgggctatcggacggcgcaccagcgctgcatgttgatgagggcgaaaaattaacgattcgaaccgatgcgcccatgcccggcgggcatattttggggttttcgttgcgagcctgcgtatcggtgaagaacaaggggcgccatcgctactttcctaccgacgattggcggtcgcgccacgcttggctcgtacgaaagggcttgcaacacgggtttgaggtcatcacggtgcattgcaccgccaagcactttgtcgtagagaagcgtccgggcacattcaccatcgacgacacccaatttacgggcgtcttgaaagtcgtagaacacgaaaaattcgcagccgcgttggtctcaggcgtcgggaacacagcacgtgcctttgggttcggcatgctggtcatctaatttttaccagggaaaaccatgaaaaaacaaaacatcatcattgaagcggtcatcaccacccaaggcccgctgtccattgccatgccggttgcccagggcggacgcgcaaacgaatacaacaactttccgctcatggcccgcgggcaagatgaagaaggcaagttgatgcagacggcctacctgcccgccagcaccgtgcgaggttttttgcgccgtgcgtctggcctcgcggcaatggaaaaacgcggcatcggcaagaccacgttgcaacaggcttactcggacatcctgggtcaatctgccgacgccaaagaagaagtggatctggtcaaactggctgccctgcgcgatggcgaccccatcctcgacctctttggttcctggtcgatcaagtcgcggctgctggtgagcaactttctgcccaaggccaatgtattgccccaggcggtaaccggtgttcgaaaagacttggaggataccgacggcgtgctggaaggtttgagcgagtcagaccgacaggcataccacaaccgcagcgacatcaatagtcagcgtgcagctgcggatgcggtcgtcaaaggaatcaagcgtgagatggccaaggccaagaaagagagcaagcccctggcggaccttgaagcggagctggccattgaggagtccaaggctgcggcgctcaagtccgaaatgggcgacatggccaactcatcacgcaccattaccgagttctttgccatgccagtcgatgttgccctgcatgggcgcatggtgattgagcaggccaaggaacgcgacatcggcctgctcctgcaagcgctggacgcactctccacacgtccgatcctgggtgctcaggtggcccggggttgcggcgaaattgcggggcgtttcaccatcaaggtggatggcagggtcgtaaaaaccgtagcaaccggtggctgggagccttcacgcgtcgaagacttcgtggccgtggaatcagaacaagccgctgcctagttcgtcatggacaagctgcaaatcacggccaccttgagcgaccgtttcatcacgggtggcggttacctgacgtttgacgcccttctggcctcagcggtctacagtctgacccaggacgtggatcaggcgcacaaccagctgcccatcaaacaggtggacggcctgtactacgccagcgcggcaatttatgaatcggtggccactggcacggtggccatcgtccagtccatgcgacctgacgatgtgtggctcgaccaccaatggctcaagaaaaacaagcacggcgcagttcacaccaaattcagcaacctgagcgacaacgtcatgaacagctacaagaccattgccgcaccgaccatgacttggtactgcgagggcgatgccgaccggatacgcgcattgctggcgcatttactcatgattggcaaaaaacggacttgctcagtgacgcggtgggatgtggaggaaggcgaactcgatggcgttctaggctacgccgacgagcccctgcgccccgtgccggtggaaatgtggcgcggagatacgtccggcccccttgtcgatgccgcgtggcgccctgcctactgggacgccgctggtcgcaccgcctgctttgtaccctgagacgctgccatgacaacactggagtttttcaacaactactttggtcgccacctggtggcaccaaccggcaattccgtagccgatgcaacgcgcgcgttgtcatcgggacaccagatggccaaaggcggagggccgcaacgcattgcctcgggctgggcggtgatctccgaggaggtgagcaccatccaattcaaactggccgccacggggctgcgctatagcgatcagacgcgctatgaagcctggctggatgcactggaatcgttcagcggcaagcctgtgatgctggtcgagtttgacaagaaacccgtgccggttgccaacctgttcaggacccatgatttgcgtgcggttcaagtgtgttcgccgggcggcgcggagctttttgactttacgaaagaaccaacgcttttgagcggaaaagcccataaagtcttgtggaaacttaaactcgaaagacagaaagacgttttcaaatcaagcacttccgcgtgaacagatcaagccaccctgaaaatgggtggttactggaacttgaaccgttcaggtttgtttttgtttttagatcaagccaccctgaaaatgggtggttactggaacatgacgcagggcgggactactgtgcgtggggatcaagccaccctgaaaatgggtggttactggaacttgtcctgaacgctgaattgcttcttggccgatcaagccaccctgaaaatgggtggttactggaacggtacatctacaacgggtggcacgccccaagatcaagccaccctgaaaatgggtggttactggaactcgtccaggactttgagaacggcaagtcgggatcaagccaccctgaaaatgggtggttactggaacaccagcatcaactggatcatcggcacggaagatcaagccaccctgaaaatgggtggttactggaacagcacccggtagacgtcgatgtgggtgacggatcaagccaccctgaaaatgggtggttactggaaccggttggtgcccgtgcgctcgtcgtagaccgatcaagccaccctgtaaatgggtggttactggaactagaagttctgcatggtgcgcaggtcccacgatcaagccaccatgaaagtgggtggttactggaacaagggcatgctgaacctgtacgggaactttgatcaagccaccccgaaaatgggtggttactggaactagccttcggtctcccaatacggcgggtccgatcaagccaccctgtaaatgggtggttactgcaatttttggagattaaccatgtttcgttcacacgagcagcagcatttcagtgatgtgttgcgcaagcatctgcagcacccggacgcaccgcttttactggagggtggggttggcctgggaaagacgcgcgcctatctggcggcactggccaacaccgatcacactgtcgcgctggtactgcccacgcatcaactgatcgaccagctgctggccagcgctgatctgaccgccattgcgctgccgctggccgtttttagaccggccaggatgtttgaaacacgggtgcagtacctgtcgcaacggcaggctgcccgcgaatcccgggtgatgctctgcacggctgccagtgtgatcatcgaccagcgactcaagggggaatacaacggtgcaaccgagcgcgatgtcatcttgttcgatgaggcggatcagctgcccgatatgaccgcgttgcaaagcgatttcgtcattgacgccactcttttgcaggggcaagcgctgccggttgcgctggagcgaatcagcaccacccggtcgcatggagtcgaggccgaacaaaaggcggcagcacgggtgatgttggaaattctggctgatccggttggctacgcctcggtcggcctggatgatgacggccatgcgcgtttgcaccaccgcctgcctgggcgcttgctgaagaagatcagcaaccgggccagcacagcgttcatctcagcaacgctgtcccatagtggcaagtttgacaatttcaaacacgcgatggggctggactccatcagccggctatccggcagcattgagccggaacgccacggcaccctcgatttcgtgctgcatgcgcatgaggtggaaacggatgaatggtttgccgcagccgttcaaactattcagagtgctctgcgccccacgctggtggtcacgcccagtcacgcgctcacagagcgtctcctggcggccgtgggcgagcagcaagacttattgattcgagcaggcgcatgggcggggctggatacacccacccgctggcgaacagtcgtgattccgcgcgtgccatttggcgcacctgtcgtcgtggacggtgaggcggtcacgtcttacctggacgcgaaagtcaccgccagtcggcgcatgcggcaggccattggccgcgggctcagaacgcccgatgccgtgtgcacagtcgtcgttctggatgcgcgggccgccaagctgggcagttttgtaccggagcgttttgctgcaaattggttggggcgcaaggtgtttgaggaaggtgcccggcaggagttactgctatcagaagccgaacgtaataaagctttgcgaaaggccgccctcaggcactacggcgccaaatgccaacacccggcttgtgacgtagaccagatacacctgctggacgtgcatcaccttgacccggtgagcgagggtgtgcggcgcacgactctgaaggatgtaacagtgctttgtgcgaatcatcaccgccaggcgcactttgagatgaagatggtctgaaacctgtcatggcgcgggtgtcggtgatgtccaggttgcgcatggtcagttgcccaatgcggtccagcgggtcgaacgccgcgtcttttgccttctccatgctcaggcgggtaggtcagtttgggatgcagtacgccctgcggctgatccttttccgtggggtgtgctggccttgcccaaggccacccttgaaggatgaatcgagcgaagagcctcgctctgaaatcagtgcgtttttgccttacacaacttgccgataaaccggcttgttaatgttgtgcaagctattgaattaaaacataaaatgtggtttttctatattggatagatgccattttttagaggtgcatgccgtgaaaatagaaagccgcattctgtcgtccatcaaacatcgctccggtgccgtgctgttgcgtcgagatgtggccggcatgggcagcgcttcgcaggtgtccgagtcgctcaaggcattgcaaatcaaaggtgtgatcgtgcgcgtgggcgcagg

SEQ ID NO: 212 - DNA, 11983 bp, Artificial Sequence
  Synthetic Oligonucleotide
  misc_feature (1)..(6235): n is a, c, g, or t
nnnnnnnnnnnnnnnnnnnnnnnnnnnnnnnnnnnnnnnnnnnnnnnnnnnnnnnnnnnnnnnnnnnnnnnnnnnnnnnnnnnnnnnnnnnnnnnnnnnnnnnnnnnnnnnnnnnnnnnnnnnnnnnnnnnnnnnnnnnnnnnnnnnnnnnnnnnnnnnnnnnnnnnnnnnnnnnnnnnnnnnnnnnnnnnnnnnnnnnnnnnnnnnnnnnnnnnnnnnnnnnnnnnnnnnnnnnnnnnnnnnnnnnnnnnnnnnnnnnnnnnnnnnnnnnnnnnnnnnnnnnnnnnnnnnnnnnnnnnnnnnnnnnnnnnnnnnnnnnnnnnnnnnnnnnnnnnnnnnnnnnnnnnnnnnnnnnnnnnnnnnnnnnnnnnnnnnnnnnnnnnnnnnnnnnnnnnnnnnnnnnnnnnnnnnnnnnnnnnnnnnnnnnnnnnnnnnnnnnnnnnnnnnnnnnnnnnnnnnnnnnnnnnnnnnnnnnnnnnnnnnnnnnnnnnnnnnnnnnnnnnnnnnnnnnnnnnnnnnnnnnnnnnnnnnnnnnnnnnnnnnnnnnnnnnnnnnnnnnnnnnnnnnnnnnnnnnnnnnnnnnnnnnnnnnnnnnnnnnnnnnnnnnnnnnnnnnnnnnnnnnnnnnnnnnnnnnnnnnnnnnnnnnnnnnnnnnnnnnnnnnnnnnnnnnnnnnnnnnnnnnnnnnnnnnnnnnnnnnnnnnnnnnnnnnnnnnnnnnnnnnnnnnnnnnnnnnnnnnnnnnnnnnnnnnnnnnnnnnnnnnnnnnnnnnnnnnnnnnnnnnnnnnnnnnnnnnnnnnnnnnnnnnnnnnnnnnnnnnnnnnnnnnnnnnnnnnnnnnnnnnnnnnnnnnnnnnnnnnnnnnnnnnnnnnnnnnnnnnnnnnnnnnnnnnnnnnnnnnnnnnnnnnnnnnnnnnnnnnnnnnnnnnnnnnnnnnnnnnnnnnnnnnnnnnnnnnnnnnnnnnnnnnnnnnnnnnnnnnnnnnnnnnnnnnnnnnnnnnnnnnnnnnnnnnnnnnnnnnnnnnnnnnnnnnnnnnnnnnnnnnnnnnnnnnnnnnnnnnnnnnnnnnnnnnnnnnnnnnnnnnnnnnnnnnnnnnnnnnnnnnnnnnnnnnnnnnnnnnnnnnnnnnnnnnnnnnnnnnnnnnnnnnnnnnnnnnnnnnnnnnnnnnnnnnnnnnnnnnnnnnnnnnnnnnnnnnnnnnnnnnnnnnnnnnnnnnnnnnnnnnnnnnnnnnnnnnnnnnnnnnnnnnnnnnnnnnnnnnnnnnnnnnnnnnnnnnnnnnnnnnnnnnnnnnnnnnnnnnnnnnnnnnnnnnnnnnnnnnnnnnnnnnnnnnnnnnnnnnnnnnnnnnnnnnnnnnnnnnnnnnnnnnnnnnnnnnnnnnnnnnnnnnnnnnnnnnnnnnnnnnnnnnnnnnnnnnnnnnnnnnnnnnnnnnnnnnnnnnnnnnnnnnnnnnnnnnnnnnnnnnnnnnnnnnnnnnnnnnnnnnnnnnnnnnnnnnnnnnnnnnnnnnnnnnnnnnnnnnnnnnnnnnnnnnnnnnnnnnnnnnnnnnnnnnnnnnnnnnnnnnnnnnnnnnnnnnnnnnnnnnnnnnnnnnnnnnnnnnnnnnnnnnnnnnnnnnnnnnnnnnnnnnnnnnnnnnnnnnnnnnnnnnnnnnnnnnnnnnnnnnnnnnnnnnnnnnnnnnnnnnnnnnnnnnnnnnnnnnnnnnnnnnnnnnnnnnnnnnnnnnnnnnnnnnnnnnnnnnnnnnnnnnnnnnnnnnnnnnnnnnnnnnnnnnnnnnnnnnnnnnnnnnnnnnnnnnnnnnnnnnnnnnnnnnnnnnnnnnnnnnnnnnnnnnnnnnnnnnnnnnnnnnnnnnnnnnnnnnnnnnnnnnnnnnnnnnnnnnnnnnnnnnnnnnnnnnnnnnnnnnnnnnnnnnnnnnnnnnnnnnnnnnnnnnnnnnnnnnnnnnnnnnnnnnnnnnnnnnnnnnnnnnnnnnnnnnnnnnnnnnnnnnnnnnnnnnnnnnnnnnnnnnnnnnnnnnnnnnnnnnnnnnnnnnnnnnnnnnnnnnnnnnnnnnnnnnnnnnnnnnnnnnnnnnnnnnnnnnnnnnnnnnnnnnnnnnnnnnnnnnnnnnnnnnnnnnnnnnnnnnnnnnnnnnnnnnnnnnnnnnnnnnnnnnnnnnnnnnnnnnnnnnnnnnnnnnnnnnnnnnnnnnnnnnnnnnnnnnnnnnnnnnnnnnnnnnnnnnnnnnnnnnnnnnnnnnnnnnnnnnnnnnnnnnnnnnnnnnnnnnnnnnnnnnnnnnnnnnnnnnnnnnnnnnnnnnnnnnnnnnnnnnnnnnnnnnnnnnnnnnnnnnnnnnnnnnnnnnnnnnnnnnnnnnnnnnnnnnnnnnnnnnnnnnnnnnnnnnnnnnnnnnnnnnnnnnnnnnnnnnnnnnnnnnnnnnnnnnnnnnnnnnnnnnnnnnnnnnnnnnnnnnnnnnnnnnnnnnnnnnnnnnnnnnnnnnnnnnnnnnnnnnnnnnnnnnnnnnnnnnnnnnnnnnnnnnnnnnnnnnnnnnnnnnnnnnnnnnnnnnnnnnnnnnnnnnnnnnnnnnnnnnnnnnnnnnnnnnnnnnnnnnnnnnnnnnnnnnnnnnnnnnnnnnnnnnnnnnnnnnnnnnnnnnnnnnnnnnnnnnnnnnnnnnnnnnnnnnnnnnnnnnnnnnnnnnnnnnnnnnnnnnnnnnnnnnnnnnnnnnnnnnnnnnnnnnnnnnnnnnnnnnnnnnnnnnnnnnnnnnnnnnnnnnnnnnnnnnnnnnnnnnnnnnnnnnnnnnnnnnnnnnnnnnnnnnnnnnnnnnnnnnnnnnnnnnnnnnnnnnnnnnnnnnnnnnnnnnnnnnnnnnnnnnnnnnnnnnnnnnnnnnnnnnnnnnnnnnnnnnnnnnnnnnnnnnnnnnnnnnnnnnnnnnnnnnnnnnnnnnnnnnnnnnnnnnnnnnnnnnnnnnnnnnnnnnnnnnnnnnnnnnnnnnnnnnnnnnnnnnnnnnnnnnnnnnnnnnnnnnnnnnnnnnnnnnnnnnnnnnnnnnnnnnnnnnnnnnnnnnnnnnnnnnnnnnnnnnnnnnnnnnnnnnnnnnnnnnnnnnnnnnnnnnnnnnnnnnnnnnnnnnnnnnnnnnnnnnnnnnnnnnnnnnnnnnnnnnnnnnnnnnnnnnnnnnnnnnnnnnnnnnnnnnnnnnnnnnnnnnnnnnnnnnnnnnnnnnnnnnnnnnnnnnnnnnnnnnnnnnnnnnnnnnnnnnnnnnnnnnnnnnnnnnnnnnnnnnnnnnnnnnnnnnnnnnnnnnnnnnnnnnnnnnnnnnnnnnnnnnnnnnnnnnnnnnnnnnnnnnnnnnnnnnnnnnnnnnnnnnnnnnnnnnnnnnnnnnnnnnnnnnnnnnnnnnnnnnnnnnnnnnnnnnnnnnnnnnnnnnnnnnnnnnnnnnnnnnnnnnnnnnnnnnnnnnnnnnnnnnnnnnnnnnnnnnnnnnnnnnnnnnnnnnnnnnnnnnnnnnnnnnnnnnnnnnnnnnnnnnnnnnnnnnnnnnnnnnnnnnnnnnnnnnnnnnnnnnnnnnnnnnnnnnnnnnnnnnnnnnnnnnnnnnnnnnnnnnnnnnnnnnnnnnnnnnnnnnnnnnnnnnnnnnnnnnnnnnnnnnnnnnnnnnnnnnnnnnnnnnnnnnnnnnnnnnnnnnnnnnnnnnnnnnnnnnnnnnnnnnnnnnnnnnnnnnnnnnnnnnnnnnnnnnnnnnnnnnnnnnnnnnnnnnnnnnnnnnnnnnnnnnnnnnnnnnnnnnnnnnnnnnnnnnnnnnnnnnnnnnnnnnnnnnnnnnnnnnnnnnnnnnnnnnnnnnnnnnnnnnnnnnnnnnnnnnnnnnnnnnnnnnnnnnnnnnnnnnnnnnnnnnnnnnnnnnnnnnnnnnnnnnnnnnnnnnnnnnnnnnnnnnnnnnnnnnnnnnnnnnnnnnnnnnnnnnnnnnnnnnnnnnnnnnnnnnnnnnnnnnnnnnnnnnnnnnnnnnnnnnnnnnnnnnnnnnnnnnnnnnnnnnnnnnnnnnnnnnnnnnnnnnnnnnnnnnnnnnnnnnnnnnnnnnnnnnnnnnnnnnnnnnnnnnnnnnnnnnnnnnnnnnnnnnnnnnnnnnnnnnnnnnnnnnnnnnnnnnnnnnnnnnnnnnnnnnnnnnnnnnnnnnnnnnnnnnnnnnnnnnnnnnnnnnnnnnnnnnnnnnnnnnnnnnnnnnnnnnnnnnnnnnnnnnnnnnnnnnnnnnnnnnnnnnnnnnnnnnnnnnnnnnnnnnnnnnnnnnnnnnnnnnnnnnnnnnnnnnnnnnnnnnnnnnnnnnnnnnnnnnnnnnnnnnnnnnnnnnnnnnnnnnnnnnnnnnnnnnnnnnnnnnnnnnnnnnnnnnnnnnnnnnnnnnnnnnnnnnnnnnnnnnnnnnnnnnnnnnnnnnnnnnnnnnnnnnnnnnnnnnnnnnnnnnnnnnnnnnnnnnnnnnnnnnnnnnnnnnnnnnnnnnnnnnnnnnnnnnnnnnnnnnnnnnnnnnnnnnnnnnnnnnnnnnnnnnnnnnnnnnnnnnnnnnnnnnnnnnnnnnnnnnnnnnnnnnnnnnnnnnnnnnnnnnnnnnnnnnnnnnnnnnnnnnnnnnnnnnnnnnnnnnnnnnnnnnnnnnnnnnnnnnnnnnnnnnnnnnnnnnnnnnnnnnnnnnnnnnnnnnnnnnnnnnnnnnnnnnnnnnnnnnnnnnnnnnnnnnnnnnnnnnnnnnnnnnnnnnnnnnnnnnnnnnnnnnnnnnnnnnnnnnnnnnnnnnnnnnnnnnnnnnnnnnnnnnnnnnnnnnnnnnnnnnnnnnnnnnnnnnnnnnnnnnnnnnnnnnnnnnnnnnnnnnnnnnnnnnnnnnnnnnnnnnnnnnnnnnnnnnnnnnnnnnnnnnnnnnnnnnnnnnnnnnnnnnnnnnnnnnnnnnnnnnnnnnnnnnnnnnnnnnnnnnnnnnnnnnnnnnnnnnnnnnnnnnnnnnnnnnnnnnnnnnnnnnnnnnnnnnnnnnnnnnnnnnnnnnnnnnnnnnnnnnnnnnnnnnnnnnnnnnnnnnnnnnnnnnnnnnnnnnnnnnnnnnnnnnnnnnnnnnnnnnnnnnnnnnnnnnnnnnnnnnnnnnnnnnnnnnnnnnnnnnnnnnnnnnnnnnnnnnnnnnnnnnnnnnnnnnnnnnnnnnnnnnnnnnnnnnnnnnnnnnnnnnnnnnnnnnnnnnnnnnnnnnnnnnnnnnnnnnnnnnnnnnnnnnnnnnnnnnnnnnnnnnnnnnnnnnnnnnnnnnnnnnnnnnnnnnnnnnnnnnnnnnnnnnnnnnnnnnnnnnnnnnnnnnnnnnnnnnnnnnnnnnnnnnnnnnnnnnnnnnnnnnnnnnnnnnnnnnnnnnnnnnnnnnnnnnnnnnnnnnnnnnnnnnnnnnnnnnnnnnnnnnnnnnnnnnnnnnnnnnnnnnnnnnnnnnnnnnnnnnnnnnnnnnnnnnnnnnnnnnnnnnnnnnnnnnnnnnnnnnnnnnnnnnnnnnnnnnnnnnnnnnnnnnnnnnnnnnnnnnnnnnnnnnnnnnnnnnnnnnnnnnnnnnnnnnnnnnnnnnnnnnnnnnnnnnnnnnnnnnnnnnnnnnnnnnnnnnnnnnnnnnnnnnnnnnnnnnnnnnnnnnnnnnnnnnnnnnnnnnnnnnnnnnnnnnnnnnnnnnnnnnnnnnnnnnnnnnnnnnnnnnnnnnnnnnnnnnnnnnnnnnnnnnnnnnnnnnnnnnnnnnnnnnnnnnnnnnnnnnnnnnnnnnnnnnnnnnnnnnnnnnnnnnnnnnnnnnnnnnnnnnnnnnnnnnnnnnnnnnnnnnnnnnnnnnnnnnnnnnnnnnnnnnnnnnnnnnnnnnnnnnnnnnnnnnnnnnnnnnnnnnnnnnnnnnnnnnnnnnnnnnnnnnnnnnnnnnnnnnnnnnnnnnnnnnnnnnnnnnnnnnnnnnnnnnnnnnnnnnnnnnnnnnnnnnnnnnnnnnnnnnnnnnnnnnnnnnnnnnnnnnnnnnnnnnnnnnnnnnnnnnnnnnnnnnnnnnnnnnnnnnnnnnnnnnnnnnnnnnnnnnnnnnnnnnnnnnnnnnnnnnnnnnnnnnnnnnnnnnnnnnnnnnnnnnnnnnnnnnnnnnnnnnnnnnnnnnnnnnnnnnnnnnnnnnnnnnnnnnnnnnnnnnnnnnnnnnnnnnnnnnnnnnnnnnnnnnnnnnnnnnnnnnnnnnnnnnnnnnnnnnnnnnnnnnnnnnnnnnnnnnnnnnnnnnnnnnnnnnnnnngcctcacgatctagcaccgcaagaatccagtgccatgtcttacgaaacccagcttttctggccgcattaatataatgggatttttgtgacggcgacactcgcccttgtaagtgcgatgtggcgttctcgtacataagttgagcctcagattttcggggctttgacttatcgtttcctaagttatccattaaacctccttgctaatactggatttcgacttgcggttttttatttttatgactccgcattattgcgtttgttttgcaatcaaaaaatattttgttgttgcgttcaccgaatttaactcccccctgaccttcctcttccagaagcacattgagaatttcgtttgtaatgtagacacgctccatgccataaaatgcaaaaaccccaagccagcagtgccaaatcgggtcaggtagacgtccggtttagcaggtatttatagagcaccccgcaatctggaacaaatcagtgtaggacaatagtaagcgaaaaacattctttaatgaaacataattatttgatattttagtccttcgcattttaataagcggtggattatgatgtgttaaacacatgctctttttctgctcaaaattcttgttggtatgcccaatggataaactaagaataacagcccacatgaaaaccccttttataacgggcggcggttacatgaccttcgatgcactgttggccggcatcttattcgatcagctgcaggatgttgagttggcgcatagctccgtaccgatccaatgcagtaacggactttttcacgcgagtgcggccttctatgagccggttgatcaatcgagagtggcgtttgtggccaatatgagagccgatcattcgttggatgcggatctgtttccaaaaaagaaagatggctctagtcagagaaagattggccgccttcgaagacgtgattatggcgcagttatgaatagttatgattgcaagttttcggaacagattgattggtatgttgtgggtgatcgcgacaagatccaagctctagttgaacctatttcattcataggcaaaagaagggcaaacggttttggagaagtcaatgaatggagcgttgaggagggagctctggatggtttggtggggatgctagatgagcctcttcgtcccatacccatcgaaatgttcagaggtgaccctaagtccataaaagttgatgctgcgtggcgacctgcttattggcacccagataatcgagctatttgttatgcaccggtatcagttgaatgaatacatttgatttctttaatgacaactttggtagcttattagtgcctcaggatgggacatcgcatgcaaacgctgcgagagctctttcagctagtcactcactagcctcggggaaaagctctcgcttgggaagcggctgggcaatcataagggcaaaccacccaattctgcagttaaagttggcagccgacggcatttattacgacgaccgtacacgctttgaagcgattggcgaagttcttgaaaactgggatgacagcccaaccctttttatgacgtttgataaagcacctttaactatttcaaatctatttcttaccgtggatctcagagcggtaagaatttgtatgccaagtggtgtacagacttttgactttacaaacgagccaactcaacactcaccacaattcttcagaacacttgtgaatctgagaaataaaaatgcttcttgattacgagataaccaaacctgcccatataagaggctacgcgctgcaccgcatggttacggaattagttggtgaagccgcggcgttgtttagcgatgaaggagcaacactgctcattcgcacgactgcggatattgatgcgagtcgtcgagaagttaagacattagctaatggacaacttactgcgtttgagttgagagcttgcgtatccaaaaagaggaagggaaagcatatatatctgcattctggtgattggcagtctcgccatgcctggttaaaaaagaaggcgcaggacaacggtttcgaaatacttacactacactcatcctcaaagatgacacaaatttcagataattcgcgttcatttaaagttgaccaaactgatttcacaggaattcttaaggtcaatgatgccagtttatttaaatctgccctagcaaatgggatcggatcgacagctaggacattcggttttggcatgttagttatttaaaaggagcacatgatgatcattattaatgcaactataaccaccgaatctcctctgtcgatctcgatgcctgttgcgcagggttcgcgtgagaatcagtttgaaaatttccctttactcgtccgcggccttgatggtgagggcgagaagcaatacacaggttatttaccgtcaaccacattaaggggatatttgagacgagccatcgtaatggccgatatgaaagaggcagcagatgctggaaagccttataagttgcctcaggcttatgctgaactaatcgggcaagatgccgctagtgagaaacaagcgggcgacattgatttggttgcgcttaaaaacagtagggataattccccagttctcgatttgttcggctctggcttagggattaagtctcgtcttcgtgtggggcattttcttccgcagcataatattctgccggacccaattacaggagcaagaaaagatctggatgataatgaagacgcttttgaacttttagacgagggggataaaggtgaattctttgagcgttcgacggccaatacaaaaagagcacgagcggcttcaatgttagactctctcaaacgacaaaagagggttgccgcaagaaaagaggaagccacggaagaattagaagttcaaatcaaagaggctgaaaaactagttgaaaagtatgaggggattatgggagacatgaccaactcctcgcgcacgattctgacgcattatgctttaggggctggtcttgacttaagcggtagattagtagttgagaaccccaaagatcgtgatgtcgggatgctagagctgggtttaaattcgctctcactttttccagtactgggcgcccaatcagctcgaggatgtggtgagatatcaggtacttttgatttcttaaaagatggaaatttattcaaaaaaataacgataggaggctttgcaccagcgaaaatcgatgatttttgaatggcaatttgtatttttaagtcctaaaaacagtagtttatatcgtttaggttgaagccaccttgtgttggggtggttactacaacatatccatgccacatccatgcacctttacggttgaagccaccttgtgttggggtggttactacaacgctacagccgttgcagtccttgcagctattgttgaagccaccttgtgttggggtggttactacaactgcgcttatctcgacgttagccttgctgaagttgaagccaccttgtgttggggtggttactacaacgacatcaccggatgggacactagccgcgtggttgaagccaccttgtgttggggtggttactacaaccgctctcagcggcagaagtacggcccttatgttgaagccaccttgtgttggggtggttactacaactagtccgtggcggggttgtgaccatcatgagttgaagccaccttgtgttggggtggttactacatttagtcgaatgtatcttcgaccatgtctggtgttgcagccacctcctagggggtggttatcatttgcggacagactatacttttgcgctaacatggaacctgcattatggcctttgaatttcgttcccttgagcagagtaatttctctaaattgatgcaaagtcatctaaataatccagatgcgcctctgttactagagggtgcgacgggtcttgggaaaactagagcctacctatatccgatttttcaggcggcacgcgagggtaaaagggttgccatcatactgcctacccgccagctcattgaacaactgctcaactcggctgacatgaagatctgtaatatcgatggtgcagaggtgcgggcgtttataccgagaaggtatttcgataatgcctcagatcaccgagaacatcgcacaagtgctgttaacgccccagtaatgctttgtagcagtgcatcggtgattatcgatcaaaggctatgcggcgattacaacggcgtcaccaaacgagattacttattattcgatgaagctgatcagttgccagatgtcgctgcattgcaagctgatgtatctgtgcactatcaaacattgaaagaccagggcatcaaaccgataacagccaaacaagctgcagatgaattacttgcgaaaagatatgtggaacccgaagatcgtgccgctgcaaagataatattggagtctattgataatcctttttggttcaatgtgacgggtttagacgatgacggcagcattaggctttatcacaagttgcctggtcgactactcaaacgaatatccaacagacccaacacagcatttatatcagccaccctctcgatttccggtaagttcgataactttcaaagagcaatgggtataacaaccgtaagtcgacactcttcagctatagatccaagccatcacggtacactgtcatttgcgattcgagattccgaggcagtgaacagcccccagtggctgaacacggtgctatgtgagattgctgatgcagcgaaaccttgcctagttgttactccaagctatgatctctctcgttctttggcagatcaatatcctgatgcaattgtgagaaaccaagacgaagaagagacggcaagccaggctgcttcgaggttattgcaagacgattcaaaggatacattgattgctactgcagcttgggcagggctggacacgccggctatctggaaatcgattatcgtccctcggattcctttccctccaccggtcatcatcgacgacaatgtcgagagtcactacattggtgctcgcaatagtgcagtaagaagaatgcgacaggtcattggtagaggtttacgaagtccagatgcggattgcgatatcgttatctgtgattccaggtggaaaaaagtagaagcatttgtgccgacgagatttcagcaggcgtggcagtctaaaacgtatgctgagggtgccgagattaaagtggttctatctaccaatgagcggtcgacttacctgcgaaagcttgcgataaagaagtacggacttctatgcaaggcatgcgcatggatcccaaaaagccctaaccagatagagattcaccacctcgaccctattgccgagggtatccgacaaacgacgttagatgatgtgataccgttgtgcgctaattgccaccgattagcacactccgagcggcctccgctgagtgtagcgcagataaaaagcatgctgtaacaatagatgccggcgtattaccccttgcaattagcgcagaatgatcaccacaacagttcgccttagctcatttgaggatttagatgtcattgttgccgttaacgctgccgaccttattgaaaggtttaaacgagcaggctatttaaagtggccagatgggcgaaagctagaggatgtaatcaaacaagaggggactgaatggtgaagccattaagaggcgtagcacgcaagggcatagataggcgcttacttgaccttataaaacgcaggttcgttttgtgcgagcgtgaggatggggtacagcggctggtggcctttttagctacaagcaaagaccgcacgtttattgggtttgaaa

SEQ ID NO: 213 - DNA, 11978 bp, Artificial Sequence
  Synthetic Oligonucleotide
  misc_feature (1)..(7485): n is a, c, g, or t
nnnnnnnnnnnnnnnnnnnnnnnnnnnnnnnnnnnnnnnnnnnnnnnnnnnnnnnnnnnnnnnnnnnnnnnnnnnnnnnnnnnnnnnnnnnnnnnnnnnnnnnnnnnnnnnnnnnnnnnnnnnnnnnnnnnnnnnnnnnnnnnnnnnnnnnnnnnnnnnnnnnnnnnnnnnnnnnnnnnnnnnnnnnnnnnnnnnnnnnnnnnnnnnnnnnnnnnnnnnnnnnnnnnnnnnnnnnnnnnnnnnnnnnnnnnnnnnnnnnnnnnnnnnnnnnnnnnnnnnnnnnnnnnnnnnnnnnnnnnnnnnnnnnnnnnnnnnnnnnnnnnnnnnnnnnnnnnnnnnnnnnnnnnnnnnnnnnnnnnnnnnnnnnnnnnnnnnnnnnnnnnnnnnnnnnnnnnnnnnnnnnnnnnnnnnnnnnnnnnnnnnnnnnnnnnnnnnnnnnnnnnnnnnnnnnnnnnnnnnnnnnnnnnnnnnnnnnnnnnnnnnnnnnnnnnnnnnnnnnnnnnnnnnnnnnnnnnnnnnnnnnnnnnnnnnnnnnnnnnnnnnnnnnnnnnnnnnnnnnnnnnnnnnnnnnnnnnnnnnnnnnnnnnnnnnnnnnnnnnnnnnnnnnnnnnnnnnnnnnnnnnnnnnnnnnnnnnnnnnnnnnnnnnnnnnnnnnnnnnnnnnnnnnnnnnnnnnnnnnnnnnnnnnnnnnnnnnnnnnnnnnnnnnnnnnnnnnnnnnnnnnnnnnnnnnnnnnnnnnnnnnnnnnnnnnnnnnnnnnnnnnnnnnnnnnnnnnnnnnnnnnnnnnnnnnnnnnnnnnnnnnnnnnnnnnnnnnnnnnnnnnnnnnnnnnnnnnnnnnnnnnnnnnnnnnnnnnnnnnnnnnnnnnnnnnnnnnnnnnnnnnnnnnnnnnnnnnnnnnnnnnnnnnnnnnnnnnnnnnnnnnnnnnnnnnnnnnnnnnnnnnnnnnnnnnnnnnnnnnnnnnnnnnnnnnnnnnnnnnnnnnnnnnnnnnnnnnnnnnnnnnnnnnnnnnnnnnnnnnnnnnnnnnnnnnnnnnnnnnnnnnnnnnnnnnnnnnnnnnnnnnnnnnnnnnnnnnnnnnnnnnnnnnnnnnnnnnnnnnnnnnnnnnnnnnnnnnnnnnnnnnnnnnnnnnnnnnnnnnnnnnnnnnnnnnnnnnnnnnnnnnnnnnnnnnnnnnnnnnnnnnnnnnnnnnnnnnnnnnnnnnnnnnnnnnnnnnnnnnnnnnnnnnnnnnnnnnnnnnnnnnnnnnnnnnnnnnnnnnnnnnnnnnnnnnnnnnnnnnnnnnnnnnnnnnnnnnnnnnnnnnnnnnnnnnnnnnnnnnnnnnnnnnnnnnnnnnnnnnnnnnnnnnnnnnnnnnnnnnnnnnnnnnnnnnnnnnnnnnnnnnnnnnnnnnnnnnnnnnnnnnnnnnnnnnnnnnnnnnnnnnnnnnnnnnnnnnnnnnnnnnnnnnnnnnnnnnnnnnnnnnnnnnnnnnnnnnnnnnnnnnnnnnnnnnnnnnnnnnnnnnnnnnnnnnnnnnnnnnnnnnnnnnnnnnnnnnnnnnnnnnnnnnnnnnnnnnnnnnnnnnnnnnnnnnnnnnnnnnnnnnnnnnnnnnnnnnnnnnnnnnnnnnnnnnnnnnnnnnnnnnnnnnnnnnnnnnnnnnnnnnnnnnnnnnnnnnnnnnnnnnnnnnnnnnnnnnnnnnnnnnnnnnnnnnnnnnnnnnnnnnnnnnnnnnnnnnnnnnnnnnnnnnnnnnnnnnnnnnnnnnnnnnnnnnnnnnnnnnnnnnnnnnnnnnnnnnnnnnnnnnnnnnnnnnnnnnnnnnnnnnnnnnnnnnnnnnnnnnnnnnnnnnnnnnnnnnnnnnnnnnnnnnnnnnnnnnnnnnnnnnnnnnnnnnnnnnnnnnnnnnnnnnnnnnnnnnnnnnnnnnnnnnnnnnnnnnnnnnnnnnnnnnnnnnnnnnnnnnnnnnnnnnnnnnnnnnnnnnnnnnnnnnnnnnnnnnnnnnnnnnnnnnnnnnnnnnnnnnnnnnnnnnnnnnnnnnnnnnnnnnnnnnnnnnnnnnnnnnnnnnnnnnnnnnnnnnnnnnnnnnnnnnnnnnnnnnnnnnnnnnnnnnnnnnnnnnnnnnnnnnnnnnnnnnnnnnnnnnnnnnnnnnnnnnnnnnnnnnnnnnnnnnnnnnnnnnnnnnnnnnnnnnnnnnnnnnnnnnnnnnnnnnnnnnnnnnnnnnnnnnnnnnnnnnnnnnnnnnnnnnnnnnnnnnnnnnnnnnnnnnnnnnnnnnnnnnnnnnnnnnnnnnnnnnnnnnnnnnnnnnnnnnnnnnnnnnnnnnnnnnnnnnnnnnnnnnnnnnnnnnnnnnnnnnnnnnnnnnnnnnnnnnnnnnnnnnnnnnnnnnnnnnnnnnnnnnnnnnnnnnnnnnnnnnnnnnnnnnnnnnnnnnnnnnnnnnnnnnnnnnnnnnnnnnnnnnnnnnnnnnnnnnnnnnnnnnnnnnnnnnnnnnnnnnnnnnnnnnnnnnnnnnnnnnnnnnnnnnnnnnnnnnnnnnnnnnnnnnnnnnnnnnnnnnnnnnnnnnnnnnnnnnnnnnnnnnnnnnnnnnnnnnnnnnnnnnnnnnnnnnnnnnnnnnnnnnnnnnnnnnnnnnnnnnnnnnnnnnnnnnnnnnnnnnnnnnnnnnnnnnnnnnnnnnnnnnnnnnnnnnnnnnnnnnnnnnnnnnnnnnnnnnnnnnnnnnnnnnnnnnnnnnnnnnnnnnnnnnnnnnnnnnnnnnnnnnnnnnnnnnnnnnnnnnnnnnnnnnnnnnnnnnnnnnnnnnnnnnnnnnnnnnnnnnnnnnnnnnnnnnnnnnnnnnnnnnnnnnnnnnnnnnnnnnnnnnnnnnnnnnnnnnnnnnnnnnnnnnnnnnnnnnnnnnnnnnnnnnnnnnnnnnnnnnnnnnnnnnnnnnnnnnnnnnnnnnnnnnnnnnnnnnnnnnnnnnnnnnnnnnnnnnnnnnnnnnnnnnnnnnnnnnnnnnnnnnnnnnnnnnnnnnnnnnnnnnnnnnnnnnnnnnnnnnnnnnnnnnnnnnnnnnnnnnnnnnnnnnnnnnnnnnnnnnnnnnnnnnnnnnnnnnnnnnnnnnnnnnnnnnnnnnnnnnnnnnnnnnnnnnnnnnnnnnnnnnnnnnnnnnnnnnnnnnnnnnnnnnnnnnnnnnnnnnnnnnnnnnnnnnnnnnnnnnnnnnnnnnnnnnnnnnnnnnnnnnnnnnnnnnnnnnnnnnnnnnnnnnnnnnnnnnnnnnnnnnnnnnnnnnnnnnnnnnnnnnnnnnnnnnnnnnnnnnnnnnnnnnnnnnnnnnnnnnnnnnnnnnnnnnnnnnnnnnnnnnnnnnnnnnnnnnnnnnnnnnnnnnnnnnnnnnnnnnnnnnnnnnnnnnnnnnnnnnnnnnnnnnnnnnnnnnnnnnnnnnnnnnnnnnnnnnnnnnnnnnnnnnnnnnnnnnnnnnnnnnnnnnnnnnnnnnnnnnnnnnnnnnnnnnnnnnnnnnnnnnnnnnnnnnnnnnnnnnnnnnnnnnnnnnnnnnnnnnnnnnnnnnnnnnnnnnnnnnnnnnnnnnnnnnnnnnnnnnnnnnnnnnnnnnnnnnnnnnnnnnnnnnnnnnnnnnnnnnnnnnnnnnnnnnnnnnnnnnnnnnnnnnnnnnnnnnnnnnnnnnnnnnnnnnnnnnnnnnnnnnnnnnnnnnnnnnnnnnnnnnnnnnnnnnnnnnnnnnnnnnnnnnnnnnnnnnnnnnnnnnnnnnnnnnnnnnnnnnnnnnnnnnnnnnnnnnnnnnnnnnnnnnnnnnnnnnnnnnnnnnnnnnnnnnnnnnnnnnnnnnnnnnnnnnnnnnnnnnnnnnnnnnnnnnnnnnnnnnnnnnnnnnnnnnnnnnnnnnnnnnnnnnnnnnnnnnnnnnnnnnnnnnnnnnnnnnnnnnnnnnnnnnnnnnnnnnnnnnnnnnnnnnnnnnnnnnnnnnnnnnnnnnnnnnnnnnnnnnnnnnnnnnnnnnnnnnnnnnnnnnnnnnnnnnnnnnnnnnnnnnnnnnnnnnnnnnnnnnnnnnnnnnnnnnnnnnnnnnnnnnnnnnnnnnnnnnnnnnnnnnnnnnnnnnnnnnnnnnnnnnnnnnnnnnnnnnnnnnnnnnnnnnnnnnnnnnnnnnnnnnnnnnnnnnnnnnnnnnnnnnnnnnnnnnnnnnnnnnnnnnnnnnnnnnnnnnnnnnnnnnnnnnnnnnnnnnnnnnnnnnnnnnnnnnnnnnnnnnnnnnnnnnnnnnnnnnnnnnnnnnnnnnnnnnnnnnnnnnnnnnnnnnnnnnnnnnnnnnnnnnnnnnnnnnnnnnnnnnnnnnnnnnnnnnnnnnnnnnnnnnnnnnnnnnnnnnnnnnnnnnnnnnnnnnnnnnnnnnnnnnnnnnnnnnnnnnnnnnnnnnnnnnnnnnnnnnnnnnnnnnnnnnnnnnnnnnnnnnnnnnnnnnnnnnnnnnnnnnnnnnnnnnnnnnnnnnnnnnnnnnnnnnnnnnnnnnnnnnnnnnnnnnnnnnnnnnnnnnnnnnnnnnnnnnnnnnnnnnnnnnnnnnnnnnnnnnnnnnnnnnnnnnnnnnnnnnnnnnnnnnnnnnnnnnnnnnnnnnnnnnnnnnnnnnnnnnnnnnnnnnnnnnnnnnnnnnnnnnnnnnnnnnnnnnnnnnnnnnnnnnnnnnnnnnnnnnnnnnnnnnnnnnnnnnnnnnnnnnnnnnnnnnnnnnnnnnnnnnnnnnnnnnnnnnnnnnnnnnnnnnnnnnnnnnnnnnnnnnnnnnnnnnnnnnnnnnnnnnnnnnnnnnnnnnnnnnnnnnnnnnnnnnnnnnnnnnnnnnnnnnnnnnnnnnnnnnnnnnnnnnnnnnnnnnnnnnnnnnnnnnnnnnnnnnnnnnnnnnnnnnnnnnnnnnnnnnnnnnnnnnnnnnnnnnnnnnnnnnnnnnnnnnnnnnnnnnnnnnnnnnnnnnnnnnnnnnnnnnnnnnnnnnnnnnnnnnnnnnnnnnnnnnnnnnnnnnnnnnnnnnnnnnnnnnnnnnnnnnnnnnnnnnnnnnnnnnnnnnnnnnnnnnnnnnnnnnnnnnnnnnnnnnnnnnnnnnnnnnnnnnnnnnnnnnnnnnnnnnnnnnnnnnnnnnnnnnnnnnnnnnnnnnnnnnnnnnnnnnnnnnnnnnnnnnnnnnnnnnnnnnnnnnnnnnnnnnnnnnnnnnnnnnnnnnnnnnnnnnnnnnnnnnnnnnnnnnnnnnnnnnnnnnnnnnnnnnnnnnnnnnnnnnnnnnnnnnnnnnnnnnnnnnnnnnnnnnnnnnnnnnnnnnnnnnnnnnnnnnnnnnnnnnnnnnnnnnnnnnnnnnnnnnnnnnnnnnnnnnnnnnnnnnnnnnnnnnnnnnnnnnnnnnnnnnnnnnnnnnnnnnnnnnnnnnnnnnnnnnnnnnnnnnnnnnnnnnnnnnnnnnnnnnnnnnnnnnnnnnnnnnnnnnnnnnnnnnnnnnnnnnnnnnnnnnnnnnnnnnnnnnnnnnnnnnnnnnnnnnnnnnnnnnnnnnnnnnnnnnnnnnnnnnnnnnnnnnnnnnnnnnnnnnnnnnnnnnnnnnnnnnnnnnnnnnnnnnnnnnnnnnnnnnnnnnnnnnnnnnnnnnnnnnnnnnnnnnnnnnnnnnnnnnnnnnnnnnnnnnnnnnnnnnnnnnnnnnnnnnnnnnnnnnnnnnnnnnnnnnnnnnnnnnnnnnnnnnnnnnnnnnnnnnnnnnnnnnnnnnnnnnnnnnnnnnnnnnnnnnnnnnnnnnnnnnnnnnnnnnnnnnnnnnnnnnnnnnnnnnnnnnnnnnnnnnnnnnnnnnnnnnnnnnnnnnnnnnnnnnnnnnnnnnnnnnnnnnnnnnnnnnnnnnnnnnnnnnnnnnnnnnnnnnnnnnnnnnnnnnnnnnnnnnnnnnnnnnnnnnnnnnnnnnnnnnnnnnnnnnnnnnnnnnnnnnnnnnnnnnnnnnnnnnnnnnnnnnnnnnnnnnnnnnnnnnnnnnnnnnnnnnnnnnnnnnnnnnnnnnnnnnnnnnnnnnnnnnnnnnnnnnnnnnnnnnnnnnnnnnnnnnnnnnnnnnnnnnnnnnnnnnnnnnnnnnnnnnnnnnnnnnnnnnnnnnnnnnnnnnnnnnnnnnnnnnnnnnnnnnnnnnnnnnnnnnnnnnnnnnnnnnnnnnnnnnnnnnnnnnnnnnnnnnnnnnnnnnnnnnnnnnnnnnnnnnnnnnnnnnnnnnnnnnnnnnnnnnnnnnnnnnnnnnnnnnnnnnnnnnnnnnnnnnnnnnnnnnnnnnnnnnnnnnnnnnnnnnnnnnnnnnnnnnnnnnnnnnnnnnnnnnnnnnnnnnnnnnnnnnnnnnnnnnnnnnnnnnnnnnnnnnnnnnnnnnnnnnnnnnnnnnnnnnnnnnnnnnnnnnnnnnnnnnnnnnnnnnnnnnnnnnnnnnnnnnnnnnnnnnnnnnnnnnnnnnnnnnnnnnnnnnnnnnnnnnnnnnnnnnnnnnnnnnnnnnnnnnnnnnnnnnnnnnnnnnnnnnnnnnnnnnnnnnnnnnnnnnnnnnnnnnnnnnnnnnnnnnnnnnnnnnnnnnnnnnnnnnnnnnnnnnnnnnnnnnnnnnnnnnnnnnnnnnnnnnnnnnnnnnnnnnnnnnnnnnnnnnnnnnnnnnnnnnnnnnnnnnnnnnnnnnnnnnnnnnnnnnnnnnnnnnnnnnnnnnnnnnnnnnnnnnnnnnnnnnnnnnnnnnnnnnnnnnnnnnnnnnnnnnnnnnnnnnnnnnnnnnnnnnnnnnnnnnnnnnnnnnnnnnnnnnnnnnnnnnnnnnnnnnnnnnnnnnnnnnnnnnnnnnnnnnnnnnnnnnnnnnnnnnnnnnnnnnnnnnnnnnnnnnnnnnnnnnnnnnnnnnnnnnnnnnnnnnnnnnnnnnnnnnnnnnnnnnnnnnnnnnnnnnnnnnnnnnnnnnnnnnnnnnnnnnnnnnnnnnnnnnnnnnnnnnnnnnnnnnnnnnnnnnnnnnnnnnnnnnnnnnnnnnnnnnnnnnnnnnnnnnnnnnnnnnnnnnnnnnnnnnnnnnnnnnnnnnnnnnnnnnnnnnnnnnnnnnnnnnnnnnnnnnnnnnnnnnnnnnnnnnnnnnnnnnnnnnnnnnnnnnnnnnnnnnnnnnnnnnnnnnnnnnnnnnnnnnnnnnnnnnnnnnnnnnnnnnnnnnnnnnnnnnnnnnnnnnnnnnnnnnnnnnnnnnnnnnnnnnnnnnnnnnnnnnnnnnnnnnnnnnnnnnnnnnnnnnnnnnnnnnnnnnnnnnnnnnnnnnnnnnnnnnnnnnnnnnnnnnnnnnnnnnnnnnnnnnnnnnnnnnnnnnnnnnnnnnnnnnnnnnnnnnnnnnnnnnnnnnnnnnnnnnnnnnnnnnnnnnnnnnnnnnnnnnnnnnnnnnnnnnnnnnnnnnnnnnnnnnnnnnnnnnnnnnnnnnnnnnnnnnnnnnnnnnnnnnnnnnnnnnnnnnnnnnnnnnnnnnnnnnnnnnnnnnnnnnnnnnnnnnnnnnnnnnnnnnnnnnnnnnnnnnnnnnnnnnnnnnnncgcccccgcttcaatcaactgagtggacagaatgaatacgtttgatttctttaaccaaaattttgggcgtttcttggctgtgcagaccgataatgcaatggctgacgcacaggcagcactatcaaaaaaccacgaattgctaacaggtaaaacaagtcgcttatctagcggttgggcaattgttaggcccggtcgttcaagccttcagcttggcgtgaagtgcacaggcatcgaaatagttggcaacaccgtcagccgctttcaggcgtttattgcagatcttaaaaattggaataacgagccgaggatttatctcacgtttgataaacggccaataccgattgcaaatttatttgtcacctatgacctaagagcggtgaggatctgctctgcaaaaggagtggagacctttgactttactaaagatccgaccgatgagtcaggcatggtgcataaagttttgttcaaacaaatgaaagaggttgcctgacatggaatacgtgatcgaaaaaccatttgccgttaataaatacgcatgtcaccgaatgctttctgggttgactgggggtaagccggccagttgggtcgacgagggggagcaacttagagtgcgaacagcagacccattacctgctcaggtacagtctgatcgtaaattcaccggcggtcagatcgtggggttccagcttaaagccagttgtgggaaaaaagttaaaggaaaacaccgctactttcacacagccgattggcgaagtcgacatgcgtggttaaagcgaaaaggagagttgcatggcttcgaagtgttgactgtgcattgccatgctgagcaagaacgaattgttgctggcaagcgaaccttcacagtcgacgcaacttcttttacaggcattttgaaggtcatagatatcgtcaaattccaggcagtgctaataagtggcattggttcaacggctaaagcttttggttttggtttcattcagttttgaatacaggggtcacgtatatgactaagcagacgatcgtcgttgatggagtaataacaaccgttgctcctctctcaatagctatgccagtaccagagggtggacgcgagaatcagtacaagcaatttccaataatgactagaggtcttgatgatgagggtaataagcttcagaccgggtatcttccagctacaactttgcgggggtttatgcgaagggcaatcgtcaccgacgcaatgattaaagccgctgaggccgggaggcactacacattgcaaaaagcctatgccgagttgattggtcaggatgctgctagtgaggcggccagtgaagacattgacctgattaagcagcagcaacagcgtgatcagaatcctgttctggatctgtttggcgtaggcatgagccttaaatctaggctgctggtgtctcacttcgtgccagtgactaatgttttgcctgaggcgttttcaggggtacgcaaagaccttgaggatactcctgaggcatttgaggccttgtctttagaaactcagaacactcatgcaaaccgcagtcaggctaatagccaacgggctgaagctgagtcactggttaaatcattggtgcgccaaattcgtgccgctgagaaaaagggggctgggaccgcagaactaaaggctcagttggaggcggcacaagtattggcagcaaagttcgctgatcagatgggcgacatgcaaaactcaagccgtactctggtcggacactttgcgttacccgccggtattgacctgcacggtaagttgattgtcgagagagcgagggatcgtgaccttgagatgctactactcgctttggatgccctgtcgagacgccccttgttaggcgcgcaggtggcccgtggttgcggggagatcgccgggaagtttacgattaaggttgatggtgtcgtgaagaaaatcgttgaaattggtaactgggaagctgcaaaatcagtggatttttaatgaaagcatggcaaaaagttgttatctgcgctggacttactgaataatgggtcaagccaccctgaaattgggtggctactggaactgtcgctgacgtggcgaataatctcaaatgggtcaagccaccctgaaattgggtggctactggaacagtgatgacgcatcttctcggcgttctgttggtcaagccaccctgaaattgggtggctactggaactgactgtacaggcggtcagtggtgaactttggtcaagccaccctgaaattgggtggctactggaacccagtcataatcgcatcggtcaagctctgcggtcaagccaccctgaaattgggtggctactggaacaagaaccaagaccaccaacccacaattattggtcaagccaccctgaaattgggtggctactagaacctgatactgtctaaggcgactgattgaaacggtcaagccaccctgaaattgggtggctactgcattgtgtgcaacctccccccggttggtgtaacttacttcgttagtgacctcgcaaaaggtattcatgtttcgcagcccagagcagcagcactttagtgccagagtcagtaagcacattgctcaacccgatgccccgttattactagagggtggtacgggcttgggcaagacacgcgcatacctagcttcgattgggcaagcacgtgtggcgatcgttctgccgacccatcaacttatcgatcaaatgctcggatcagcagatcttcgggcggttggtctgacggatgtgaaagcctttcgtcctgctagattttatgaggcccgtgcggaatatgaaaaagctcgtgaacaggcaaaaaacgcgcaagtcatgctttgcacggcagcctcagtcattatcgatcagcgcttagacggggaatacaacggtatcaccacggaccgtgagtacattatcttcgacgaggcagaccagttgcccgacatggcagcgttgcagtcagatttcactatttctcagcatgacctgtccgaacttggtatcaagctaataacagccgatcaggcattggcagacatcgtggctaaaaagccgcgtacagttcaacccgagctccgtgcggcagccaagttaatgcttgaggtgctggcgcaacctgcgtggtaccacgcctgtggtcaagatgatcagggtggccttgttctgacacacaagctcccgggaaggttgttgaagaaaatcagtaataggccccgcacggcttttatcagtgcaacgctatcggtgtttggaaagtttcaaaatttcaaaatgtcgatgggtattgaaaacgaatcgatgctgtcgaccattattgagcctattagacacggttctcttacctttcataccgttgatgccgttgttgatacacccgagtggattgatgctgttgtcgatgccgtcaaccaatctcccaaaccaaccttggttgcgactacttctcatgacctgactcaagttttagctaagcgactgccagacgccacagcgcgtttaaatgatgagaccgctgccatggcttccgaacgggttgatcagggtggcgttcttatagcagcaggagcatgggcagggcttgacacggcggttcgctggcgttcgatcgtagtaccgagagtgccatacagcaagccagtggtcgttgagggtgatgtgacaacaagttaccttgatgcaagaaacactgccatacgacgcctgaggcaagtcatagggcgagggctgagaacgccagacgcagtgtgtgacatctatatcttagacggacgttatgatcgtttggaagcgtttgtgccggagagatttaagactgcttggagagatcgagataaccaatctttcttagaaggtgcgaggaaagaagttgttttgagtaaagccgagcgtgatccgatgctgcgccaaacagcaatacggaaatatggtttggtatgtatggcttgtggctatgttccaaaggtatcaacgcaaatagacgttcatcacaaggatccaattgcggagggtgagcgtaaaacaacggtagccgacgtacttgttttgtgtgcgaattgtcacagatttgcgcatagcgagtcaccgccgcttgaacttgaagcattgcggaaataagttacaccccacggcaatgtagtggctatctttgaaatcaacatacagctcatgtgaaggggctctattcaattttgttttttggtcgtcgcccgcgtagtttcacttcctctgtaaagagcccaatttggtttcccaagtcacaaaggtcgtgaaggcgtttgatagcaacctgtcgggctaacctgacctctaggatatggtttccgtccctatactgaggatgctttgcacctcgtcgaatcgtttcgggcttgcgtgctccgtgcatcctgcaggttttacagccataggccgctgggttgttgcaccggctttgcgtcgatttggcttttgctgtgcaccgctttgagtctggcaggtaaggtaacggcattttatgatcctta

SEQ ID NO: 214 - DNA, 11966 bp, Artificial Sequence
  Synthetic Oligonucleotide
  misc_feature (1)..(5264): n is a, c, g, or t
nnnnnnnnnnnnnnnnnnnnnnnnnnnnnnnnnnnnnnnnnnnnnnnnnnnnnnnnnnnnnnnnnnnnnnnnnnnnnnnnnnnnnnnnnnnnnnnnnnnnnnnnnnnnnnnnnnnnnnnnnnnnnnnnnnnnnnnnnnnnnnnnnnnnnnnnnnnnnnnnnnnnnnnnnnnnnnnnnnnnnnnnnnnnnnnnnnnnnnnnnnnnnnnnnnnnnnnnnnnnnnnnnnnnnnnnnnnnnnnnnnnnnnnnnnnnnnnnnnnnnnnnnnnnnnnnnnnnnnnnnnnnnnnnnnnnnnnnnnnnnnnnnnnnnnnnnnnnnnnnnnnnnnnnnnnnnnnnnnnnnnnnnnnnnnnnnnnnnnnnnnnnnnnnnnnnnnnnnnnnnnnnnnnnnnnnnnnnnnnnnnnnnnnnnnnnnnnnnnnnnnnnnnnnnnnnnnnnnnnnnnnnnnnnnnnnnnnnnnnnnnnnnnnnnnnnnnnnnnnnnnnnnnnnnnnnnnnnnnnnnnnnnnnnnnnnnnnnnnnnnnnnnnnnnnnnnnnnnnnnnnnnnnnnnnnnnnnnnnnnnnnnnnnnnnnnnnnnnnnnnnnnnnnnnnnnnnnnnnnnnnnnnnnnnnnnnnnnnnnnnnnnnnnnnnnnnnnnnnnnnnnnnnnnnnnnnnnnnnnnnnnnnnnnnnnnnnnnnnnnnnnnnnnnnnnnnnnnnnnnnnnnnnnnnnnnnnnnnnnnnnnnnnnnnnnnnnnnnnnnnnnnnnnnnnnnnnnnnnnnnnnnnnnnnnnnnnnnnnnnnnnnnnnnnnnnnnnnnnnnnnnnnnnnnnnnnnnnnnnnnnnnnnnnnnnnnnnnnnnnnnnnnnnnnnnnnnnnnnnnnnnnnnnnnnnnnnnnnnnnnnnnnnnnnnnnnnnnnnnnnnnnnnnnnnnnnnnnnnnnnnnnnnnnnnnnnnnnnnnnnnnnnnnnnnnnnnnnnnnnnnnnnnnnnnnnnnnnnnnnnnnnnnnnnnnnnnnnnnnnnnnnnnnnnnnnnnnnnnnnnnnnnnnnnnnnnnnnnnnnnnnnnnnnnnnnnnnnnnnnnnnnnnnnnnnnnnnnnnnnnnnnnnnnnnnnnnnnnnnnnnnnnnnnnnnnnnnnnnnnnnnnnnnnnnnnnnnnnnnnnnnnnnnnnnnnnnnnnnnnnnnnnnnnnnnnnnnnnnnnnnnnnnnnnnnnnnnnnnnnnnnnnnnnnnnnnnnnnnnnnnnnnnnnnnnnnnnnnnnnnnnnnnnnnnnnnnnnnnnnnnnnnnnnnnnnnnnnnnnnnnnnnnnnnnnnnnnnnnnnnnnnnnnnnnnnnnnnnnnnnnnnnnnnnnnnnnnnnnnnnnnnnnnnnnnnnnnnnnnnnnnnnnnnnnnnnnnnnnnnnnnnnnnnnnnnnnnnnnnnnnnnnnnnnnnnnnnnnnnnnnnnnnnnnnnnnnnnnnnnnnnnnnnnnnnnnnnnnnnnnnnnnnnnnnnnnnnnnnnnnnnnnnnnnnnnnnnnnnnnnnnnnnnnnnnnnnnnnnnnnnnnnnnnnnnnnnnnnnnnnnnnnnnnnnnnnnnnnnnnnnnnnnnnnnnnnnnnnnnnnnnnnnnnnnnnnnnnnnnnnnnnnnnnnnnnnnnnnnnnnnnnnnnnnnnnnnnnnnnnnnnnnnnnnnnnnnnnnnnnnnnnnnnnnnnnnnnnnnnnnnnnnnnnnnnnnnnnnnnnnnnnnnnnnnnnnnnnnnnnnnnnnnnnnnnnnnnnnnnnnnnnnnnnnnnnnnnnnnnnnnnnnnnnnnnnnnnnnnnnnnnnnnnnnnnnnnnnnnnnnnnnnnnnnnnnnnnnnnnnnnnnnnnnnnnnnnnnnnnnnnnnnnnnnnnnnnnnnnnnnnnnnnnnnnnnnnnnnnnnnnnnnnnnnnnnnnnnnnnnnnnnnnnnnnnnnnnnnnnnnnnnnnnnnnnnnnnnnnnnnnnnnnnnnnnnnnnnnnnnnnnnnnnnnnnnnnnnnnnnnnnnnnnnnnnnnnnnnnnnnnnnnnnnnnnnnnnnnnnnnnnnnnnnnnnnnnnnnnnnnnnnnnnnnnnnnnnnnnnnnnnnnnnnnnnnnnnnnnnnnnnnnnnnnnnnnnnnnnnnnnnnnnnnnnnnnnnnnnnnnnnnnnnnnnnnnnnnnnnnnnnnnnnnnnnnnnnnnnnnnnnnnnnnnnnnnnnnnnnnnnnnnnnnnnnnnnnnnnnnnnnnnnnnnnnnnnnnnnnnnnnnnnnnnnnnnnnnnnnnnnnnnnnnnnnnnnnnnnnnnnnnnnnnnnnnnnnnnnnnnnnnnnnnnnnnnnnnnnnnnnnnnnnnnnnnnnnnnnnnnnnnnnnnnnnnnnnnnnnnnnnnnnnnnnnnnnnnnnnnnnnnnnnnnnnnnnnnnnnnnnnnnnnnnnnnnnnnnnnnnnnnnnnnnnnnnnnnnnnnnnnnnnnnnnnnnnnnnnnnnnnnnnnnnnnnnnnnnnnnnnnnnnnnnnnnnnnnnnnnnnnnnnnnnnnnnnnnnnnnnnnnnnnnnnnnnnnnnnnnnnnnnnnnnnnnnnnnnnnnnnnnnnnnnnnnnnnnnnnnnnnnnnnnnnnnnnnnnnnnnnnnnnnnnnnnnnnnnnnnnnnnnnnnnnnnnnnnnnnnnnnnnnnnnnnnnnnnnnnnnnnnnnnnnnnnnnnnnnnnnnnnnnnnnnnnnnnnnnnnnnnnnnnnnnnnnnnnnnnnnnnnnnnnnnnnnnnnnnnnnnnnnnnnnnnnnnnnnnnnnnnnnnnnnnnnnnnnnnnnnnnnnnnnnnnnnnnnnnnnnnnnnnnnnnnnnnnnnnnnnnnnnnnnnnnnnnnnnnnnnnnnnnnnnnnnnnnnnnnnnnnnnnnnnnnnnnnnnnnnnnnnnnnnnnnnnnnnnnnnnnnnnnnnnnnnnnnnnnnnnnnnnnnnnnnnnnnnnnnnnnnnnnnnnnnnnnnnnnnnnnnnnnnnnnnnnnnnnnnnnnnnnnnnnnnnnnnnnnnnnnnnnnnnnnnnnnnnnnnnnnnnnnnnnnnnnnnnnnnnnnnnnnnnnnnnnnnnnnnnnnnnnnnnnnnnnnnnnnnnnnnnnnnnnnnnnnnnnnnnnnnnnnnnnnnnnnnnnnnnnnnnnnnnnnnnnnnnnnnnnnnnnnnnnnnnnnnnnnnnnnnnnnnnnnnnnnnnnnnnnnnnnnnnnnnnnnnnnnnnnnnnnnnnnnnnnnnnnnnnnnnnnnnnnnnnnnnnnnnnnnnnnnnnnnnnnnnnnnnnnnnnnnnnnnnnnnnnnnnnnnnnnnnnnnnnnnnnnnnnnnnnnnnnnnnnnnnnnnnnnnnnnnnnnnnnnnnnnnnnnnnnnnnnnnnnnnnnnnnnnnnnnnnnnnnnnnnnnnnnnnnnnnnnnnnnnnnnnnnnnnnnnnnnnnnnnnnnnnnnnnnnnnnnnnnnnnnnnnnnnnnnnnnnnnnnnnnnnnnnnnnnnnnnnnnnnnnnnnnnnnnnnnnnnnnnnnnnnnnnnnnnnnnnnnnnnnnnnnnnnnnnnnnnnnnnnnnnnnnnnnnnnnnnnnnnnnnnnnnnnnnnnnnnnnnnnnnnnnnnnnnnnnnnnnnnnnnnnnnnnnnnnnnnnnnnnnnnnnnnnnnnnnnnnnnnnnnnnnnnnnnnnnnnnnnnnnnnnnnnnnnnnnnnnnnnnnnnnnnnnnnnnnnnnnnnnnnnnnnnnnnnnnnnnnnnnnnnnnnnnnnnnnnnnnnnnnnnnnnnnnnnnnnnnnnnnnnnnnnnnnnnnnnnnnnnnnnnnnnnnnnnnnnnnnnnnnnnnnnnnnnnnnnnnnnnnnnnnnnnnnnnnnnnnnnnnnnnnnnnnnnnnnnnnnnnnnnnnnnnnnnnnnnnnnnnnnnnnnnnnnnnnnnnnnnnnnnnnnnnnnnnnnnnnnnnnnnnnnnnnnnnnnnnnnnnnnnnnnnnnnnnnnnnnnnnnnnnnnnnnnnnnnnnnnnnnnnnnnnnnnnnnnnnnnnnnnnnnnnnnnnnnnnnnnnnnnnnnnnnnnnnnnnnnnnnnnnnnnnnnnnnnnnnnnnnnnnnnnnnnnnnnnnnnnnnnnnnnnnnnnnnnnnnnnnnnnnnnnnnnnnnnnnnnnnnnnnnnnnnnnnnnnnnnnnnnnnnnnnnnnnnnnnnnnnnnnnnnnnnnnnnnnnnnnnnnnnnnnnnnnnnnnnnnnnnnnnnnnnnnnnnnnnnnnnnnnnnnnnnnnnnnnnnnnnnnnnnnnnnnnnnnnnnnnnnnnnnnnnnnnnnnnnnnnnnnnnnnnnnnnnnnnnnnnnnnnnnnnnnnnnnnnnnnnnnnnnnnnnnnnnnnnnnnnnnnnnnnnnnnnnnnnnnnnnnnnnnnnnnnnnnnnnnnnnnnnnnnnnnnnnnnnnnnnnnnnnnnnnnnnnnnnnnnnnnnnnnnnnnnnnnnnnnnnnnnnnnnnnnnnnnnnnnnnnnnnnnnnnnnnnnnnnnnnnnnnnnnnnnnnnnnnnnnnnnnnnnnnnnnnnnnnnnnnnnnnnnnnnnnnnnnnnnnnnnnnnnnnnnnnnnnnnnnnnnnnnnnnnnnnnnnnnnnnnnnnnnnnnnnnnnnnnnnnnnnnnnnnnnnnnnnnnnnnnnnnnnnnnnnnnnnnnnnnnnnnnnnnnnnnnnnnnnnnnnnnnnnnnnnnnnnnnnnnnnnnnnnnnnnnnnnnnnnnnnnnnnnnnnnnnnnnnnnnnnnnnnnnnnnnnnnnnnnnnnnnnnnnnnnnnnnnnnnnnnnnnnnnnnnnnnnnnnnnnnnnnnnnnnnnnnnnnnnnnnnnnnnnnnnnnnnnnnnnnnnnnnnnnnnnnnnnnnnnnnnnnnnnnnnnnnnnnnnnnnnnnnnnnnnnnnnnnnnnnnnnnnnnnnnnnnnnnnnnnnnnnnnnnnnnnnnnnnnnnnnnnnnnnnnnnnnnnnnnnnnnnnnnnnnnnnnnnnnnnnnnnnnnnnnnnnnnnnnnnnnnnnnnnnnnnnnnnnnnnnnnnnnnnnnnnnnnnnnnnnnnnnnnnnnnnnnnnnnnnnnnnnnnnnnnnnnnnnnnnnnnnnnnnnnnnnnnnnnnnnnnnnnnnnnnnnnnnnnnnnnnnnnnnnnnnnnnnnnnnnnnnnnnnnnnnnnnnnnnnnnnnnnnnnnnnnnnnnnnnnnnnnnnnnnnnnnnnnnnnnnnnnnnnnnnnnnnnnnnnnnnnnnnnnnnnnnnnnnnnnnnnnnnnnnnnnnnnnnnnnnnnnnnnnnnnnnnnnnnnnnnnnnnnnnnnnnnnnnnnnnnnnnnnnnnnnctgacgaaatcaaaatcggcatcatgcccggccacatccacaagaagggccgcattggcgtggtcagccgctccggcacgctgacctacgaagcggtgggccaattgaccgagttgggtctgggccaatccagtgctgttggcattggtggcgaccccatcaacggcttgaagcacatcgatgtcatgcgcatgttcaatgacgaccccgacacagacgccgtcatcatgatcggcgaaatcggtggtcccgatgaagccgaagccgcccgttggtgcaaagaaaacatgaagaagccagtggtcggctttatcgctggtgtgaccgcaccggctggtaagcgcatgggccatgcgggtgccttaatctctggtggtgaagacaccgctgaggccaagctggccatcatggaagcttgcggtttcaccgtgacccgcaacccgtccgaaatgggtaagctgctgaagcgcttgctgtaaaccggatcggcagcgtcagcatgccgctggcgcgtgttcgtgcaaaaatggcaacgtgttccatgcgttgccattttttttgatacgttcaatcgaaagaaaataaccggtgcttgagtttttaacccctgaattctggatcgcggtgggtcaaattatcttgattgatattttgctcggcggcgataacgcggttgtcatcgctttggcctgtcgacagctgcctgaaaaccagcgcatgcagggcatcatgtggggcactgtgggcgcgattggtttgcgggtgttgcttatcgtttttgcgctaacacttctgaccatcccttatctgaaaatcgttggcggtttgttgctggtgtggattggtgtgaagctcatgatccccgatgaggaaggagaccatagcgtcgtcgatgccagtgacaagctctggtcagccgtcaaaacagtcatcttggccgacttggtcatgagcatcgacaacgtcatggccattgctggcgccgcgcagggtgctgccgagcatcaacaagtgccgctggtaatttttggcctgctggtcagcgtgcccatcatcgtatggggcagtcaattggttttgaaaatcatggacagcatgcccattgtcatcaccttgggtgcaatgttgttgggctggattgccggcatcatgatttggaccgacccggtgctggtcgatgtgctgccgtctgagcccctgatgggtttgtctttgcgccattgggcggggtttgtcggtgcttgcttggtgtgggtgattggtcgtgcggtcatcgcaaagcgccctaaacccttaggggcttgacgttatctctgagcgccttagataccgtgcatcgttggttcaactttggaaacaacccggacactcattcatgcaactttccagcaaccgtaaccttggcttcaccttgattgaattgatggtggtggtggccgtggtgggcatcttggctgcagtggccattccgcaatatcaaaactacacccaacgcgcgcggtgggccgccaacctcggcgccattgccgcgttacagggtacggtcagtgagtgcctcggccaacaagccaacgacatcacgttatgcgacacgtttggcgaacttggggtcaccagtggcctgaataccgatggcgtcatgccgttgccccatggcacggttgccgtgcaagccagcggtgatgccaccgcgattcgggttgttttaacgggcgctgccaatgcgggtaattgcatcatcacagccagcttgacgcccgcagaaggagcccaaatgctgcaatgggccctcacgcgggacaccacacaaactaaatgtaccgctgccaacacgggcgttgacgcagcaggctgattcgggcgtaagatgcggctttaatttttggagcccagcatggcaaaaggtcagcaaaaaacaaacaaggaatccaaaaagcccaagaaggccgccgccgccgcccctgctttgaacagtgcgcaagaacccgtgcgtgccgtggtcaccacatccgtgatgcccaaaggcaaggctaaaaataaaccggccttctaatatttattagctatttattttaaaaattaaacaataaaagagtacttattgactattatgttgtgaagtaatcgacttgccttccgcaagccgttgattcacacatggggcaggctctgcaaacattcactcgacgggcgacgctcaaaaccccggtcatcatgcgggggtacctcacgcttgatgcactgctgatggcggagttggtcactggcgacgtctcgcacttactcaagcgagatgcgcagttgtactacgccagcgccgcctttttggtggacccgcttgaggaaaagcaaaaggcatcatttgttgccagcatgcggcccgagcaccacccggagctccgcgagctcatcgcccccaacacgcacacacccaacgcgccaccgcttttgcacacgcatcggtcgcgtggcaatgtcaacgacgtggcaattggacgcgctcgccgcaaagaagcgggcaacatcctcaaccaatacgtggcccacgctgctgcagccgtcgagtggtatgccaccggccatgccgagcaggtctggcaggttgtgcaagacatcgcatttattggcaaaaagcgatcagcgggctacggcgaaatcgacgcatggcaggtgatccccggccaccttgatggcctcaccgatgacttcggagagcccttgcgccccgtgccggttgagcgatggccaacctccgcgacgcttattccctccgaggccgcatggtgcgccccgtattgggatattcgaaaccgaaccaagtgctacacgccggagccacaatgaacggcgccgacttcttaatgcaacacatcggttatcggttattgccgaaagcgatgcacaccggcgatgccgtcaccgatgccaacgcgctattcagcatcagtttgcccctacacaccggaaaaacactccggctttccagttgctggtgggtgatcacacccgatgcaacgtacaccagctttaaggccatccccgagaccggcgccattcaggggcagttgcggcaggccgtcatcttgtcatccctaaaaacgggattgcccctcttgatcctcgcgattggcaagagccccatttacgcacgcgacctctttgtgacctacgacccacgcgcaacgcgctattgcagcgatcgcagtttgcgcaccgttgattcaactctggagaagtggtggacaccttaatcagcaagcccatccagctgtgcggctatgcgctgcaccgcttggttgcgcaacatcaaaacggtgcgccagcgctctggcgtgacgagggtgacaccgtgcgaattcgctcgcgtgacgcctgtccgcccacctacgtcacagggcaactgttgggctttgtcacattggcgtgtgtgtcgtttggtagcaaacaccggtacctgccggtcgccgattggcgtggtcgcaaagcgtggctggaggcacagggcatcaaacacggtttcgaggtggttggggtgcacgcccagggtggcatgcaaaccgtgaccacccatgacggtcgccacttcaccattgatgccacgcaattcacgggcttgctgcgcgtcacccagcctgcgccattcaacgactgtctgctcaatggcatcggcaaagtaggtaaagcctttggcctcaacttactcgtcgttcattaacccaacgcttaaaaacgcttatccggagttcaccaccatgcaagacgttcgcatcgatatcgccatcaatacgattcaacccatcaccttcacccatcacggcatcgacgggttgcccaccatggctcgcggcgttgacatggagggtcatcccctgcgcaccgtttacattccagccgcgcagtttcgcggtcggctaaggcatgaggcggcgttggcaaaaatgcgtaccgcacacggccccatcaagttggcggaagcctacatgctggccttggggcaaaacatcgacaccaaagaagacgaggctgatgagaaagtgcggttgggcgagctactcgctttacgggcggccaaccccttcattgatctcttcggaacgtggcgcatggacagccggctttacgtgtcgcacctgatgccggtcgtcaacgtcaagcccgacacctttcaccacatccgccgcgatctagacaccaacgacgcgttgtttgccgagttacccgaagccgagatcgacgtcttttacgaaaggcaagacggacagtcgcaagcctctcaagcggagagtctgattaaggtggccacccgcgaactgcgcaaagccaaaaaagaaaacgacctcgccaaatgcgacgagttcgaagccaagatcgaagaactcaaagccctcaagaaggcgcacaaagccggtgacgaatcgggaaacaccaaacacttggtggcgatggaggccgtccctgcgggaattcaattgttgtgcaaactcatcataaagcgggccacgccgctcgacctcagcatgctcacgggtgcgcttaacgcgatcagcgaattccccatgatgggtgcccagcgggcccgtggctgaggcaaggtgagtggcgccgcaaccgtctgccacacccagggtgaggtgttggcgcaaatcgccttcggtggttttttgccagctgcactggagtggaccgatgcgggcaccgcgttcatgactggcctcgaaacggttgccgtcgccgcgtgaaaggcccttaccgcagcccacagcaggcgcaatacgccaagctcatcgagcgcgctgtcagcaaacccggtgcgcccctgttggcgggtgctgcgcccgggctcggtaagacacacggctacgccatcccgttgttgtgcagtggcaaaaaagttgccatcgccatgagcacgcgccaactgatcgatcaatttatagcgagcgatgcactcgccgctgcgcaagccgcactagaggccgaggggcggcccgctgccaccgttgtcgccttgcaaccccgccgtcaatttgaaacggcggtggcctacagcgcgcacaaaacggcggcgcttgatgccgacgtcttggtgctcacacacatgggcgtgctcatcgatacccacatcccagcctacgcccagctgcgtcagcgcgctgtcttgttgtttgacgaagccgatcttttggccgatgccgccgacttgcgcagcacctatcgcattgaggctgaggccttagcccgcgcaggcgtcgaaaacgccacaccgacaaaggcggttgaaaccatcattaaaaaatccgatgaccccgaggaaaaagcagtcgccacagccatccaacgcgctttggcagagccggcttggtacaaagtgatcggtaaagaagacaacggcgatttggtgctgacccaccgcatgccggggcgcatgttgcgcaccctcatcaatgacatgccgcggtgcattttcaccagtggcaccctcacggtatcggggcgttttgaccactttgtcaaagccatcggcctgaccgcagtggcacccgaaagccagcacattgaccccgtgcaacacggccaactgcgcgttgaggtggccagtgaggccctcaccccagaagctcaagccgaacgcatcatgcacgcggcgacaccggtattggtgctgaccaccagccacgcgaccacggcggcgttgggcgccttgtgccccggtgccacctgccgcgcacccggtgaagccctcatggatgcggtggcgcgatgccctgatgatggcatcttgatcgccgctgtcgcttggtctggcctcgatgcgccgcgcctgcggtggcaaaccgtggtcatccccaaaacaccttacggcaaaccactcatccttgacgcccagcaaataagcgcttacgtggatagcaaggttgttgccatcaggcgcaccaaccaagggttacaccgtgggctgcgcaccaccgatgccacctgcaccttgctgttactcgatccggatagccgtcgtgccgatttacgtcaagccattccccgtcgtttcttggtggattgggacagcgtggccgagggctcgttggttttgcgcacgcacttcgcccgtgaacgaaaaaaaggtctgcgtgaaaaaaccctgagccggcgcgggcagcactgcgaacaccccggctgtacggccacccaagagcatttgctggaggtgcaccacctcaacccgattgccaacggcccccgcgacacagttactgatgacctgcgggtgctttgtaaaaatcaccacgcggatgcccaccaagccatgcgaaaagctgattttttaaaagtgaaaacaactgaaaagcgtgcagaggcagacacttaggccacagctggtcaagctacgccgtaaatgcgtagttactggaacttcgcgcgagtgcttagataggcttccatcggtcaagctacgccgtaaatgcgtagttactggaacttgcgtgtggtatcagttcagcgtggatcgggtcaagctacgccgtaaatgcgtagttactggaacgaagttcacgttgacactgccttggatacgggtcaagctacgccgtaaatgcgtagttactggaactggtagcggctgcttgttaagtaaggccgaggtcgtctggggtcaagctacgccgtaaaggcgtagttacttttagcagccagttttgctggttt

SEQ ID NO: 215 - DNA, 11963 bp, Artificial Sequence
  Synthetic Oligonucleotide
  misc_feature (1)..(4591): n is a, c, g, or t
nnnnnnnnnnnnnnnnnnnnnnnnnnnnnnnnnnnnnnnnnnnnnnnnnnnnnnnnnnnnnnnnnnnnnnnnnnnnnnnnnnnnnnnnnnnnnnnnnnnnnnnnnnnnnnnnnnnnnnnnnnnnnnnnnnnnnnnnnnnnnnnnnnnnnnnnnnnnnnnnnnnnnnnnnnnnnnnnnnnnnnnnnnnnnnnnnnnnnnnnnnnnnnnnnnnnnnnnnnnnnnnnnnnnnnnnnnnnnnnnnnnnnnnnnnnnnnnnnnnnnnnnnnnnnnnnnnnnnnnnnnnnnnnnnnnnnnnnnnnnnnnnnnnnnnnnnnnnnnnnnnnnnnnnnnnnnnnnnnnnnnnnnnnnnnnnnnnnnnnnnnnnnnnnnnnnnnnnnnnnnnnnnnnnnnnnnnnnnnnnnnnnnnnnnnnnnnnnnnnnnnnnnnnnnnnnnnnnnnnnnnnnnnnnnnnnnnnnnnnnnnnnnnnnnnnnnnnnnnnnnnnnnnnnnnnnnnnnnnnnnnnnnnnnnnnnnnnnnnnnnnnnnnnnnnnnnnnnnnnnnnnnnnnnnnnnnnnnnnnnnnnnnnnnnnnnnnnnnnnnnnnnnnnnnnnnnnnnnnnnnnnnnnnnnnnnnnnnnnnnnnnnnnnnnnnnnnnnnnnnnnnnnnnnnnnnnnnnnnnnnnnnnnnnnnnnnnnnnnnnnnnnnnnnnnnnnnnnnnnnnnnnnnnnnnnnnnnnnnnnnnnnnnnnnnnnnnnnnnnnnnnnnnnnnnnnnnnnnnnnnnnnnnnnnnnnnnnnnnnnnnnnnnnnnnnnnnnnnnnnnnnnnnnnnnnnnnnnnnnnnnnnnnnnnnnnnnnnnnnnnnnnnnnnnnnnnnnnnnnnnnnnnnnnnnnnnnnnnnnnnnnnnnnnnnnnnnnnnnnnnnnnnnnnnnnnnnnnnnnnnnnnnnnnnnnnnnnnnnnnnnnnnnnnnnnnnnnnnnnnnnnnnnnnnnnnnnnnnnnnnnnnnnnnnnnnnnnnnnnnnnnnnnnnnnnnnnnnnnnnnnnnnnnnnnnnnnnnnnnnnnnnnnnnnnnnnnnnnnnnnnnnnnnnnnnnnnnnnnnnnnnnnnnnnnnnnnnnnnnnnnnnnnnnnnnnnnnnnnnnnnnnnnnnnnnnnnnnnnnnnnnnnnnnnnnnnnnnnnnnnnnnnnnnnnnnnnnnnnnnnnnnnnnnnnnnnnnnnnnnnnnnnnnnnnnnnnnnnnnnnnnnnnnnnnnnnnnnnnnnnnnnnnnnnnnnnnnnnnnnnnnnnnnnnnnnnnnnnnnnnnnnnnnnnnnnnnnnnnnnnnnnnnnnnnnnnnnnnnnnnnnnnnnnnnnnnnnnnnnnnnnnnnnnnnnnnnnnnnnnnnnnnnnnnnnnnnnnnnnnnnnnnnnnnnnnnnnnnnnnnnnnnnnnnnnnnnnnnnnnnnnnnnnnnnnnnnnnnnnnnnnnnnnnnnnnnnnnnnnnnnnnnnnnnnnnnnnnnnnnnnnnnnnnnnnnnnnnnnnnnnnnnnnnnnnnnnnnnnnnnnnnnnnnnnnnnnnnnnnnnnnnnnnnnnnnnnnnnnnnnnnnnnnnnnnnnnnnnnnnnnnnnnnnnnnnnnnnnnnnnnnnnnnnnnnnnnnnnnnnnnnnnnnnnnnnnnnnnnnnnnnnnnnnnnnnnnnnnnnnnnnnnnnnnnnnnnnnnnnnnnnnnnnnnnnnnnnnnnnnnnnnnnnnnnnnnnnnnnnnnnnnnnnnnnnnnnnnnnnnnnnnnnnnnnnnnnnnnnnnnnnnnnnnnnnnnnnnnnnnnnnnnnnnnnnnnnnnnnnnnnnnnnnnnnnnnnnnnnnnnnnnnnnnnnnnnnnnnnnnnnnnnnnnnnnnnnnnnnnnnnnnnnnnnnnnnnnnnnnnnnnnnnnnnnnnnnnnnnnnnnnnnnnnnnnnnnnnnnnnnnnnnnnnnnnnnnnnnnnnnnnnnnnnnnnnnnnnnnnnnnnnnnnnnnnnnnnnnnnnnnnnnnnnnnnnnnnnnnnnnnnnnnnnnnnnnnnnnnnnnnnnnnnnnnnnnnnnnnnnnnnnnnnnnnnnnnnnnnnnnnnnnnnnnnnnnnnnnnnnnnnnnnnnnnnnnnnnnnnnnnnnnnnnnnnnnnnnnnnnnnnnnnnnnnnnnnnnnnnnnnnnnnnnnnnnnnnnnnnnnnnnnnnnnnnnnnnnnnnnnnnnnnnnnnnnnnnnnnnnnnnnnnnnnnnnnnnnnnnnnnnnnnnnnnnnnnnnnnnnnnnnnnnnnnnnnnnnnnnnnnnnnnnnnnnnnnnnnnnnnnnnnnnnnnnnnnnnnnnnnnnnnnnnnnnnnnnnnnnnnnnnnnnnnnnnnnnnnnnnnnnnnnnnnnnnnnnnnnnnnnnnnnnnnnnnnnnnnnnnnnnnnnnnnnnnnnnnnnnnnnnnnnnnnnnnnnnnnnnnnnnnnnnnnnnnnnnnnnnnnnnnnnnnnnnnnnnnnnnnnnnnnnnnnnnnnnnnnnnnnnnnnnnnnnnnnnnnnnnnnnnnnnnnnnnnnnnnnnnnnnnnnnnnnnnnnnnnnnnnnnnnnnnnnnnnnnnnnnnnnnnnnnnnnnnnnnnnnnnnnnnnnnnnnnnnnnnnnnnnnnnnnnnnnnnnnnnnnnnnnnnnnnnnnnnnnnnnnnnnnnnnnnnnnnnnnnnnnnnnnnnnnnnnnnnnnnnnnnnnnnnnnnnnnnnnnnnnnnnnnnnnnnnnnnnnnnnnnnnnnnnnnnnnnnnnnnnnnnnnnnnnnnnnnnnnnnnnnnnnnnnnnnnnnnnnnnnnnnnnnnnnnnnnnnnnnnnnnnnnnnnnnnnnnnnnnnnnnnnnnnnnnnnnnnnnnnnnnnnnnnnnnnnnnnnnnnnnnnnnnnnnnnnnnnnnnnnnnnnnnnnnnnnnnnnnnnnnnnnnnnnnnnnnnnnnnnnnnnnnnnnnnnnnnnnnnnnnnnnnnnnnnnnnnnnnnnnnnnnnnnnnnnnnnnnnnnnnnnnnnnnnnnnnnnnnnnnnnnnnnnnnnnnnnnnnnnnnnnnnnnnnnnnnnnnnnnnnnnnnnnnnnnnnnnnnnnnnnnnnnnnnnnnnnnnnnnnnnnnnnnnnnnnnnnnnnnnnnnnnnnnnnnnnnnnnnnnnnnnnnnnnnnnnnnnnnnnnnnnnnnnnnnnnnnnnnnnnnnnnnnnnnnnnnnnnnnnnnnnnnnnnnnnnnnnnnnnnnnnnnnnnnnnnnnnnnnnnnnnnnnnnnnnnnnnnnnnnnnnnnnnnnnnnnnnnnnnnnnnnnnnnnnnnnnnnnnnnnnnnnnnnnnnnnnnnnnnnnnnnnnnnnnnnnnnnnnnnnnnnnnnnnnnnnnnnnnnnnnnnnnnnnnnnnnnnnnnnnnnnnnnnnnnnnnnnnnnnnnnnnnnnnnnnnnnnnnnnnnnnnnnnnnnnnnnnnnnnnnnnnnnnnnnnnnnnnnnnnnnnnnnnnnnnnnnnnnnnnnnnnnnnnnnnnnnnnnnnnnnnnnnnnnnnnnnnnnnnnnnnnnnnnnnnnnnnnnnnnnnnnnnnnnnnnnnnnnnnnnnnnnnnnnnnnnnnnnnnnnnnnnnnnnnnnnnnnnnnnnnnnnnnnnnnnnnnnnnnnnnnnnnnnnnnnnnnnnnnnnnnnnnnnnnnnnnnnnnnnnnnnnnnnnnnnnnnnnnnnnnnnnnnnnnnnnnnnnnnnnnnnnnnnnnnnnnnnnnnnnnnnnnnnnnnnnnnnnnnnnnnnnnnnnnnnnnnnnnnnnnnnnnnnnnnnnnnnnnnnnnnnnnnnnnnnnnnnnnnnnnnnnnnnnnnnnnnnnnnnnnnnnnnnnnnnnnnnnnnnnnnnnnnnnnnnnnnnnnnnnnnnnnnnnnnnnnnnnnnnnnnnnnnnnnnnnnnnnnnnnnnnnnnnnnnnnnnnnnnnnnnnnnnnnnnnnnnnnnnnnnnnnnnnnnnnnnnnnnnnnnnnnnnnnnnnnnnnnnnnnnnnnnnnnnnnnnnnnnnnnnnnnnnnnnnnnnnnnnnnnnnnnnnnnnnnnnnnnnnnnnnnnnnnnnnnnnnnnnnnnnnnnnnnnnnnnnnnnnnnnnnnnnnnnnnnnnnnnnnnnnnnnnnnnnnnnnnnnnnnnnnnnnnnnnnnnnnnnnnnnnnnnnnnnnnnnnnnnnnnnnnnnnnnnnnnnnnnnnnnnnnnnnnnnnnnnnnnnnnnnnnnnnnnnnnnnnnnnnnnnnnnnnnnnnnnnnnnnnnnnnnnnnnnnnnnnnnnnnnnnnnnnnnnnnnnnnnnnnnnnnnnnnnnnnnnnnnnnnnnnnnnnnnnnnnnnnnnnnnnnnnnnnnnnnnnnnnnnnnnnnnnnnnnnnnnnnnnnnnnnnnnnnnnnnnnnnnnnnnnnnnnnnnnnnnnnnnnnnnnnnnnnnnnnnnnnnnnnnnnnnnnnnnnnnnnnnnnnnnnnnnnnnnnnnnnnnnnnnnnnnnnnnnnnnnnnnnnnnnnnnnnnnnnnnnnnnnnnnnnnnnnnnnnnnnnnnnnnnnnnnnnnnnnnnnnnnnnnnnnnnnnnnnnnnnnnnnnnnnnnnnnnnnnnnnnnnnnnnnnnnnnnnnnnnnnnnnnnnnnnnnnnnnnnnnnnnggttaagcctcaatacaacttgaagatagctaccataaccatcatactgcgtgtaattcataccaaaggttgtgcttggcaaggcaatatcattattaattaagtaagcacgcatacccgcggtcaatctattgccaccggttcctagccaattagaaacatgagaaacatataaacacctttgatcccaaacaccacccccgtaagcgttcttgtgcataacgtcgtttgctttacacagttcattagaatagcgtttgtgaccatagccatattccatgaaatatcccaatcgggaagaaaattgctcctgcaatcagaaaaccccaagctgcattggcaaaacaataaaaaatatggttaaaccaagctgctagacaaactaatccgattagccattgcataattttcttcctattttagttgtctaactgcgtcagcaattgttcgcatatttttagcggcgtcagcgcagctgattttggccgtttttttataggcatctatgccttgaagtgtgaataatgttagattttgactgacccgttcggtatcgctgtcatgcaagcgattcctatatccgtacccaataatctcgttaactgtttcatcagcgagcccatacattggggttaagttgcaagcctttatcacagtcatataagtaaaagaagccatgaatatttgctgaaactcaccttttgacaaaactttattagcttgggataagcccgtggtcatcatgaaaagtaaaacagttatgtttacccattttttcattttcgaaacctctgaattttgggtaagtttatctatttattagactaagcttaccctatccggttcaattacccaaaagcgtttcggtaacttaattactcgaaaacactagtagtctttttttgttgtcacacagctggtgcaaggtctggagttctagggcacaccgttggttgttcgcagacgatatctttgattttttgttcatgcttgagaagattgtttttcttctgatctggtgcgattcgccttaggcagcagtcaggccacatacccctactaacttggtagagctcaccgttgcaacgctcataccaaatcaaccttgccccagtcactttaacttgccacgtgggcctaataccgcactcgctccaactaataagtccctcaaacttcaataccttgactatcagccctaaattttctttttcgccgccatcatcaacaataattgcaaggtcaccgactcttacgtttctcatcacatgctcctgtttagccatttcgacgttgtcgggcatggcaattcggaataactccgccccttaattcaaccttccgtactagtaataaaaaaagccccatcaaggggcttgtagtcgtttagttatctgagcaacttaccagatcacattcgctataagcgtaagcacctttgcctttatgggcgggttgctgtggactttcgtcccctcttaatgtttttaaatattaccactaaaaacgcggtagcccaccctttttattaacgctgtacctatctttgctattgcctcctaagaacgtgcacaaaactcttttgcattctgattttggcgtcaaaaatgtcctacctaaactgaatcgagccctatctcttggcttaagagtgttcaatattgatctgtataagaccgcatctactaactaatcgaacacgatatcggggtaccagtatttgaacgagcgtgaccggcacttagggcaacgatgcagtccatgtaacaagctgccacttggaattactggttctacccaacagccaccgcaggaacagtcgccaaggaatgaaagtaacgtctgccactcaccatctcgccagctgtctccttgactaacccaacgctgctgatcacgcttttcgaagtatgctcttaactgttcctcagacaaatctggaacttggttcgactgagtggaaagacctgaaaccagtgagccaaccgcccgactcagtttttttagtggtgttacggcaggctcaggctttgaacgcggggcatagcgagggagcgactttgtttcgccgcaaccatcacaacacacatgaacgaagctaaatcctcctccctgtacgaccttgaattcgtggtcacagtctttacagcgacaatcaaatactgcacccatgtcttattcccccaagttaccttcctgtatcaggcgttaaccattttttcactgtagcgtctaaattgtaagtaccgagtttacggtaactggttttaaagagaaaaaagttagttggtatctcactttacgatacagtagttgactcatacttatttttaactaatggaggtttgtatggcaagcacaactcaacccatcacggtagaacggcaagataagcaagaaaaagtcgtttgtgatgaaataaaaagagcctacgagtttcttgctgaagagggttttaggccgtcatatgaagaagatgacacagttaaatttcgcgtagaaggtgtgactgcaaggttagaccgattagacgctggctatcgaatctacatatgggtgctcggtgagttgccggaggagcagcgtcccgtctcttattggacagctaactatattaatttgacccagccgtttgttcgtgcaggtgttactgaagataactccctaatagtttcttactcaatgatgggttcagatatttcgcagtttcttgagactctaattgatagcgttaatcgtttattatttgcagggcgaaaagcaaatcagttatttaatgatcagttaaaaccaaagcccctcaatagctgatatcgaaatatagtttcattgcatcattactgtcatcggttgtgtttcgttcctttgctttgcattaagtgtttggagagttgaatggagatgtttacgttacgtgcttacctaaacacgccgattattaaacgagggttcatgactcttgatgcattgcttatgtcaattttaggtaaaggggatgtcagtgatcttttgcgctgcgacgaagggctttattttgcgagcgcagggtttccagttgattcggtgtctgataaatttagagcatcttttgtagcaagtcttcgacccgagcacacccccgagtggttagaagtcattaaaaccaatacaaggtctgacgatttacaaatcggtttggctcgccagcgcgatgctggcaacatcatcaatagctacccaactcaagtagcaactgccatcgagtggtatgcaacggggcaaatgcttgatgttttagatgtcgttaaagatattgtggcaatcggtaagcgccgagttgttgggtacggcgaggtcaagttatgggaagctgagcttggtgaaattgacggcttagttggctttgctgatgaacctttacgcccagttccaaccgttcgctggcacttaagtcatgattttgttcctgtagaagctgcttggaaggccccttattgggatgttcgtaatcgaaccaagtgctttgtgccggagattgacttatgaatggccctgaattttttatgcagcatgctggttaccgtttgctccctgaagatgagaaaactgatgacgtagtcaaagatactgatcgtttatttagtattgcattgccgttaaacacgggtaaatttctaagactatcatcgtgttggtttgtggttactgcggattgggtagcaacaagctttaagaccctacccgaggcaggatttcgccacgatatagaccgtaaaacagcaatcgatttggcacttaaggcaggcaagccctgtgtattgcttggactaggtaaacgaaccacgacggcaaatgatatttacgtgacctacgacccaagagccgcacgtttgtgcgagcaaggtaaaaccaaaacttatgacgctacaaaggagaaagcatggacatcatgattgataagccacctcgtgtgcgcgggtacgcacttcaccgaattgtggaacaacttcaaaacggcaagcctgccttgtgggcagatgaagggtcaactgttcgtattaggcctcatgacgcgcaaccacctctgtacgagatcggaaagttattggcattcacgacaactgcatgtgttgcatttagtaagggccacaagcatgtctatctcccaacatctgattggcgagggcgaagggtatggctagataaacaagcagccaaacatggttttgaggttgttggcgtccacatctctgggggcatgcaaaaaattgaaacccataatggccgaaagttcaccattgatgccactgagtttaccgggcttctgcgcgtaagcgattcgactttattcggtcagtgtttgataaatggagtcggcaaagttggcaaggcatttggtttgaatttgatgatcgttcaataaaacaaaaaaaggcacatgaaatgactaaccagaaaatgaaaatagttgcacaaatcagcttgcattcagtacaaccgctaacgtttactcatcatagtgttgacgggttaccgcttttggcaagaggcatcgatcaagaggggcgccaccttcgcacggtctacatacctgcagcgcaatttagaggtcgagttcggcacgaagcggcgttgagtcagatgcgctctgagagcggcaaggtgaagcttgaagaagcctatatgctagcccttggccaagacctacgcccagcggaagatgacgctccagaacaagtcaggctcaaagagcagattgcggtccgtaaagaaaaccccttattggacttatttggcacatggaagttggctagtcgtttgtatgtctctcacttcatgccagaggtcaatgttctacccgcaaaaatcagccatataagaagggacctagacacgaacgaagatatgatggatgcgctgggttctgatgagcaagaccgtatgtacgatcgtcagagtaaacaaggtatggcctcacaagttggtcaattaattaagcttgccacgcgtgaactaatggctgcaaagaaagcaaaagatgtaaccaaggttgacgaaatagaagccaaaatcttagagttaaaagaacttaaaaaaacgcaaaagggtgatgacgattccgaaaataccaaacatttagttgaacttgagttcatacccgcaggtatcactctgaatggaaaattaactgtaaattcagccatacccaacgacttacgtgtgttagtggatgctttagtggggtttggcgaaaaaccttaccttggcgctcaacgtgctcgtggttgtggggaagttgcacttgaagcaacatttaagaatgcagatggtgatgtactcgctacggtagcctttgctgagggcgagggttctaatgttcaatggactgaggcagggactacttttttaaatgctgaaacaactaccacatgatttaccgcagccctgaacagacacaatatgcgaaattaattgagggtgctattaaaccgggggcaccacttctggcaggagcagcagcaggtctgggtaaaacgcacggctttagcattcctctaattacttcaggaaaacgcattgcgatttgtttaagtactcggcagttgattgatcagtatttaaaaagtgatgcgttgcaggtggcttgcggtggaagatccgtttcggttgtggcgttgcaatcaaggcgagactttacacgtgactcagattatcgctcacacaagaagcaggcgttagaagccgagttattaattaccacccatgcggcagcctttattgacagtttcaatccagagtatgcacagcttcgtagtcgtgatgttgtgctgtttgatgaggctgatttattagctgacgctgctgacctgagaagcacatttagtatttcggctgaagcacttaaagattgtggcgctatgttaggtaatgcgttgagtgcggctaaattagttaaggcaaatgccgttgacgcagaagaccgtggtgctgccagttctatcctatatgccttagagaacccagcttggtacaaagtagttggatatgaggaggatggcgctttaactttaaaacatcgtttgccgggcagaatgcttaagcggcttgtggcagatgtaccacgctgtatttttacaagcggaacacttcaggtatctgggcggtttgattactttgttaaagcacttgggctcacagctatagcaccagagagtaggcacattgatccagtcatgcacggcagcctagatgttcaagttgcatctgatgaaatgtctattaatgaaatggctgaaaagattaaagctgcgaagcggccaacattggttcttacaacaagccacaaaacaacatttgagttgggtcaattactaccagaggccactattagagagtccggagaacctttgactgatgcggttgcgcggtgccccgatgacggcattctaatcgcagcaggtgcttggtctgggctagatgcgccaaggttacgatggaaaacattagtgattccaaaaacaccttatggtgtaagaaacgttttagatggtcatgatgtcgggcgttatatcgatagtaaggttgttgctattcgtcgaactaatcagggactgcatcgtgggcttagaacgcccgacgctcaatgcactttactgctactagacccgcgcagtagtaggtcagaactaagagaggcaataccgtcaaggtttaaagttgattgggttggcttcgaagaggggggccgtgaacttgttgagcacatgaaagctgaacgaaatgaaagccttcgtaaagctgcgctaaagcattatggtgagcaatgcatgtgggtgggctgtacggtgacattacctcacctgctcgatgtgcatcactgcaaccctatttcacttgggcaacgacgaacaacgatgtcagatgttaaagttttatgtaaaaatcatcatgctgaggagcatcataggatgcgaatgagcagtttagatgctctagacaatgatttaaatcaaatagaatcaaagggttgaagaatatcagggtcaagctgccatgtaaatgagcagttactagaacttaattaaccgatggtaaatactgttattgggtcaagctgccatgtaaatgagcagttactagaacttgacaaacaacagtgttacagctcaatacggtcaagctgccatgtaaatgagcagttactagatcgacaaacgaaatataaataacattttcagtgtacgtttgatatgcaccttgtagtggagtgtaaagtggaccctttcatcaagacaaaaggtgtaggtttttaagctgtaatcttttactgacctgcagcggttcggcgctgccccgttcgtgctttttctttaatccgttatgctgagaaatc

SEQ ID NO: 216 - DNA, 11950 bp, Artificial Sequence
  Synthetic Oligonucleotide
  misc_feature (1)..(3665): n is a, c, g, or t
nnnnnnnnnnnnnnnnnnnnnnnnnnnnnnnnnnnnnnnnnnnnnnnnnnnnnnnnnnnnnnnnnnnnnnnnnnnnnnnnnnnnnnnnnnnnnnnnnnnnnnnnnnnnnnnnnnnnnnnnnnnnnnnnnnnnnnnnnnnnnnnnnnnnnnnnnnnnnnnnnnnnnnnnnnnnnnnnnnnnnnnnnnnnnnnnnnnnnnnnnnnnnnnnnnnnnnnnnnnnnnnnnnnnnnnnnnnnnnnnnnnnnnnnnnnnnnnnnnnnnnnnnnnnnnnnnnnnnnnnnnnnnnnnnnnnnnnnnnnnnnnnnnnnnnnnnnnnnnnnnnnnnnnnnnnnnnnnnnnnnnnnnnnnnnnnnnnnnnnnnnnnnnnnnnnnnnnnnnnnnnnnnnnnnnnnnnnnnnnnnnnnnnnnnnnnnnnnnnnnnnnnnnnnnnnnnnnnnnnnnnnnnnnnnnnnnnnnnnnnnnnnnnnnnnnnnnnnnnnnnnnnnnnnnnnnnnnnnnnnnnnnnnnnnnnnnnnnnnnnnnnnnnnnnnnnnnnnnnnnnnnnnnnnnnnnnnnnnnnnnnnnnnnnnnnnnnnnnnnnnnnnnnnnnnnnnnnnnnnnnnnnnnnnnnnnnnnnnnnnnnnnnnnnnnnnnnnnnnnnnnnnnnnnnnnnnnnnnnnnnnnnnnnnnnnnnnnnnnnnnnnnnnnnnnnnnnnnnnnnnnnnnnnnnnnnnnnnnnnnnnnnnnnnnnnnnnnnnnnnnnnnnnnnnnnnnnnnnnnnnnnnnnnnnnnnnnnnnnnnnnnnnnnnnnnnnnnnnnnnnnnnnnnnnnnnnnnnnnnnnnnnnnnnnnnnnnnnnnnnnnnnnnnnnnnnnnnnnnnnnnnnnnnnnnnnnnnnnnnnnnnnnnnnnnnnnnnnnnnnnnnnnnnnnnnnnnnnnnnnnnnnnnnnnnnnnnnnnnnnnnnnnnnnnnnnnnnnnnnnnnnnnnnnnnnnnnnnnnnnnnnnnnnnnnnnnnnnnnnnnnnnnnnnnnnnnnnnnnnnnnnnnnnnnnnnnnnnnnnnnnnnnnnnnnnnnnnnnnnnnnnnnnnnnnnnnnnnnnnnnnnnnnnnnnnnnnnnnnnnnnnnnnnnnnnnnnnnnnnnnnnnnnnnnnnnnnnnnnnnnnnnnnnnnnnnnnnnnnnnnnnnnnnnnnnnnnnnnnnnnnnnnnnnnnnnnnnnnnnnnnnnnnnnnnnnnnnnnnnnnnnnnnnnnnnnnnnnnnnnnnnnnnnnnnnnnnnnnnnnnnnnnnnnnnnnnnnnnnnnnnnnnnnnnnnnnnnnnnnnnnnnnnnnnnnnnnnnnnnnnnnnnnnnnnnnnnnnnnnnnnnnnnnnnnnnnnnnnnnnnnnnnnnnnnnnnnnnnnnnnnnnnnnnnnnnnnnnnnnnnnnnnnnnnnnnnnnnnnnnnnnnnnnnnnnnnnnnnnnnnnnnnnnnnnnnnnnnnnnnnnnnnnnnnnnnnnnnnnnnnnnnnnnnnnnnnnnnnnnnnnnnnnnnnnnnnnnnnnnnnnnnnnnnnnnnnnnnnnnnnnnnnnnnnnnnnnnnnnnnnnnnnnnnnnnnnnnnnnnnnnnnnnnnnnnnnnnnnnnnnnnnnnnnnnnnnnnnnnnnnnnnnnnnnnnnnnnnnnnnnnnnnnnnnnnnnnnnnnnnnnnnnnnnnnnnnnnnnnnnnnnnnnnnnnnnnnnnnnnnnnnnnnnnnnnnnnnnnnnnnnnnnnnnnnnnnnnnnnnnnnnnnnnnnnnnnnnnnnnnnnnnnnnnnnnnnnnnnnnnnnnnnnnnnnnnnnnnnnnnnnnnnnnnnnnnnnnnnnnnnnnnnnnnnnnnnnnnnnnnnnnnnnnnnnnnnnnnnnnnnnnnnnnnnnnnnnnnnnnnnnnnnnnnnnnnnnnnnnnnnnnnnnnnnnnnnnnnnnnnnnnnnnnnnnnnnnnnnnnnnnnnnnnnnnnnnnnnnnnnnnnnnnnnnnnnnnnnnnnnnnnnnnnnnnnnnnnnnnnnnnnnnnnnnnnnnnnnnnnnnnnnnnnnnnnnnnnnnnnnnnnnnnnnnnnnnnnnnnnnnnnnnnnnnnnnnnnnnnnnnnnnnnnnnnnnnnnnnnnnnnnnnnnnnnnnnnnnnnnnnnnnnnnnnnnnnnnnnnnnnnnnnnnnnnnnnnnnnnnnnnnnnnnnnnnnnnnnnnnnnnnnnnnnnnnnnnnnnnnnnnnnnnnnnnnnnnnnnnnnnnnnnnnnnnnnnnnnnnnnnnnnnnnnnnnnnnnnnnnnnnnnnnnnnnnnnnnnnnnnnnnnnnnnnnnnnnnnnnnnnnnnnnnnnnnnnnnnnnnnnnnnnnnnnnnnnnnnnnnnnnnnnnnnnnnnnnnnnnnnnnnnnnnnnnnnnnnnnnnnnnnnnnnnnnnnnnnnnnnnnnnnnnnnnnnnnnnnnnnnnnnnnnnnnnnnnnnnnnnnnnnnnnnnnnnnnnnnnnnnnnnnnnnnnnnnnnnnnnnnnnnnnnnnnnnnnnnnnnnnnnnnnnnnnnnnnnnnnnnnnnnnnnnnnnnnnnnnnnnnnnnnnnnnnnnnnnnnnnnnnnnnnnnnnnnnnnnnnnnnnnnnnnnnnnnnnnnnnnnnnnnnnnnnnnnnnnnnnnnnnnnnnnnnnnnnnnnnnnnnnnnnnnnnnnnnnnnnnnnnnnnnnnnnnnnnnnnnnnnnnnnnnnnnnnnnnnnnnnnnnnnnnnnnnnnnnnnnnnnnnnnnnnnnnnnnnnnnnnnnnnnnnnnnnnnnnnnnnnnnnnnnnnnnnnnnnnnnnnnnnnnnnnnnnnnnnnnnnnnnnnnnnnnnnnnnnnnnnnnnnnnnnnnnnnnnnnnnnnnnnnnnnnnnnnnnnnnnnnnnnnnnnnnnnnnnnnnnnnnnnnnnnnnnnnnnnnnnnnnnnnnnnnnnnnnnnnnnnnnnnnnnnnnnnnnnnnnnnnnnnnnnnnnnnnnnnnnnnnnnnnnnnnnnnnnnnnnnnnnnnnnnnnnnnnnnnnnnnnnnnnnnnnnnnnnnnnnnnnnnnnnnnnnnnnnnnnnnnnnnnnnnnnnnnnnnnnnnnnnnnnnnnnnnnnnnnnnnnnnnnnnnnnnnnnnnnnnnnnnnnnnnnnnnnnnnnnnnnnnnnnnnnnnnnnnnnnnnnnnnnnnnnnnnnnnnnnnnnnnnnnnnnnnnnnnnnnnnnnnnnnnnnnnnnnnnnnnnnnnnnnnnnnnnnnnnnnnnnnnnnnnnnnnnnnnnnnnnnnnnnnnnnnnnnnnnnnnnnnnnnnnnnnnnnnnnnnnnnnnnnnnnnnnnnnnnnnnnnnnnnnnnnnnnnnnnnnnnnnnnnnnnnnnnnnnnnnnnnnnnnnnnnnnnnnnnnnnnnnnnnnnnnnnnnnnnnnnnnnnnnnnnnnnnnnnnnnnnnnnnnnnnnnnnnnnnnnnnnnnnnnnnnnnnnnnnnnnnnnnnnnnnnnnnnnnnnnnnnnnnnnnnnnnnnnnnnnnnnnnnnnnnnnnnnnnnnnnnnnnnnnnnnnnnnnnnnnnnnnnnnnnnnnnnnnnnnnnnnnnnnnnnnnnnnnnnnnnnnnnnnnnnnnnnnnnnnnnnnnnnnnnnnnnnnnnnnnnnnnnnnnnnnnnnnnnnnnnnnnnnnnnnnnnnnnnnnnnnnnnnnnnnnnnnnnnnnnnnnnnnnnnnntacaaagcatctacttcaaatatcatctctattcaaaaacaactgcccccccaaggtaacaagaaagttgatgtccgcacttttaattttgcatctggtgtcgacggaaacatcacttgccgtctgatgggaccaatttcaattgcaccgggtaagtcaataccagtttttataggtgaggcgctacaagaggaattatttcttgctggagcgtatgactcaacttcgaatataaagatctctggaacagttgagcagctatcatttaattctgtttcgcctgccaactgggttattggtttgagagtcttctcaaataaatcagaaggctattcagtttcagttaattatggttttgacacaagttatgacgctcaatcagcttgccagaacgttgctaatgcttttgggcctgcagttcaagagttgttgaaaaaggtaattacaaatccgcaatttcaggacctagtaaagtaaaagcgaactaaggtaaccccccattttggtttgatggtacctacttgtatttacatcgtgttttgcacgagtgcgggggggttattttttgtttttttttttaagcagagtgggtgggtaagtcggcacttatctttgacctctgccttgaagctctttaatgcacccatctaaagcagctgtaccttttttaaacccaatctccatacatttttttcttaaatcatctacagataaagaattgcctgattgactggtctcatcaaactgaatcgtaaaaggaagaggccgtttattgaaggcgccttgcaaagcgtttgcgtatgcttctgagtatgcaacaactttggatgcaaattgtgattttgctgaatcgcttcttattaagtctttatgccacggcgacatttcgtagctagctgaactgtcctgtaggccatatgctatagggttaagcctcaatacaacttgaagatagctaccataaccatcatactgcgtgtaattcataccaaaggttgtgcttggcaaggcaatatcattattaattaagtaagcacgcatacccgcggtcaatctattgccaccggttcctagccaattagaaacatgagaaacatataaacacctttgatcccaaacaccacccccgtaagcgttcttgtgcataacgtcgtttgctttacacagttcattagaatagcgtttgtgaccatagccatattccatgaaatatcccaatcgggaagaaaattgctcctgcaatcagaaaaccccaagctgcattggcaaaacaataaaaaatatggttaaaccaagctgctagacaaactaatccgattagccattgcataattttcttcctattttagttgtctaactgcgtcagcaattgttcgcatatttttagcggcgtcagcgcagctgattttggccgtttttttataggcatctatgccttgaagtgtgaataatgttagattttgactgacccgttcggtatcgctgtcatgcaagcgattcctatatccgtacccaataatctcgttaactgtttcatcagcgagcccatacattggggttaagttgcaagcctttatcacagtcatataagtaaaagaagccatgaatatttgctgaaactcaccttttgacaaaactttattagcttgggataagcccgtggtcatcatgaaaagtaaaacagttatgtttacccattttttcattttcgaaacctctgaattttgggtaagtttatctatttattagactaagcttaccctatccggttcaattacccaaaagcgtttcggtaacttaattactcgaaaacactagtagtctttttttgttgtcacacagctggtgcaaggtctggagttctagggcacaccgttggttgttcgcagacgatatctttgattttttgttcatgcttgagaagattgtttttcttctgatctggtgcgattcgccttaggcagcagtcaggccacatacccctactaacttggtagagctcaccgttgcaacgctcataccaaatcaaccttgccccagtcactttaacttgccacgtgggcctaataccgcactcgctccaactaataagtccctcaaacttcaataccttgactatcagccctaaattttctttttcgccgccatcatcaacaataattgcaaggtcaccgactcttacgtttctcatcacatgctcctgtttagccatttcgacgttgtcgggcatggcaattcggaataactccgccccttaattcaaccttccgtactagtaataaaaaaagccccatcaaggggcttgtagtcgtttagttatctgagcaacttaccagatcacattcgctataagcgtaagcacctttgcctttatgggcgggttgctgtggactttcgtcccctcttaatgttcctaaatattaccactaaaaacgcggtagcccaccctttttattaacgctgtacctatctttgctattgcctcctaagaacgtgcacaaaactcttttgcattctgattttggcgtcaaaaatgtcctacctaaactgaatcgagccctatctcttggcttaagagtgttcaatattgatctgtataagaccgcatctactaactaatcgaacacgatatcggggtaccagtatttgaacgagcgtgactggcacttagggcaacgatgcagtccatgtaacaagctgccacttggaattactggttctacccaacagccaccgcaggaacagtcgccaaggaatgaaagtaacgtctgccactcaccatctcgccagctgtctccttgactaacccaacgctgctgatcacgcttttcgaagtatgctcttaactgttcctcagacaaatctggaacttggttcgactgagtggaaagacctgaaaccagtgagccaaccgcccgactcagtttttttagtggtgttacggcaggctcaggctttgaacgcggggcatagcgagggagcgactttgtttcgccgcaaccatcacaacacacatgaacgaagctaaatcctcctccctgtacgaccttgaattcgtggtcacagtctttacagcgacaatcaaatactgcacccatgtcttattcccccaagttaccttcctgtatcaggcgttaaccattttttcactgtagcgtctaaattgtaagtaccgagtttacggtaactggttttaaagagaaaaaagttagttggtatctcactttacgatacagtagttgactcatacttatttttaactaatggaggtttgtatggcaagcacaactcaacccatcacggtagaacggcaagataagcaagaaaaagtcgtttgtgatgaaataaaaagagcctacgagtttcttgctgaagagggttttaggccgtcatatgaagaagatgacacagttaaatttcgcgtagaaggtgtgactgcaaggttagaccgattagacgctggctatcgaatctacatatgggtgctcggtgagttgccggaggagcagcgtcccgtctcttattggacagctaactatattaatttgacccagccgtttgttcgtgcaggtgttactgaagataactccctaatagtttcttactcaatgatgggttcagatatttcgcagtttcttgagactctaattgatagcgttaatcgtttattatttgcagggcgaaaagcaaatcagttatttaatgatcagttaaaaccaaagcccctcaatagctgatatcgaaatatagtttcattgcatcattactgtcatcggttgtgtttcgttcctttgctttgcattaagtgtttggagagttgaatggagatgtttacgttacgtgcttacctaaacacgccgattattaaacgatggttcatgactcttgatgcattgcttatgtcaattttaggtaaaggggatgtcagtgatcttttgcgctgcgacgaagggctttattttgcgagcgcagggtttccagttgattcggtgtctgataaatttagagcatcttttgtagcaagtcttcgacccgagcacacccccgagtggttagaagtcattaaaaccaatacaaggtctgacgatttacaaatcggtttggctcgccagcgcgatgctggcaacatcatcaatagctacccaactcaagtagcaactgccatcgagtggtatgcaacggggcaaatgcttgatgttttagatgtcgttaaagatattgtggcaatcggtaagcgccgagttgttgggtacggcgaggtcaagttatgggaagctgagcttggtgaaattgacggcttagttggctttgctgatgaacctttacgcccagttccaaccgttcgctggcacttaagtcatgattttgttcctgtagaagctgcttggaaggccccttattgggatgttcgtaatcgaaccaagtgctttgtgccggagattgacttatgaatggccctgaattttttatgcagcatgctggttaccgtttgctccctgaagatgagaaaactgatgacgtagtcaaagatactgatcgtttatttagtattgcattgccgttaaacacgggtaaatttctaagactatcatcgtgttggtttgtggttactgcggattgggtagcaacaagctttaagaccctacccgaggcaggatttcgccacgatatagaccgtaaaacagcaatcgatttggcacttaaggcaggcaagccctgtgtattgcttggactaggtaaacgaaccacgacggcaaatgatatttacgtgacctacgacccaagagccgcacgtttgtgcgagcaaggtaaaaccaaaacttatgacgctacaaaggagaaagcatggacatcatgattgataagccacctcgtgtgcgcgggtacgcacttcaccgaattgtggaacaacttcaaaacggcaagcctgccttgtgggcagatgaagggtcaactgttcgtattaggcctcatgacgcgcaaccacctctgtacgagatcggaaagttattggcattcacgacaactgcatgtgttgcatttagtaagggccacaagcatgtctatctcccaacatctgattggcgagggcgaagggtatggctagataaacaagcagccaaacatggttttgaggttgttggcgtccacatctctgggggcatgcaaaaaattgaaacccataatggccgaaagttcaccattgatgccactgagtttaccgggcttctgcgcgtaagcgattcgactttattcggtcagtgtttgataaatggagtcggcaaagttggcaaggcatttggtttgaatttgatgatcgttcaataaaacaaaaaaaggcacatgaaatgactaaccagaaaatgaaaatagttgcacaaatcagcttgcattcagtacaaccgctaacgtttactcatcatagtgttgacgggttaccgcttttggcaagaggcatcgatcaagaggggcgccaccttcgcacggtctacatacctgcagcgcaatttagaggtcgagttcggcacgaagcggcgttgagtcagatgcgctctgagagcggcaaggtgaagcttgaagaagcctatatgctagcccttggccaagacctacgcccagcggaagatgacgctccagaacaagtcaggctcaaagagcagattgcggtccgtaaagaaaaccccttattggacttatttggcacatggaagttggctagtcgtttgtatgtctctcacttcatgccagaggtcaatgttctacccgcaaaaatcagccatataagaagggacctagacacgaacgaagatatgatggatgcgctgggttctgatgagcaagaccgtatgtacgatcgtcagagtaaacaaggtatggcctcacaagttggtcaattaattaagcttgccacgcgtgaactaatggctgcaaagaaagcaaaagatgtaaccaaggttgacgaaatagaagccaaaatcttagagttaaaagaacttaaaaaaacgcaaaagggtgatgacgattccgaaaataccaaacatttagttgaacttgagttcatacccgcaggtatcactctgaatggaaaattaactgtaaattcagccatacccaacgacttacgtgtgttagtggatgctttagtggggtttggcgaaaaaccttaccttggcgctcaacgtgctcgtggttgtggggaagttgcacttgaagcaacatttaagaatgcagatggtgatgtactcgctacggtagcctttgctgagggcgagggttctaatgttcaatggactgaggcagggactacttttttaaatgctgaaacaactaccacatgatttaccgcagccctgaacagacacaatatgcgaaattaattgagggtgctattaaaccgggggcaccacttctggcaggagcagcagcaggtctgggtaaaacgcacggctttagcattcctctaattgcttcacgaaaacgcattgcgatttgtttaagtactcggcagttgattgatcagtatttaaaaagtgatgcgttgcaggtggcttgcggtggaagatccgtttcggttgtggcgttgcaatcaaggcgagactttacacgtgactcagattatcgctcacacaagaagcaggcgttagaagccgagttattaattaccacccatgcggcagcctttattgacagtttcaatccagagtatgcacagcttcgtagtcgtgatgttgtgctgtttgatgaggctgatttattagctgacgctgctgacctgagaagcacatttagtatttcggctgaagcacttaaagattgtggcgctatgttaggtaatgcgttgagtgcggctaaattagttaaggcaaatgccgttgacgcagaagaccgtggtgctgccagttctatcctatatgccttagagaacccagcttggtacaaagtagttggatatgaggaggatggcgctttaactttaaaacatcgtttgccgggcagaatgcttaagcggcttgtggcagatgtaccacgctgtatttttacaagcggaacacttcaggtatctgggcggtttgattactttgttaaagcacttgggctcacagctatagcaccagagagtaggcacattgatccagtcatgcacggcagcctagatgttcaagttgcatctgatgaaatgtctattaatgaaatggctgaaaagattaaagctgcgaagcggccaacattggttcttacaacaagccacaaaacaacatttgagttgggtcaattactaccagaggccactattagagagtccggagaacctttgactgatgcggttgcgcggtgccccgatgacggcattctaatcgcagcaggtgcttggtctgggctagatgcgccaaggttacgatggaaaacattagtgattccaaaaacaccttatggtgtaagaaacgttttagatggtcatgatgtcgggcgttatatcgatagtaaggttgttgctattcgtcgaactaatcagggactgcatcgtgggcttagaacgcccgacgctcaatgcactttactgctactagacccgcgcagtagtaggtcagaactaagagaggcaataccgtcaaggtttaaagttgattgggttggcttcgaagaggggggccgtgaacttgttgagcacatgaaagctgaacgaaatgaaagccttcgtaaagctgcgctaaagcattatggtgagcaatgcatgtgggtgggctgtacggtgacattacctcacctgctcgatgtgcatcactgcaaccctatttcacttgggcaacgacgaacaacgatgtcagatgttaaagttttatgtaaaaatcatcatgctgaggagcatcataggatgcgaatgagcagtttagatgctctagacaatgatttaaatcaaatagaatcaaagggttgaagaatatcagggtcaagctgccatgtaaatgagcagttactagaacttaattaaccgatggtaaatactgttattgggtcaagctgccatgtaaatgagcagttactagaacttgacaaacaacagtgttacagctcaatacggtcaagctgccatgtaaatgagcagttactagatcgacaaacgaaatataaataacattttcagtgtacgtttgatatgcaccttgtagtggagtgtaaagtggaccctttcatcaagacaaaaggtgtaggtttttaagctgtaatcttttactgacctgcagcggttcggcgctgccccgttcgtgctttttctttaatccgtt

SEQ ID NO: 217 - DNA, 11915 bp, Artificial Sequence
  Synthetic Oligonucleotide
  misc_feature (1)..(6521): n is a, c, g, or t
nnnnnnnnnnnnnnnnnnnnnnnnnnnnnnnnnnnnnnnnnnnnnnnnnnnnnnnnnnnnnnnnnnnnnnnnnnnnnnnnnnnnnnnnnnnnnnnnnnnnnnnnnnnnnnnnnnnnnnnnnnnnnnnnnnnnnnnnnnnnnnnnnnnnnnnnnnnnnnnnnnnnnnnnnnnnnnnnnnnnnnnnnnnnnnnnnnnnnnnnnnnnnnnnnnnnnnnnnnnnnnnnnnnnnnnnnnnnnnnnnnnnnnnnnnnnnnnnnnnnnnnnnnnnnnnnnnnnnnnnnnnnnnnnnnnnnnnnnnnnnnnnnnnnnnnnnnnnnnnnnnnnnnnnnnnnnnnnnnnnnnnnnnnnnnnnnnnnnnnnnnnnnnnnnnnnnnnnnnnnnnnnnnnnnnnnnnnnnnnnnnnnnnnnnnnnnnnnnnnnnnnnnnnnnnnnnnnnnnnnnnnnnnnnnnnnnnnnnnnnnnnnnnnnnnnnnnnnnnnnnnnnnnnnnnnnnnnnnnnnnnnnnnnnnnnnnnnnnnnnnnnnnnnnnnnnnnnnnnnnnnnnnnnnnnnnnnnnnnnnnnnnnnnnnnnnnnnnnnnnnnnnnnnnnnnnnnnnnnnnnnnnnnnnnnnnnnnnnnnnnnnnnnnnnnnnnnnnnnnnnnnnnnnnnnnnnnnnnnnnnnnnnnnnnnnnnnnnnnnnnnnnnnnnnnnnnnnnnnnnnnnnnnnnnnnnnnnnnnnnnnnnnnnnnnnnnnnnnnnnnnnnnnnnnnnnnnnnnnnnnnnnnnnnnnnnnnnnnnnnnnnnnnnnnnnnnnnnnnnnnnnnnnnnnnnnnnnnnnnnnnnnnnnnnnnnnnnnnnnnnnnnnnnnnnnnnnnnnnnnnnnnnnnnnnnnnnnnnnnnnnnnnnnnnnnnnnnnnnnnnnnnnnnnnnnnnnnnnnnnnnnnnnnnnnnnnnnnnnnnnnnnnnnnnnnnnnnnnnnnnnnnnnnnnnnnnnnnnnnnnnnnnnnnnnnnnnnnnnnnnnnnnnnnnnnnnnnnnnnnnnnnnnnnnnnnnnnnnnnnnnnnnnnnnnnnnnnnnnnnnnnnnnnnnnnnnnnnnnnnnnnnnnnnnnnnnnnnnnnnnnnnnnnnnnnnnnnnnnnnnnnnnnnnnnnnnnnnnnnnnnnnnnnnnnnnnnnnnnnnnnnnnnnnnnnnnnnnnnnnnnnnnnnnnnnnnnnnnnnnnnnnnnnnnnnnnnnnnnnnnnnnnnnnnnnnnnnnnnnnnnnnnnnnnnnnnnnnnnnnnnnnnnnnnnnnnnnnnnnnnnnnnnnnnnnnnnnnnnnnnnnnnnnnnnnnnnnnnnnnnnnnnnnnnnnnnnnnnnnnnnnnnnnnnnnnnnnnnnnnnnnnnnnnnnnnnnnnnnnnnnnnnnnnnnnnnnnnnnnnnnnnnnnnnnnnnnnnnnnnnnnnnnnnnnnnnnnnnnnnnnnnnnnnnnnnnnnnnnnnnnnnnnnnnnnnnnnnnnnnnnnnnnnnnnnnnnnnnnnnnnnnnnnnnnnnnnnnnnnnnnnnnnnnnnnnnnnnnnnnnnnnnnnnnnnnnnnnnnnnnnnnnnnnnnnnnnnnnnnnnnnnnnnnnnnnnnnnnnnnnnnnnnnnnnnnnnnnnnnnnnnnnnnnnnnnnnnnnnnnnnnnnnnnnnnnnnnnnnnnnnnnnnnnnnnnnnnnnnnnnnnnnnnnnnnnnnnnnnnnnnnnnnnnnnnnnnnnnnnnnnnnnnnnnnnnnnnnnnnnnnnnnnnnnnnnnnnnnnnnnnnnnnnnnnnnnnnnnnnnnnnnnnnnnnnnnnnnnnnnnnnnnnnnnnnnnnnnnnnnnnnnnnnnnnnnnnnnnnnnnnnnnnnnnnnnnnnnnnnnnnnnnnnnnnnnnnnnnnnnnnnnnnnnnnnnnnnnnnnnnnnnnnnnnnnnnnnnnnnnnnnnnnnnnnnnnnnnnnnnnnnnnnnnnnnnnnnnnnnnnnnnnnnnnnnnnnnnnnnnnnnnnnnnnnnnnnnnnnnnnnnnnnnnnnnnnnnnnnnnnnnnnnnnnnnnnnnnnnnnnnnnnnnnnnnnnnnnnnnnnnnnnnnnnnnnnnnnnnnnnnnnnnnnnnnnnnnnnnnnnnnnnnnnnnnnnnnnnnnnnnnnnnnnnnnnnnnnnnnnnnnnnnnnnnnnnnnnnnnnnnnnnnnnnnnnnnnnnnnnnnnnnnnnnnnnnnnnnnnnnnnnnnnnnnnnnnnnnnnnnnnnnnnnnnnnnnnnnnnnnnnnnnnnnnnnnnnnnnnnnnnnnnnnnnnnnnnnnnnnnnnnnnnnnnnnnnnnnnnnnnnnnnnnnnnnnnnnnnnnnnnnnnnnnnnnnnnnnnnnnnnnnnnnnnnnnnnnnnnnnnnnnnnnnnnnnnnnnnnnnnnnnnnnnnnnnnnnnnnnnnnnnnnnnnnnnnnnnnnnnnnnnnnnnnnnnnnnnnnnnnnnnnnnnnnnnnnnnnnnnnnnnnnnnnnnnnnnnnnnnnnnnnnnnnnnnnnnnnnnnnnnnnnnnnnnnnnnnnnnnnnnnnnnnnnnnnnnnnnnnnnnnnnnnnnnnnnnnnnnnnnnnnnnnnnnnnnnnnnnnnnnnnnnnnnnnnnnnnnnnnnnnnnnnnnnnnnnnnnnnnnnnnnnnnnnnnnnnnnnnnnnnnnnnnnnnnnnnnnnnnnnnnnnnnnnnnnnnnnnnnnnnnnnnnnnnnnnnnnnnnnnnnnnnnnnnnnnnnnnnnnnnnnnnnnnnnnnnnnnnnnnnnnnnnnnnnnnnnnnnnnnnnnnnnnnnnnnnnnnnnnnnnnnnnnnnnnnnnnnnnnnnnnnnnnnnnnnnnnnnnnnnnnnnnnnnnnnnnnnnnnnnnnnnnnnnnnnnnnnnnnnnnnnnnnnnnnnnnnnnnnnnnnnnnnnnnnnnnnnnnnnnnnnnnnnnnnnnnnnnnnnnnnnnnnnnnnnnnnnnnnnnnnnnnnnnnnnnnnnnnnnnnnnnnnnnnnnnnnnnnnnnnnnnnnnnnnnnnnnnnnnnnnnnnnnnnnnnnnnnnnnnnnnnnnnnnnnnnnnnnnnnnnnnnnnnnnnnnnnnnnnnnnnnnnnnnnnnnnnnnnnnnnnnnnnnnnnnnnnnnnnnnnnnnnnnnnnnnnnnnnnnnnnnnnnnnnnnnnnnnnnnnnnnnnnnnnnnnnnnnnnnnnnnnnnnnnnnnnnnnnnnnnnnnnnnnnnnnnnnnnnnnnnnnnnnnnnnnnnnnnnnnnnnnnnnnnnnnnnnnnnnnnnnnnnnnnnnnnnnnnnnnnnnnnnnnnnnnnnnnnnnnnnnnnnnnnnnnnnnnnnnnnnnnnnnnnnnnnnnnnnnnnnnnnnnnnnnnnnnnnnnnnnnnnnnnnnnnnnnnnnnnnnnnnnnnnnnnnnnnnnnnnnnnnnnnnnnnnnnnnnnnnnnnnnnnnnnnnnnnnnnnnnnnnnnnnnnnnnnnnnnnnnnnnnnnnnnnnnnnnnnnnnnnnnnnnnnnnnnnnnnnnnnnnnnnnnnnnnnnnnnnnnnnnnnnnnnnnnnnnnnnnnnnnnnnnnnnnnnnnnnnnnnnnnnnnnnnnnnnnnnnnnnnnnnnnnnnnnnnnnnnnnnnnnnnnnnnnnnnnnnnnnnnnnnnnnnnnnnnnnnnnnnnnnnnnnnnnnnnnnnnnnnnnnnnnnnnnnnnnnnnnnnnnnnnnnnnnnnnnnnnnnnnnnnnnnnnnnnnnnnnnnnnnnnnnnnnnnnnnnnnnnnnnnnnnnnnnnnnnnnnnnnnnnnnnnnnnnnnnnnnnnnnnnnnnnnnnnnnnnnnnnnnnnnnnnnnnnnnnnnnnnnnnnnnnnnnnnnnnnnnnnnnnnnnnnnnnnnnnnnnnnnnnnnnnnnnnnnnnnnnnnnnnnnnnnnnnnnnnnnnnnnnnnnnnnnnnnnnnnnnnnnnnnnnnnnnnnnnnnnnnnnnnnnnnnnnnnnnnnnnnnnnnnnnnnnnnnnnnnnnnnnnnnnnnnnnnnnnnnnnnnnnnnnnnnnnnnnnnnnnnnnnnnnnnnnnnnnnnnnnnnnnnnnnnnnnnnnnnnnnnnnnnnnnnnnnnnnnnnnnnnnnnnnnnnnnnnnnnnnnnnnnnnnnnnnnnnnnnnnnnnnnnnnnnnnnnnnnnnnnnnnnnnnnnnnnnnnnnnnnnnnnnnnnnnnnnnnnnnnnnnnnnnnnnnnnnnnnnnnnnnnnnnnnnnnnnnnnnnnnnnnnnnnnnnnnnnnnnnnnnnnnnnnnnnnnnnnnnnnnnnnnnnnnnnnnnnnnnnnnnnnnnnnnnnnnnnnnnnnnnnnnnnnnnnnnnnnnnnnnnnnnnnnnnnnnnnnnnnnnnnnnnnnnnnnnnnnnnnnnnnnnnnnnnnnnnnnnnnnnnnnnnnnnnnnnnnnnnnnnnnnnnnnnnnnnnnnnnnnnnnnnnnnnnnnnnnnnnnnnnnnnnnnnnnnnnnnnnnnnnnnnnnnnnnnnnnnnnnnnnnnnnnnnnnnnnnnnnnnnnnnnnnnnnnnnnnnnnnnnnnnnnnnnnnnnnnnnnnnnnnnnnnnnnnnnnnnnnnnnnnnnnnnnnnnnnnnnnnnnnnnnnnnnnnnnnnnnnnnnnnnnnnnnnnnnnnnnnnnnnnnnnnnnnnnnnnnnnnnnnnnnnnnnnnnnnnnnnnnnnnnnnnnnnnnnnnnnnnnnnnnnnnnnnnnnnnnnnnnnnnnnnnnnnnnnnnnnnnnnnnnnnnnnnnnnnnnnnnnnnnnnnnnnnnnnnnnnnnnnnnnnnnnnnnnnnnnnnnnnnnnnnnnnnnnnnnnnnnnnnnnnnnnnnnnnnnnnnnnnnnnnnnnnnnnnnnnnnnnnnnnnnnnnnnnnnnnnnnnnnnnnnnnnnnnnnnnnnnnnnnnnnnnnnnnnnnnnnnnnnnnnnnnnnnnnnnnnnnnnnnnnnnnnnnnnnnnnnnnnnnnnnnnnnnnnnnnnnnnnnnnnnnnnnnnnnnnnnnnnnnnnnnnnnnnnnnnnnnnnnnnnnnnnnnnnnnnnnnnnnnnnnnnnnnnnnnnnnnnnnnnnnnnnnnnnnnnnnnnnnnnnnnnnnnnnnnnnnnnnnnnnnnnnnnnnnnnnnnnnnnnnnnnnnnnnnnnnnnnnnnnnnnnnnnnnnnnnnnnnnnnnnnnnnnnnnnnnnnnnnnnnnnnnnnnnnnnnnnnnnnnnnnnnnnnnnnnnnnnnnnnnnnnnnnnnnnnnnnnnnnnnnnnnnnnnnnnnnnnnnnnnnnnnnnnnnnnnnnnnnnnnnnnnnnnnnnnnnnnnnnnnnnnnnnnnnnnnnnnnnnnnnnnnnnnnnnnnnnnnnnnnnnnnnnnnnnnnnnnnnnnnnnnnnnnnnnnnnnnnnnnnnnnnnnnnnnnnnnnnnnnnnnnnnnnnnnnnnnnnnnnnnnnnnnnnnnnnnnnnnnnnnnnnnnnnnnnnnnnnnnnnnnnnnnnnnnnnnnnnnnnnnnnnnnnnnnnnnnnnnnnnnnnnnnnnnnnnnnnnnnnnnnnnnnnnnnnnnnnnnnnnnnnnnnnnnnnnnnnnnnnnnnnnnnnnnnnnnnnnnnnnnnnnnnnnnnnnnnnnnnnnnnnnnnnnnnnnnnnnnnnnnnnnnnnnnnnnnnnnnnnnnnnnnnnnnnnnnnnnnnnnnnnnnnnnnnnnnnnnnnnnnnnnnnnnnnnnnnnnnnnnnnnnnnnnnnnnnnnnnnnnnnnnnnnnnnnnnnnnnnnnnnnnnnnnnnnnnnnnnnnnnnnnnnnnnnnnnnnnnnnnnnnnnnnnnnnnnnnnnnnnnnnnnnnnnnnnnnnnnnnnnnnnnnnnnnnnnnnnnnnnnnnnnnnnnnnnnnnnnnnnnnnnnnnnnnnnnnnnnnnnnnnnnnnnnnnnnnnnnnnnnnnnnnnnnnnnnnnnnnnnnnnnnnnnnnnnnnnnnnnnnnnnnnnnnnnnnnnnnnnnnnnnnnnnnnnnnnnnnnnnnnnnnnnnnnnnnnnnnnnnnnnnnnnnnnnnnnnnnnnnnnnnnnnnnnnnnnnnnnnnnnnnnnnnnnnnnnnnnnnnnnnnnnnnnnnnnnnnnnnnnnnnnnnnnnnnnnnnnnnnnnnnnnnnnnnnnnnnnnnnnnnnnnnnnnnnnnnnnnnnnnnnnnnnnnnnnnnnnnnnnnnnnnnnnnnnnnnnnnnnnnnnnnnnnnnnnnnnnnnnnnnnnnnnnnnnnnnnnnnnnnnnnnnnnnnnnnnnnnnnnnnnnnnnnnnnnnnnnnnnnnnnnnnnnnnnnnnnnnnnnnnnnnnnnnnnnnnnnnnnnnnnnnnnnnnnnnnnnnnnnnnnnnnnnnnnnnnnnnnnnnnnnnnnnnnnnnnnnnnnnnnnnnnnnnnnnnnnnnnnnnnnnnnnnnnnnnnnnnnnnnnnnnnnnnnnnnnnnnnnnnnnnnnnnnnnnnnnnnnnnnnnnnnnnnnnnnnnnnnnnnnnnnnnnnnnnnnnnnnnnnnnnnnnnnnnnnnnnnnnnnnnnnnnnnnnnnnnnnnnnnnnnnnnnnnnnnnnnnnnnnnnnnnnnnntggtgtcaaaataacggtcattcagattcctgtagcaatgtgatcttcagtagtagactacaggaacgtgggtattccaaaagaagaaagagctctggttacgtctatatggatataatcattcaagacgtcttaaagttaacgacggacttttagtatccatagtgcagggagtgcatggagtgtacacttttgttgatcatattaactatgtaattaaccatagtaactatcgattaaagtatacacaccctgcacccctgcacccgcgcaccacaggatatacacggatgagtatgtcgataattgtctgatgcttgtgatgtcagcctcgaaggagcttgtacgacggaaagaaatacgcaacgatatctcatcatcggtctaatgcacttgcctacgagaacgtatggaaaagctagagattacagctaccatgaaaggaccggttataatcggtggtggctatatgacattagatgcaattctaggcgccattctgtttgatcagcttgggtctcccgaagaagcgcacgacgccatcccgatagaaagacaagccggtctgttcaaagctagtgcagctatgctagagccaacaagcaatcagaacgttgctttcgtagccaatttacgagcagcccattcgcttaatccagaccttctcaaaaaaaacaaagcaggcggtgtgcacgccaaagtaggcctaacccgacgccgctcttttggggctgtcttaaataattacacctccttcgatgtgcccgagatcacctggtacgccaaaggcgatggcggagcgatctctgaccttttgagtgatctaacattcattggaaagcgacgaggcagtggttttggcgaggttaagagctggtctgttgagccgggaagcttagatggcgtcgttggtcattttggagaacccttaagacctgtgcccgaacagatgttcgacggtgaccaaagctctctgaaagtcgacgcagcctggcgcccgccatattggcacccagagaaccgagcaatatgctttgctccggatctagtccgatgaatacattccagtttttcaatgaaaattttgggtgctttctcgttaagcaaaccaacgtccctcatatggatgcgtcagaggcattgtctaaaaaccaccccctccagaaaggcggtcagaaccgcatagtttctggctgggcgatcattcgtcccaccggcgccgtaatgcaacagaagcttgcagtagacggaatcacatatgacgatagaaatcgctatgaagcctttggtgacgaattggcgaattgggatggatcaccgcggatattcctcgaattcgataaaaagccaataccgattgcgaatgtctttatgactgtagatttacgatccgtcaggatttgtagtccgaaaggtactgcaacctttgactacacccgcgcgctcgatcaaacctcgcacccgtttcataagagcatcgaaagagtgaagaaaaagcatgctgcttgatcactcaatatcaaagcctgcaagcgtccaaggctacgacgttcatcggatggtcagtggcctgaccaaggatgaaaaaactttgttcgcggatcttggtgaacgcatattgatacgctgtgagagcccaatcacatctgacggtgccccgcttagacacgtagaccggggcgatgtcatcgggtttgaacttcgtgcctgtgtctcaaaaaaaaataatggaaaacacgtttattttcctgaggccgattggcgtcgaaggcacgaatggcttcgtcaaaaaggtacaaaacacggattcagtccgctgacactgcattgtaaagccagtcgcgcaaaacttgataacggtcgaggaaacatcttcacagtcgaccaaaccgactttgtcggagtgctccgggttaccgacaaagaattgtttgagaacgttctagccaaaggaattggatcaacagccaaaacctacgggttcggcatgttaattatttagagacaggggaatgctgtgaataatatcattatcaacgggacaataacgactgtcggaccgctctcaatctcaatgccagaagtagacgaccccgataccggtggtttcccgatgatggcacgaggtgttgatcaagatggaaacaaacaccggacgggataccttcccggcacaacggtgagagggtttttaaggcgggcagttgtcaccaggtcgatgcaagcagcatcagaagcaggcgaaccttattcgcttactcgcgcatactcagagcttatcggtcaagacagcgccagtgagaaacaagcaggtgaaatcgacctggcagaagttaagaaggcgagagaaggctctcctataatagatctatttggaagcggtctcggcgtagcaagtaggctacgtgtcgggcactttgtccccaccgcaaacgtcgtgccagacttttaccgaggtgttcggaaagacctgggagacacggaaggggtagtcgagctgctatccgataaagacattcaagcctactatgcccgctcagaatcgaatagtcggcgtgggcctgctgaaacacttgtgaagtccctaaagcagaaagttcgagccgcaaagaacaaaaacgaagacgctggtgagctcaaaaaagaactggaagaggcggagaagctgctcgctaaacatgtcgcaggcatgggtgacatgaagaactcaagcaagacgcctggcattagttatcacgctcttcccgcctcactcgagctaaatggtcgcatcgtcattctaaatgcaaaagatcgggacttagagatgttggaatatgcgctagaccaactaagtctcaacccggtcttcggtgctcaatcagcaagaggctgcggtgaaatcagtgggaccttcgacattaatatcgaaggaaaattcgcaaaaaaaatgacaattggtggctatgaagcagccaaagtcacagttttttgaaggtagaaacacctatttcagcaatttcttcaatgcattatgcgatatctactgaagccactcccgattcgagtggttactgaaacaatcgactatcaagaaaagaactatagcggactgaagccactcccgattcgagtggttactgaaaccgagccttcgatgctttcagtgctgcctttactgaagccactcccgattcgagtggttactgaaacccaaaaggctcaacagagatcggctggggtactgaagccactcccgattcgagtggttactgaaacgtggcacctgtgtcgccgcgaggaactgtgactgaagccactcccgattcgagtggttactgaaacgtgtagagcatgtagagctggtgctgcgcactgaagccactcccgattcgagtggttactgcaacttacttccgggaaataaagaacccggtcgatctaaagccacactaattcgtgtgtggttcctttgtgtaaatagtgcaagaattattttatgttccgttcccacgaacaagaaaatttttataaaatcatcgcggcgcacctcgaggtctgcgatgcgccactgctgctcgaagggggaaccggcctcggtaaaaccagggcctacctagcggcagtcgcgaagaccgataaaaccgtcgcaatcattttaccgacgcatctattgatcaatcagcttgtcgcctcaaaggaccttgaaaacgttgggcttgaggtcacggctttcagaccatcgcgtgattttgagactagggctgactatgtggctcatagaacggcctctatggccggacgcgtgatgctttgcacagcagccagcgtaatcatcgatcagcgcctcgctgggaactacaacggtgttatcaatcgagagctgttggtctttgatgaggctgacgagcttcccgccgccgccgcgctgcagcaagaccaagaagtcacggctagtgcccttcgcgatgccaacgtgaaactgtcgactgcagaagacaccttacgaaaactccttaaaaaaaagaggctcgaaccagaaacccgagcggccgccttgatggctctcgaggccatcgaagagcctgcttggttttatcaaaccgggataaataaagatggcggcatatccctttgtcaccgattacctggcaggctccttaaacgaatagccaacaaaggaaactccatattcattagcgcgaccctatcggtcgctggaagcttcaaaaattttcaaggaagcatggggatagacgcaatcagtagcctgtcgtcgatgatagagcctgaacaccacgggactatcgaactccatacgccactcgacgaagagcctgcggaggtcatccatagagctacgaagccctgtctcgttgtgacccccagcttcgagttggccgaaacaatcggcaaacagatacccaacgccactgtaagattacaaactgagaccactactgaggcggcgcaacgaataggccctgatggtgtgttgattgcggcaggggcttgggctggtttggatactccgacagtttgggcatcaatcgtcgttccgaaaattccgttttccgccccaactgtgctcgacgggaaaatcgaaagccaatacctcgatagtcggaacgttgcgatcaggcggatgcgtcaggtgataggcagaggcctgaggacaccggatgcgaaatgccaggtgtacattcttgatggtcgttacaaggccttaggcgctttcgtacctgaacgctttcaggagtcctggatcgagggtgacattcaagtctatttacaggctgaagcaaaacggatgcgagggtatcggaagaaggctctagagcattacgggagcagttgcttcgtgtgttcttttgagccgaaagtactccgccaaatacacatacatcacttggaaccaattgctgagggtgtcaggacgacgactctagaggatctgcggccactttgtgccaattgtcatgagcttgcgcatagcgagagccccccaatcacaatcgaacgcctaaaggggatggagggcccataagacaaatgccacccgtgcctaaattctgccgcatctaacgattattaagaataagaagatgggtagggagaatatgagatggcgagtagtggcattatgtggatcgattacacattcaatttagcagtgcagcttttgtatgtttgcgcagaaattctcggcataacctacgaagaaattaacgtctggctttttgtcataggctggccgctgcaaactataatcatgggtgccgtaataatatgcctctggctcaaattaaatcgtcaagaagatcatcaggttcaaaaatagccacagatttacggctagtcatttggaaccacaaagccgctattccccccgctacccccggttaacgaggagcc

SEQ ID NO: 218 - DNA, 11915 bp, Artificial Sequence; identical to SEQ ID NO: 217
  Synthetic Oligonucleotide
  misc_feature (1)..(6521): n is a, c, g, or t

SEQ ID NO: 219 - DNA, 11910 bp, Artificial Sequence
  Synthetic Oligonucleotide
  misc_feature (1)..(7940): n is a, c, g, or t
nnnnnnnnnnnnnnnnnnnnnnnnnnnnnnnnnnnnnnnnnnnnnnnnnnnnnnnnnnnnnnnnnnnnnnnnnnnnnnnnnnnnnnnnnnnnnnnnnnnnnnnnnnnnnnnnnnnnnnnnnnnnnnnnnnnnnnnnnnnnnnnnnnnnnnnnnnnnnnnnnnnnnnnnnnnnnnnnnnnnnnnnnnnnnnnnnnnnnnnnnnnnnnnnnnnnnnnnnnnnnnnnnnnnnnnnnnnnnnnnnnnnnnnnnnnnnnnnnnnnnnnnnnnnnnnnnnnnnnnnnnnnnnnnnnnnnnnnnnnnnnnnnnnnnnnnnnnnnnnnnnnnnnnnnnnnnnnnnnnnnnnnnnnnnnnnnnnnnnnnnnnnnnnnnnnnnnnnnnnnnnnnnnnnnnnnnnnnnnnnnnnnnnnnnnnnnnnnnnnnnnnnnnnnnnnnnnnnnnnnnnnnnnnnnnnnnnnnnnnnnnnnnnnnnnnnnnnnnnnnnnnnnnnnnnnnnnnnnnnnnnnnnnnnnnnnnnnnnnnnnnnnnnnnnnnnnnnnnnnnnnnnnnnnnnnnnnnnnnnnnnnnnnnnnnnnnnnnnnnnnnnnnnnnnnnnnnnnnnnnnnnnnnnnnnnnnnnnnnnnnnnnnnnnnnnnnnnnnnnnnnnnnnnnnnnnnnnnnnnnnnnnnnnnnnnnnnnnnnnnnnnnnnnnnnnnnnnnnnnnnnnnnnnnnnnnnnnnnnnnnnnnnnnnnnnnnnnnnnnnnnnnnnnnnnnnnnnnnnnnnnnnnnnnnnnnnnnnnnnnnnnnnnnnnnnnnnnnnnnnnnnnnnnnnnnnnnnnnnnnnnnnnnnnnnnnnnnnnnnnnnnnnnnnnnnnnnnnnnnnnnnnnnnnnnnnnnnnnnnnnnnnnnnnnnnnnnnnnnnnnnnnnnnnnnnnnnnnnnnnnnnnnnnnnnnnnnnnnnnnnnnnnnnnnnnnnnnnnnnnnnnnnnnnnnnnnnnnnnnnnnnnnnnnnnnnnnnnnnnnnnnnnnnnnnnnnnnnnnnnnnnnnnnnnnnnnnnnnnnnnnnnnnnnnnnnnnnnnnnnnnnnnnnnnnnnnnnnnnnnnnnnnnnnnnnnnnnnnnnnnnnnnnnnnnnnnnnnnnnnnnnnnnnnnnnnnnnnnnnnnnnnnnnnnnnnnnnnnnnnnnnnnnnnnnnnnnnnnnnnnnnnnnnnnnnnnnnnnnnnnnnnnnnnnnnnnnnnnnnnnnnnnnnnnnnnnnnnnnnnnnnnnnnnnnnnnnnnnnnnnnnnnnnnnnnnnnnnnnnnnnnnnnnnnnnnnnnnnnnnnnnnnnnnnnnnnnnnnnnnnnnnnnnnnnnnnnnnnnnnnnnnnnnnnnnnnnnnnnnnnnnnnnnnnnnnnnnnnnnnnnnnnnnnnnnnnnnnnnnnnnnnnnnnnnnnnnnnnnnnnnnnnnnnnnnnnnnnnnnnnnnnnnnnnnnnnnnnnnnnnnnnnnnnnnnnnnnnnnnnnnnnnnnnnnnnnnnnnnnnnnnnnnnnnnnnnnnnnnnnnnnnnnnnnnnnnnnnnnnnnnnnnnnnnnnnnnnnnnnnnnnnnnnnnnnnnnnnnnnnnnnnnnnnnnnnnnnnnnnnnnnnnnnnnnnnnnnnnnnnnnnnnnnnnnnnnnnnnnnnnnnnnnnnnnnnnnnnnnnnnnnnnnnnnnnnnnnnnnnnnnnnnnnnnnnnnnnnnnnnnnnnnnnnnnnnnnnnnnnnnnnnnnnnnnnnnnnnnnnnnnnnnnnnnnnnnnnnnnnnnnnnnnnnnnnnnnnnnnnnnnnnnnnnnnnnnnnnnnnnnnnnnnnnnnnnnnnnnnnnnnnnnnnnnnnnnnnnnnnnnnnnnnnnnnnnnnnnnnnnnnnnnnnnnnnnnnnnnnnnnnnnnnnnnnnnnnnnnnnnnnnnnnnnnnnnnnnnnnnnnnnnnnnnnnnnnnnnnnnnnnnnnnnnnnnnnnnnnnnnnnnnnnnnnnnnnnnnnnnnnnnnnnnnnnnnnnnnnnnnnnnnnnnnnnnnnnnnnnnnnnnnnnnnnnnnnnnnnnnnnnnnnnnnnnnnnnnnnnnnnnnnnnnnnnnnnnnnnnnnnnnnnnnnnnnnnnnnnnnnnnnnnnnnnnnnnnnnnnnnnnnnnnnnnnnnnnnnnnnnnnnnnnnnnnnnnnnnnnnnnnnnnnnnnnnnnnnnnnnnnnnnnnnnnnnnnnnnnnnnnnnnnnnnnnnnnnnnnnnnnnnnnnnnnnnnnnnnnnnnnnnnnnnnnnnnnnnnnnnnnnnnnnnnnnnnnnnnnnnnnnnnnnnnnnnnnnnnnnnnnnnnnnnnnnnnnnnnnnnnnnnnnnnnnnnnnnnnnnnnnnnnnnnnnnnnnnnnnnnnnnnnnnnnnnnnnnnnnnnnnnnnnnnnnnnnnnnnnnnnnnnnnnnnnnnnnnnnnnnnnnnnnnnnnnnnnnnnnnnnnnnnnnnnnnnnnnnnnnnnnnnnnnnnnnnnnnnnnnnnnnnnnnnnnnnnnnnnnnnnnnnnnnnnnnnnnnnnnnnnnnnnnnnnnnnnnnnnnnnnnnnnnnnnnnnnnnnnnnnnnnnnnnnnnnnnnnnnnnnnnnnnnnnnnnnnnnnnnnnnnnnnnnnnnnnnnnnnnnnnnnnnnnnnnnnnnnnnnnnnnnnnnnnnnnnnnnnnnnnnnnnnnnnnnnnnnnnnnnnnnnnnnnnnnnnnnnnnnnnnnnnnnnnnnnnnnnnnnnnnnnnnnnnnnnnnnnnnnnnnnnnnnnnnnnnnnnnnnnnnnnnnnnnnnnnnnnnnnnnnnnnnnnnnnnnnnnnnnnnnnnnnnnnnnnnnnnnnnnnnnnnnnnnnnnnnnnnnnnnnnnnnnnnnnnnnnnnnnnnnnnnnnnnnnnnnnnnnnnnnnnnnnnnnnnnnnnnnnnnnnnnnnnnnnnnnnnnnnnnnnnnnnnnnnnnnnnnnnnnnnnnnnnnnnnnnnnnnnnnnnnnnnnnnnnnnnnnnnnnnnnnnnnnnnnnnnnnnnnnnnnnnnnnnnnnnnnnnnnnnnnnnnnnnnnnnnnnnnnnnnnnnnnnnnnnnnnnnnnnnnnnnnnnnnnnnnnnnnnnnnnnnnnnnnnnnnnnnnnnnnnnnnnnnnnnnnnnnnnnnnnnnnnnnnnnnnnnnnnnnnnnnnnnnnnnnnnnnnnnnnnnnnnnnnnnnnnnnnnnnnnnnnnnnnnnnnnnnnnnnnnnnnnnnnnnnnnnnnnnnnnnnnnnnnnnnnnnnnnnnnnnnnnnnnnnnnnnnnnnnnnnnnnnnnnnnnnnnnnnnnnnnnnnnnnnnnnnnnnnnnnnnnnnnnnnnnnnnnnnnnnnnnnnnnnnnnnnnnnnnnnnnnnnnnnnnnnnnnnnnnnnnnnnnnnnnnnnnnnnnnnnnnnnnnnnnnnnnnnnnnnnnnnnnnnnnnnnnnnnnnnnnnnnnnnnnnnnnnnnnnnnnnnnnnnnnnnnnnnnnnnnnnnnnnnnnnnnnnnnnnnnnnnnnnnnnnnnnnnnnnnnnnnnnnnnnnnnnnnnnnnnnnnnnnnnnnnnnnnnnnnnnnnnnnnnnnnnnnnnnnnnnnnnnnnnnnnnnnnnnnnnnnnnnnnnnnnnnnnnnnnnnnnnnnnnnnnnnnnnnnnnnnnnnnnnnnnnnnnnnnnnnnnnnnnnnnnnnnnnnnnnnnnnnnnnnnnnnnnnnnnnnnnnnnnnnnnnnnnnnnnnnnnnnnnnnnnnnnnnnnnnnnnnnnnnnnnnnnnnnnnnnnnnnnnnnnnnnnnnnnnnnnnnnnnnnnnnnnnnnnnnnnnnnnnnnnnnnnnnnnnnnnnnnnnnnnnnnnnnnnnnnnnnnnnnnnnnnnnnnnnnnnnnnnnnnnnnnnnnnnnnnnnnnnnnnnnnnnnnnnnnnnnnnnnnnnnnnnnnnnnnnnnnnnnnnnnnnnnnnnnnnnnnnnnnnnnnnnnnnnnnnnnnnnnnnnnnnnnnnnnnnnnnnnnnnnnnnnnnnnnnnnnnnnnnnnnnnnnnnnnnnnnnnnnnnnnnnnnnnnnnnnnnnnnnnnnnnnnnnnnnnnnnnnnnnnnnnnnnnnnnnnnnnnnnnnnnnnnnnnnnnnnnnnnnnnnnnnnnnnnnnnnnnnnnnnnnnnnnnnnnnnnnnnnnnnnnnnnnnnnnnnnnnnnnnnnnnnnnnnnnnnnnnnnnnnnnnnnnnnnnnnnnnnnnnnnnnnnnnnnnnnnnnnnnnnnnnnnnnnnnnnnnnnnnnnnnnnnnnnnnnnnnnnnnnnnnnnnnnnnnnnnnnnnnnnnnnnnnnnnnnnnnnnnnnnnnnnnnnnnnnnnnnnnnnnnnnnnnnnnnnnnnnnnnnnnnnnnnnnnnnnnnnnnnnnnnnnnnnnnnnnnnnnnnnnnnnnnnnnnnnnnnnnnnnnnnnnnnnnnnnnnnnnnnnnnnnnnnnnnnnnnnnnnnnnnnnnnnnnnnnnnnnnnnnnnnnnnnnnnnnnnnnnnnnnnnnnnnnnnnnnnnnnnnnnnnnnnnnnnnnnnnnnnnnnnnnnnnnnnnnnnnnnnnnnnnnnnnnnnnnnnnnnnnnnnnnnnnnnnnnnnnnnnnnnnnnnnnnnnnnnnnnnnnnnnnnnnnnnnnnnnnnnnnnnnnnnnnnnnnnnnnnnnnnnnnnnnnnnnnnnnnnnnnnnnnnnnnnnnnnnnnnnnnnnnnnnnnnnnnnnnnnnnnnnnnnnnnnnnnnnnnnnnnnnnnnnnnnnnnnnnnnnnnnnnnnnnnnnnnnnnnnnnnnnnnnnnnnnnnnnnnnnnnnnnnnnnnnnnnnnnnnnnnnnnnnnnnnnnnnnnnnnnnnnnnnnnnnnnnnnnnnnnnnnnnnnnnnnnnnnnnnnnnnnnnnnnnnnnnnnnnnnnnnnnnnnnnnnnnnnnnnnnnnnnnnnnnnnnnnnnnnnnnnnnnnnnnnnnnnnnnnnnnnnnnnnnnnnnnnnnnnnnnnnnnnnnnnnnnnnnnnnnnnnnnnnnnnnnnnnnnnnnnnnnnnnnnnnnnnnnnnnnnnnnnnnnnnnnnnnnnnnnnnnnnnnnnnnnnnnnnnnnnnnnnnnnnnnnnnnnnnnnnnnnnnnnnnnnnnnnnnnnnnnnnnnnnnnnnnnnnnnnnnnnnnnnnnnnnnnnnnnnnnnnnnnnnnnnnnnnnnnnnnnnnnnnnnnnnnnnnnnnnnnnnnnnnnnnnnnnnnnnnnnnnnnnnnnnnnnnnnnnnnnnnnnnnnnnnnnnnnnnnnnnnnnnnnnnnnnnnnnnnnnnnnnnnnnnnnnnnnnnnnnnnnnnnnnnnnnnnnnnnnnnnnnnnnnnnnnnnnnnnnnnnnnnnnnnnnnnnnnnnnnnnnnnnnnnnnnnnnnnnnnnnnnnnnnnnnnnnnnnnnnnnnnnnnnnnnnnnnnnnnnnnnnnnnnnnnnnnnnnnnnnnnnnnnnnnnnnnnnnnnnnnnnnnnnnnnnnnnnnnnnnnnnnnnnnnnnnnnnnnnnnnnnnnnnnnnnnnnnnnnnnnnnnnnnnnnnnnnnnnnnnnnnnnnnnnnnnnnnnnnnnnnnnnnnnnnnnnnnnnnnnnnnnnnnnnnnnnnnnnnnnnnnnnnnnnnnnnnnnnnnnnnnnnnnnnnnnnnnnnnnnnnnnnnnnnnnnnnnnnnnnnnnnnnnnnnnnnnnnnnnnnnnnnnnnnnnnnnnnnnnnnnnnnnnnnnnnnnnnnnnnnnnnnnnnnnnnnnnnnnnnnnnnnnnnnnnnnnnnnnnnnnnnnnnnnnnnnnnnnnnnnnnnnnnnnnnnnnnnnnnnnnnnnnnnnnnnnnnnnnnnnnnnnnnnnnnnnnnnnnnnnnnnnnnnnnnnnnnnnnnnnnnnnnnnnnnnnnnnnnnnnnnnnnnnnnnnnnnnnnnnnnnnnnnnnnnnnnnnnnnnnnnnnnnnnnnnnnnnnnnnnnnnnnnnnnnnnnnnnnnnnnnnnnnnnnnnnnnnnnnnnnnnnnnnnnnnnnnnnnnnnnnnnnnnnnnnnnnnnnnnnnnnnnnnnnnnnnnnnnnnnnnnnnnnnnnnnnnnnnnnnnnnnnnnnnnnnnnnnnnnnnnnnnnnnnnnnnnnnnnnnnnnnnnnnnnnnnnnnnnnnnnnnnnnnnnnnnnnnnnnnnnnnnnnnnnnnnnnnnnnnnnnnnnnnnnnnnnnnnnnnnnnnnnnnnnnnnnnnnnnnnnnnnnnnnnnnnnnnnnnnnnnnnnnnnnnnnnnnnnnnnnnnnnnnnnnnnnnnnnnnnnnnnnnnnnnnnnnnnnnnnnnnnnnnnnnnnnnnnnnnnnnnnnnnnnnnnnnnnnnnnnnnnnnnnnnnnnnnnnnnnnnnnnnnnnnnnnnnnnnnnnnnnnnnnnnnnnnnnnnnnnnnnnnnnnnnnnnnnnnnnnnnnnnnnnnnnnnnnnnnnnnnnnnnnnnnnnnnnnnnnnnnnnnnnnnnnnnnnnnnnnnnnnnnnnnnnnnnnnnnnnnnnnnnnnnnnnnnnnnnnnnnnnnnnnnnnnnnnnnnnnnnnnnnnnnnnnnnnnnnnnnnnnnnnnnnnnnnnnnnnnnnnnnnnnnnnnnnnnnnnnnnnnnnnnnnnnnnnnnnnnnnnnnnnnnnnnnnnnnnnnnnnnnnnnnnnnnnnnnnnnnnnnnnnnnnnnnnnnnnnnnnnnnnnnnnnnnnnnnnnnnnnnnnnnnnnnnnnnnnnnnnnnnnnnnnnnnnnnnnnnnnnnnnnnnnnnnnnnnnnnnnnnnnnnnnnnnnnnnnnnnnnnnnnnnnnnnnnnnnnnnnnnnnnnnnnnnnnnnnnnnnnnnnnnnnnnnnnnnnnnnnnnnnnnnnnnnnnnnnnnnnnnnnnnnnnnnnnnnnnnnnnnnnnnnnnnnnnnnnnnnnnnnnnnnnnnnnnnnnnnnnnnnnnnnnnnnnnnnnnnnnnnnnnnnnnnnnnnnnnnnnnnnnnnnnnnnnnnnnnnnnnnnnnnnnnnnnnnnnnnnnnnnnnnnnnnnnnnnnnnnnnnnnnnnnnnnnnnnnnnnnnnnnnnnnnnnnnnnnnnnnnnnnnnnnnnnnnnnnnnnnnnnnnnnnnnnnnnnnnnnnnnnnnnnnnnnnnnnnnnnnnnnnnnnnnnnnnnnnnnnnnnnnnnnnnnnnnnnnnnnnnnnnnnnnnnnnnnnnnnnnnnnnnnnnnnnnnnnnnnnnnnnnnnnnnnnnnnnnnnnnnnnnnnnnnnnnnnnnnnnnnnnnnnnnnnnnnnnnnnnnnnnnnnnnnnnnnnnnnnnnnnnnnnnnnnnnnnnnnnnnnnnnnnnnnnnnnnnnnnnnnnnnnnnnnnnnnnnnnnnnnnnnnnnnnnnnnnnnnnnnnnnnnnnnnnnnnnnnnnnnnnnnnnnnnnnnnnnnnnnnnnnnnnnnnnnnnnnnnnnnnnnnnnnnnnnnnnnnnnnnnnnnnnnnnnnnnnnnnnnnnnnnnnnnnnnnnnnnnnnnnnnnnnnnnnnnnnnnnnnnnnnnnnnnnnnnnnnnnnnnnnnnnnnnnnnnnnnnnnnnnnnnnnnnnnnnnnnnnnnnnnnnnnnnnnnnnnnnnnnnnnnnnnnnnnnnnnnnnnnnnnnnnnnnnnnnnnnnnnnnnnnnnnnnnnnnnnnnnnnnnnnnnnnnnnnnnnnnnnnnnnnnnnnnnnnnnnnnnnnnnnnnnnnnnnnnnnnnnnnnnnnnnnnnnnnnnnnnnnnnnnnnnnnnnnnnnnnnnnnnnnnnnnnnnnnnnnnnnnnnnnnnnnnnnnnnnnnnnnnnnnnnnnnnnnnnnnnnnnnnnnnnnnnnnnnnnnnnnnnnnnnnnnnnnnnnnnnnnnnnnnnnnnnnnnnnnnnnnnnnnnnnnnnnnnnnnnnnnnnnnnnnnnnnnnnnnnnnnnnnnnnnnnnnnnnnnnnnnnnnnnnnnnnnnnnnnnnnnnnnnnnnnnnnnnnnnnnnnnnnnnnnnnnnnnnnnnnnnnnnnggcagcagcccccgcatttttttgatgtttgacaaagcccctgtgcccatcgccaacctgttcatgaccgtggacccgcgtgcggtgcgcatttgctcgccgtctggggtcgagacctttgactggacgcaagccccgagccccgatgccgggggcattcaaaaagcactctggaacaggcgcaccgcatgatgctggactacaccattcccaaaccgcgccaaacgcaaggctacccgctgcaccgcatgatcgccgcgctggccgatggcagccctgtgctgtttgccgaccggggcgaccacttgctggtgcgcagcgccaaacacatcaccccccagggccaagccctggcccaaccgcaaactggcgcagtcatcgcctttgagttgcaagccagcgtggccgcacgcaagggcggcaagaacatttaccccgacctgcacgactggcgcatccgccgagcctggctggaggcccagggcctcaagcatggttttgaagtcatggcggtccacgtcacaggcgagcgcatgcgcgtgacagatcacagcggtcgggcattcagcatcgatgccagccatttcacgggcgtgctcaaagtcaccgatgcggctttgctgtcacaggccttggtcactggcattggccgggtgggcaaggcctttggcatgggcttgctgatcctctgaatgcgcacctgaacccatttatctgaagggaaaccatgatctccacactcatcatcaacgtcacgctgcacaccgtcggccccttgtccatcaagatgcccaaacccgaaggcgggcgtgaaaacgaatttggcaacttccccgtcatgacccgtggcgtggacgacagcggccaaaaattgcaaaccggctatttgccggccaccactttgcgcgggtatttgcgccgcgccgtcaccctgcgcaacatgcgcgaagctgcagccaaagggcagccctatcggctggcgcaggtctacagcgaaatgatcggacaagacgccgagagcgaaaaacaagcgggaaacgttgatttgctggccgtgcgcaaagcccgtgaagccagcgccgtgctggacttgtttggcagcggcttgggcatcaagtcgcggctcaaggtcagccacttggtgccgcatgtcaacgtcttgcccgaagtcttcaccggcgtgcgcaaagacctggacgacaccgaagacgttctggacctgatggacccggccgatatgcaaagctttctgggtcgcagcgaaagcaacaaccaacgtgccacacaggccgcggtagtcaagcaactggaaacccaaatgcgtcgcctgcaaaagaaaggcgatgtcgtacccgacgacatgacgcaggccctggcggtggcgcaggctgcgcttgaaaaattcaagaccggcatgggcgagatgcaaaacagcacccgcaccatcgtgcagcaccatgcactgcctgcgggtttgctgttgcaaggccgtctggtggtcgatcgggagcagccccgcgatgtggagctgctcgactatgccctggaccagttcagccgctacccggtgttgggggctcacagcgcacgcggctgtggtgaggtggctgggcaatttgactatttggatgaaagcgggagggtgaccaaaaccgtcaagaccggcgcttatttgccggcgcaggtcacagttttggcgtcgtcgaaattggagaaagtgcaagactgacaagggtttaacttgtatcggtccaagctacccaatgtttgggtggctactagaagtacttcacgcgctcaccgttggacagtagcgtccaagccacccaatgtttgggtggctactagaagcgcaagcggagagcatcgcagccggggattgtccaagccacccaatgtttgggtggctactagaaggtgcagcaacaacggcggcattgcgtccaggtccaagccacccaagatttgagtggctactaaaagaacatgtctttgagttgaccgccatgccgtgtgcaagccacctagttattgggtggctactagaagggctgcaagtttgattactggccggtgctgggtaaagccgcccattgtctgggtggctactaaaagttcgttcgatgcgaatgggcttgcaaatggtccaagccacctgatgttcgaggggctatttttgaaagaaagcattcacaagatggaagccttaaggtttcgctcggcagaacaagctcagttccatgaccgactggcccagcacctgcgtgccccgtctgcgccgttgctgctggagggcaccaccggtctgggcaaaacgcgggcgtttttgcaggcactgatggacgccgccgctcgcgggcagcgcgtggccattgccttgcccagccaccagttgatcgaccaattgctggcctcaacagatttgcatgcggtgcatgcgtccggtgtgcgggtggcggcgtttcggcccaggcgctggtttgctgatgacgagcatgcggcttatgccgccgcaaggcaagcggcgctcgatgccgaggtgatgctgtgcaccagtgcctcggtcatcatcgatcaccgtttgggcggcgcttacaacggcgtcactttgcgtgaccatctgctgtttgacgaagccgatcagttgcccggtgcagcggctttgcaaagcgatgccgaaattcctgctgccgagttgaacgcattgggcattgcaccggtgtcggctgcgcaggtggtggcggctttgttggcccgcaaggggctggtgcccgagtgccgtgcggcggccttgctgatgcaagaggcgctggatgccccggcctggtaccaccgtgtgggcctgaccgacgatggtggtgtggctttggtccacaacttgccggggcgtttgctcaaggcggtggccaatcggccaggggtgagttttgtcagcgccacgctcacggtggggggcctgttcgatgacttcaaacgcgccttgggcatcggtgaaatcagccctttgtcggcagtgatcgagccacaagagcatggccatgtgcagtttgaagtcgcacagctggaggtggacagccaggactggtgggaccgcacactgcaaacggtggacgctgcagcggcccaagggccgtgcttggtggtcacgcccagccatgctttggcgttgcgactgggcgcggctttgccgagcgcgacggtgcggcagtccgatgaaacggccagccatgccgcagcccgcatggggacatcgcaagtcttgatcgcggcgggggcctgggcggggctggacacgccggtgcgttggcgttcgatcgtcgtgccgcgcatcccttacgagcggccagtggtgctggacggtcaggtggaaagccgttttctggacattcgcaacacggcggtgcggcgcatgcgacaggtcattggccgtggcctgcgcagccccgacgcgcaatgcacggttcatatcctggatggtcgtttcaaacatatcgaggcgtttgtgccgcgccgctttgcatcggcctggcaagcgcgcaagacctttgccgaaggtgctgcccgtggggtgacgctcacccgttatgagcgcgacccgtcggtgcgcaaggcggctttggcgcaccacggcaaaacctgcatggcgtgtggcttctcgcccaaggcggacattcaactgcaggtgcaccacctcaagccggtgtccgaaggtgttcggatgacgagcctggccgatgtggcggtgttgtgcgccaactgccactgcctggcccattctgaggagccgcctttgccgctggagagcttgcggcttttgcatgcttgaggcgcggggcagggcggtcagatcagcgaacgcccgggcggctaagattcaggccttgaagcccatgtttccggattgatttcatgacagaccgttacgccgtgatcggcaaccccatcgagcagagcaagtcgccgctcatcc

SEQ ID NO: 220 - DNA, 11880 bp, Artificial Sequence
  Synthetic Oligonucleotide
  misc_feature (1)..(6412): n is a, c, g, or t
nnnnnnnnnnnnnnnnnnnnnnnnnnnnnnnnnnnnnnnnnnnnnnnnnnnnnnnnnnnnnnnnnnnnnnnnnnnnnnnnnnnnnnnnnnnnnnnnnnnnnnnnnnnnnnnnnnnnnnnnnnnnnnnnnnnnnnnnnnnnnnnnnnnnnnnnnnnnnnnnnnnnnnnnnnnnnnnnnnnnnnnnnnnnnnnnnnnnnnnnnnnnnnnnnnnnnnnnnnnnnnnnnnnnnnnnnnnnnnnnnnnnnnnnnnnnnnnnnnnnnnnnnnnnnnnnnnnnnnnnnnnnnnnnnnnnnnnnnnnnnnnnnnnnnnnnnnnnnnnnnnnnnnnnnnnnnnnnnnnnnnnnnnnnnnnnnnnnnnnnnnnnnnnnnnnnnnnnnnnnnnnnnnnnnnnnnnnnnnnnnnnnnnnnnnnnnnnnnnnnnnnnnnnnnnnnnnnnnnnnnnnnnnnnnnnnnnnnnnnnnnnnnnnnnnnnnnnnnnnnnnnnnnnnnnnnnnnnnnnnnnnnnnnnnnnnnnnnnnnnnnnnnnnnnnnnnnnnnnnnnnnnnnnnnnnnnnnnnnnnnnnnnnnnnnnnnnnnnnnnnnnnnnnnnnnnnnnnnnnnnnnnnnnnnnnnnnnnnnnnnnnnnnnnnnnnnnnnnnnnnnnnnnnnnnnnnnnnnnnnnnnnnnnnnnnnnnnnnnnnnnnnnnnnnnnnnnnnnnnnnnnnnnnnnnnnnnnnnnnnnnnnnnnnnnnnnnnnnnnnnnnnnnnnnnnnnnnnnnnnnnnnnnnnnnnnnnnnnnnnnnnnnnnnnnnnnnnnnnnnnnnnnnnnnnnnnnnnnnnnnnnnnnnnnnnnnnnnnnnnnnnnnnnnnnnnnnnnnnnnnnnnnnnnnnnnnnnnnnnnnnnnnnnnnnnnnnnnnnnnnnnnnnnnnnnnnnnnnnnnnnnnnnnnnnnnnnnnnnnnnnnnnnnnnnnnnnnnnnnnnnnnnnnnnnnnnnnnnnnnnnnnnnnnnnnnnnnnnnnnnnnnnnnnnnnnnnnnnnnnnnnnnnnnnnnnnnnnnnnnnnnnnnnnnnnnnnnnnnnnnnnnnnnnnnnnnnnnnnnnnnnnnnnnnnnnnnnnnnnnnnnnnnnnnnnnnnnnnnnnnnnnnnnnnnnnnnnnnnnnnnnnnnnnnnnnnnnnnnnnnnnnnnnnnnnnnnnnnnnnnnnnnnnnnnnnnnnnnnnnnnnnnnnnnnnnnnnnnnnnnnnnnnnnnnnnnnnnnnnnnnnnnnnnnnnnnnnnnnnnnnnnnnnnnnnnnnnnnnnnnnnnnnnnnnnnnnnnnnnnnnnnnnnnnnnnnnnnnnnnnnnnnnnnnnnnnnnnnnnnnnnnnnnnnnnnnnnnnnnnnnnnnnnnnnnnnnnnnnnnnnnnnnnnnnnnnnnnnnnnnnnnnnnnnnnnnnnnnnnnnnnnnnnnnnnnnnnnnnnnnnnnnnnnnnnnnnnnnnnnnnnnnnnnnnnnnnnnnnnnnnnnnnnnnnnnnnnnnnnnnnnnnnnnnnnnnnnnnnnnnnnnnnnnnnnnnnnnnnnnnnnnnnnnnnnnnnnnnnnnnnnnnnnnnnnnnnnnnnnnnnnnnnnnnnnnnnnnnnnnnnnnnnnnnnnnnnnnnnnnnnnnnnnnnnnnnnnnnnnnnnnnnnnnnnnnnnnnnnnnnnnnnnnnnnnnnnnnnnnnnnnnnnnnnnnnnnnnnnnnnnnnnnnnnnnnnnnnnnnnnnnnnnnnnnnnnnnnnnnnnnnnnnnnnnnnnnnnnnnnnnnnnnnnnnnnnnnnnnnnnnnnnnnnnnnnnnnnnnnnnnnnnnnnnnnnnnnnnnnnnnnnnnnnnnnnnnnnnnnnnnnnnnnnnnnnnnnnnnnnnnnnnnnnnnnnnnnnnnnnnnnnnnnnnnnnnnnnnnnnnnnnnnnnnnnnnnnnnnnnnnnnnnnnnnnnnnnnnnnnnnnnnnnnnnnnnnnnnnnnnnnnnnnnnnnnnnnnnnnnnnnnnnnnnnnnnnnnnnnnnnnnnnnnnnnnnnnnnnnnnnnnnnnnnnnnnnnnnnnnnnnnnnnnnnnnnnnnnnnnnnnnnnnnnnnnnnnnnnnnnnnnnnnnnnnnnnnnnnnnnnnnnnnnnnnnnnnnnnnnnnnnnnnnnnnnnnnnnnnnnnnnnnnnnnnnnnnnnnnnnnnnnnnnnnnnnnnnnnnnnnnnnnnnnnnnnnnnnnnnnnnnnnnnnnnnnnnnnnnnnnnnnnnnnnnnnnnnnnnnnnnnnnnnnnnnnnnnnnnnnnnnnnnnnnnnnnnnnnnnnnnnnnnnnnnnnnnnnnnnnnnnnnnnnnnnnnnnnnnnnnnnnnnnnnnnnnnnnnnnnnnnnnnnnnnnnnnnnnnnnnnnnnnnnnnnnnnnnnnnnnnnnnnnnnnnnnnnnnnnnnnnnnnnnnnnnnnnnnnnnnnnnnnnnnnnnnnnnnnnnnnnnnnnnnnnnnnnnnnnnnnnnnnnnnnnnnnnnnnnnnnnnnnnnnnnnnnnnnnnnnnnnnnnnnnnnnnnnnnnnnnnnnnnnnnnnnnnnnnnnnnnnnnnnnnnnnnnnnnnnnnnnnnnnnnnnnnnnnnnnnnnnnnnnnnnnnnnnnnnnnnnnnnnnnnnnnnnnnnnnnnnnnnnnnnnnnnnnnnnnnnnnnnnnnnnnnnnnnnnnnnnnnnnnnnnnnnnnnnnnnnnnnnnnnnnnnnnnnnnnnnnnnnnnnnnnnnnnnnnnnnnnnnnnnnnnnnnnnnnnnnnnnnnnnnnnnnnnnnnnnnnnnnnnnnnnnnnnnnnnnnnnnnnnnnnnnnnnnnnnnnnnnnnnnnnnnnnnnnnnnnnnnnnnnnnnnnnnnnnnnnnnnnnnnnnnnnnnnnnnnnnnnnnnnnnnnnnnnnnnnnnnnnnnnnnnnnnnnnnnnnnnnnnnnnnnnnnnnnnnnnnnnnnnnnnnnnnnnnnnnnnnnnnnnnnnnnnnnnnnnnnnnnnnnnnnnnnnnnnnnnnnnnnnnnnnnnnnnnnnnnnnnnnnnnnnnnnnnnnnnnnnnnnnnnnnnnnnnnnnnnnnnnnnnnnnnnnnnnnnnnnnnnnnnnnnnnnnnnnnnnnnnnnnnnnnnnnnnnnnnnnnnnnnnnnnnnnnnnnnnnnnnnnnnnnnnnnnnnnnnnnnnnnnnnnnnnnnnnnnnnnnnnnnnnnnnnnnnnnnnnnnnnnnnnnnnnnnnnnnnnnnnnnnnnnnnnnnnnnnnnnnnnnnnnnnnnnnnnnnnnnnnnnnnnnnnnnnnnnnnnnnnnnnnnnnnnnnnnnnnnnnnnnnnnnnnnnnnnnnnnnnnnnnnnnnnnnnnnnnnnnnnnnnnnnnnnnnnnnnnnnnnnnnnnnnnnnnnnnnnnnnnnnnnnnnnnnnnnnnnnnnnnnnnnnnnnnnnnnnnnnnnnnnnnnnnnnnnnnnnnnnnnnnnnnnnnnnnnnnnnnnnnnnnnnnnnnnnnnnnnnnnnnnnnnnnnnnnnnnnnnnnnnnnnnnnnnnnnnnnnnnnnnnnnnnnnnnnnnnnnnnnnnnnnnnnnnnnnnnnnnnnnnnnnnnnnnnnnnnnnnnnnnnnnnnnnnnnnnnnnnnnnnnnnnnnnnnnnnnnnnnnnnnnnnnnnnnnnnnnnnnnnnnnnnnnnnnnnnnnnnnnnnnnnnnnnnnnnnnnnnnnnnnnnnnnnnnnnnnnnnnnnnnnnnnnnnnnnnnnnnnnnnnnnnnnnnnnnnnnnnnnnnnnnnnnnnnnnnnnnnnnnnnnnnnnnnnnnnnnnnnnnnnnnnnnnnnnnnnnnnnnnnnnnnnnnnnnnnnnnnnnnnnnnnnnnnnnnnnnnnnnnnnnnnnnnnnnnnnnnnnnnnnnnnnnnnnnnnnnnnnnnnnnnnnnnnnnnnnnnnnnnnnnnnnnnnnnnnnnnnnnnnnnnnnnnnnnnnnnnnnnnnnnnnnnnnnnnnnnnnnnnnnnnnnnnnnnnnnnnnnnnnnnnnnnnnnnnnnnnnnnnnnnnnnnnnnnnnnnnnnnnnnnnnnnnnnnnnnnnnnnnnnnnnnnnnnnnnnnnnnnnnnnnnnnnnnnnnnnnnnnnnnnnnnnnnnnnnnnnnnnnnnnnnnnnnnnnnnnnnnnnnnnnnnnnnnnnnnnnnnnnnnnnnnnnnnnnnnnnnnnnnnnnnnnnnnnnnnnnnnnnnnnnnnnnnnnnnnnnnnnnnnnnnnnnnnnnnnnnnnnnnnnnnnnnnnnnnnnnnnnnnnnnnnnnnnnnnnnnnnnnnnnnnnnnnnnnnnnnnnnnnnnnnnnnnnnnnnnnnnnnnnnnnnnnnnnnnnnnnnnnnnnnnnnnnnnnnnnnnnnnnnnnnnnnnnnnnnnnnnnnnnnnnnnnnnnnnnnnnnnnnnnnnnnnnnnnnnnnnnnnnnnnnnnnnnnnnnnnnnnnnnnnnnnnnnnnnnnnnnnnnnnnnnnnnnnnnnnnnnnnnnnnnnnnnnnnnnnnnnnnnnnnnnnnnnnnnnnnnnnnnnnnnnnnnnnnnnnnnnnnnnnnnnnnnnnnnnnnnnnnnnnnnnnnnnnnnnnnnnnnnnnnnnnnnnnnnnnnnnnnnnnnnnnnnnnnnnnnnnnnnnnnnnnnnnnnnnnnnnnnnnnnnnnnnnnnnnnnnnnnnnnnnnnnnnnnnnnnnnnnnnnnnnnnnnnnnnnnnnnnnnnnnnnnnnnnnnnnnnnnnnnnnnnnnnnnnnnnnnnnnnnnnnnnnnnnnnnnnnnnnnnnnnnnnnnnnnnnnnnnnnnnnnnnnnnnnnnnnnnnnnnnnnnnnnnnnnnnnnnnnnnnnnnnnnnnnnnnnnnnnnnnnnnnnnnnnnnnnnnnnnnnnnnnnnnnnnnnnnnnnnnnnnnnnnnnnnnnnnnnnnnnnnnnnnnnnnnnnnnnnnnnnnnnnnnnnnnnnnnnnnnnnnnnnnnnnnnnnnnnnnnnnnnnnnnnnnnnnnnnnnnnnnnnnnnnnnnnnnnnnnnnnnnnnnnnnnnnnnnnnnnnnnnnnnnnnnnnnnnnnnnnnnnnnnnnnnnnnnnnnnnnnnnnnnnnnnnnnnnnnnnnnnnnnnnnnnnnnnnnnnnnnnnnnnnnnnnnnnnnnnnnnnnnnnnnnnnnnnnnnnnnnnnnnnnnnnnnnnnnnnnnnnnnnnnnnnnnnnnnnnnnnnnnnnnnnnnnnnnnnnnnnnnnnnnnnnnnnnnnnnnnnnnnnnnnnnnnnnnnnnnnnnnnnnnnnnnnnnnnnnnnnnnnnnnnnnnnnnnnnnnnnnnnnnnnnnnnnnnnnnnnnnnnnnnnnnnnnnnnnnnnnnnnnnnnnnnnnnnnnnnnnnnnnnnnnnnnnnnnnnnnnnnnnnnnnnnnnnnnnnnnnnnnnnnnnnnnnnnnnnnnnnnnnnnnnnnnnnnnnnnnnnnnnnnnnnnnnnnnnnnnnnnnnnnnnnnnnnnnnnnnnnnnnnnnnnnnnnnnnnnnnnnnnnnnnnnnnnnnnnnnnnnnnnnnnnnnnnnnnnnnnnnnnnnnnnnnnnnnnnnnnnnnnnnnnnnnnnnnnnnnnnnnnnnnnnnnnnnnnnnnnnnnnnnnnnnnnnnnnnnnnnnnnnnnnnnnnnnnnnnnnnnnnnnnnnnnnnnnnnnnnnnnnnnnnnnnnnnnnnnnnnnnnnnnnnnnnnnnnnnnnnnnnnnnnnnnnnnnnnnnnnnnnnnnnnnnnnnnnnnnnnnnnnnnnnnnnnnnnnnnnnnnnnnnnnnnnnnnnnnnnnnnnnnnnnnnnnnnnnnnnnnnnnnnnnnnnnnnnnnnnnnnnnnnnnnnnnnnnnnnnnnnnnnnnnnnnnnnnnnnnnnnnnnnnnnnnnnnnnnnnnnnnnnnnnnnnnnnnnnnnnnnnnnnnnnnnnnnnnnnnnnnnnnnnnnnnnnnnnnnnnnnnnnnnnnnnnnnnnnnnnnnnnnnnnnnnnnnnnnnnnnnnnnnnnnnnnnnnnnnnnnnnnnnnnnnnnnnnnnnnnnnnnnnnnnnnnnnnnnnnnnnnnnnnnnnnnnnnnnnnnnnnnnnnnnnnnnnnnnnnnnnnnnnnnnnnnnnnnnnnnnnnnnnnnnnnnnnnnnnnnnnnnnnnnnnnnnnnnnnnnnnnnnnnnnnnnnnnnnnnnnnnnnnnnnnnnnnnnnnnnnnnnnnnnnnnnnnnnnnnnnnnnnnnnnnnnnnnnnnnnnnnnnnnnnnnnnnnnnnnnnnnnnnnnnnnnnnnnnnnnnnnnnnnnnnnnnnnnnnnnnnnnnnnnnnnnnnnnnnnnnnnnnnnnnnnnnnnnnnnnnnnnnnnnnnnnnnnnnnnnnnnnnnnnnnnnnnnnnnnnnnnnnnnnnnnnnnnnnnnnnnnnnnnnnnnnnnnnnnnnnnnnnnnnnnnnnnnnnnnnnnnnnnnnnnnnnnnnnnnnnnnnnnnnnnnnnnnnnnncgacagaaggggatatttccccaaggtcagtttgcggggttttccgttgtgccgataccggacggcccagcccttcgccccgctaatttgcaccacaaggtagagacccgggagcccgccatcggggacttcacgccgctttttcgggtccggtttcgtggcatctaccgcccttgccgtgagcacctttgacatcgccagtttcccttcggggtaacactggggtaacggaatatgggtgttagggttcgttacccggtgttgctaacatggcataacagtgcggggatttcaatatactctcagcacattaaagggtagagaagtttattctagttaggctctgatatgatgcggcagcttacttctaatcagtggatcgtggtggcaacctgttgaagccagcgaagcaccggagcggtgggggctgagcgcaagttcagatatggctaccatctcgcgcgggttcggagggatgtgctacaatgggcgaaggatatggtcgggtgattgcacaggggccagccatgaaacacctacgcgaggatgctggaattactaacctgcggatgcatgacctgcggcacaatttcgcttctataatcgcagccgatggcggctcgttgccaattatcggaaagttactcgggcacaaatccgttgcaaccacgcagcggtatgcgcatctgacggaaagtgtcgtcaccactgccggatcccgcgcagcggcggcaatcgagaaacttacgacgaaagccccagtgtacaaatcgctttctggaacaactgcatgaaaaaactaaccatcacggcaacgcttaagacgcctgtcatcacgctaggctacttcaccttcgacggcctgctgggtggaataatctttgacaagcgaaacgatggcgatgtggccgccgcgcatgcagccattccgatcaaatgtactgacgggttgtatcacgcctccgctgctcggttcataggagcctcatttggaagagcgtcattctctgccgcccttcgggccacgcacgatctggacccggaccagatcctgaaaagcaaagatggtaccaagttgcaccggacgctcggcctaaagcggatgcgagaatttggaatggtcaagaacgactacaaaatcatcatcgcagcccggattgaatgggacgtcgaaggtgacgatcaggggatcgccgaaacacttggagatgttttttggatcggcaaacggcgtgccgcaggttatggcgaagtctccaactgggacatgcaatacggcaactctgacggccttgtaggcccctcaggagagccaatgaggccgatcccggcgacgcgtttcaagggcgacctgacgcagccgctgacggacgccgcgtggaagcccgcatactgggccttcgagcatcgtgcggcctgttttgttccgtccaacgagtggcgtttcccgcaaccggaagagcaggtcatcgatgaacacgtttgaatttatccagcagaatttcgcgcgtcacctcatcgagatttcaggcgaccctgttgttgatagcgaagccgtcctcaccgccaacgtcccgatgcaaggcaagcctgcgcgtctggcttctggctggggtatcatccgcgaaggaggagcaaccgtccagttgaaggttgcgggggacgagcacatcaagggtggggacacccggacccgttatgaagcctggcttgaacaactcgagaatttcagtggcccaacactgttcattgcctttgccaacaaacagatttcgctgggtcaggttttcttgaccttcgacacacgggccgtccggatctgctcgaaggatggggtcgaaaccttcgactggaccactgaacccgacgaaaactcgggtcccgtcttcaagattttgcataagatgagaggaaaacagaatgcttgatcacgttattcccaaacctgcctccgttggcccctacgacctccaccggatcgtcgagggcctaaccaaaggagagcgtccgcagttttatgacgccggagatcacctgatcgtccgctcgaacgcggaactgaccaaggatggcaaacaactgcccgaggtcaaactgggcgatatgagggtctttcaccttcgtgcgccatgctttgtccaaaacaagcgaaaacgtcactattttccactagaagattggcggtcgcgtcacgattggttgcgaaaacgtgcccgtggatttgagatcctgcagcttcacagcacggccaaatccatcaagatcaaaaccggtatgatggatcagaccgatttcacaggcgtcctgaaagtcaccgacgtcgatcaattcaaagaaaccctgaaatccggcgtttccggctgccccaaagcctttggctttgggatgctggtcattcaataggagaggcaaaaaatgagcatcgcaattatcgctgcaacaatcaccacagttggtcctttgtccatcgccatgccgacgcccgagggaatacgcgagatgccatgcaatggctttccgattcttggccggggggtcaactctgaaggtgaaatgcagcagaccggataccttccgtcatcaaccgttcgcggcgcattgaggcgcggcgtggtcgtgccgcagatgaaagccgccgcacaggctggcaagccgttcagtctgccccaagtctacgaccagatgattggccagaaccccgagagcgaaaaggaaagcgaaggcattgacctcatcgcaatgaaagaagctcgtgacaacagtccggtggttgatctgtttggatctggtctgggcttcaagtcacgcatccgagttggtcacttcctgccagacgtcaacatcatgccttcaccgttcagcggcgtgaagaaggatctcgatgcgaccgagggtgcagtcgaaatgctttcagatgaagacaggaaagccttcctcgtgaggtcggaagcgaacagcaagagggctggtgaggcgcagctggtgacggggttgaagcgaaagatcgccacagcaaagaagaaaggcgaggacagcgcggagctggaaaaagcattgactgtctctgagaaggccttggcaaagtacgaagatgcgatgggcgacatgaaagtcacgtcgcgaaacctgttttcctattgggccttgcctgctggcctcgatctgaatgctcgtattgtgattgaacacttccgcccaagggatctggagcttctgcgggaggcgttaaacagcatcagcttgtttccgttcctcggcgcccaatccgcgcgtgggtgcggcgagatcaaaggcaagttcgaagtgaaggtcgatgaccagttggtggaagtcatcgagtttggtggctttgagcctgcaaaaatcctcgaaatcgccgtcaatgcaggggaataatgtcaatttttatcaaaccaaaagcagttaaaatcactctgcttcagagggttatgcgactgtctactgcagctgccctgaaaaggtgcagctactacaagtcatcatgcgccgtgccatctgaatgcaatactgcagctgccctgaaaaggtgcagctatttatgaaacaggctaacaggcactgaatttatgactgatgggagttcctgggtgttcagatctgacgagcagaaagactttcgcgaccggatcgcagcgcatttgcgcaatccgaccgcaccactgctgttggaaggaacggccggactgggcaagacacgcgcgatggccttggctttgctggaaagcggtcagcgcgtcgcgatggttttcccgacccatcagctgataaatcagtttctcacctccaccgacctcgaggcagctctggagcgttgtccacggtctgtccgcgcgtttcgcccaagaatgatgatcgaggaagtcggtggcgactatgaacagatgaagcaggaggcagcggcagctgaccttcttctttgcaccatgagttcggtcataatcgatcagaggctcgatggcagctacaacggcgtcacggaacgagacgttattctctttgatgaagccgaccagatgccagctatggcggggctgatggccgaatttaacatcccgaaagccaagctttcagaactggggatcaacgaacgaacgcccatggccgtcgtggaggcggtcctcaagatcaagacgcttgaacctgaagttcgcgctgcggcaaaggtcatcaaggaagttctccaaggcgaagaggtttggttccggaaagcaggcatgaccgacgacggcggcgtcgcgctctatcatcgcctcgcggggcggttgatcaagaaaatctctaaccggccaacaacggtcttttgctccgcaacactaaccatcggtggcaaattccaggacttcacgagatcgatggggatcacgtcgatcagccctctctcgaccagtattgagccagcacatcacggtgaactgattttcgacttctgccttgagcatgaaatcgacagcccggagtggctgaatactgttgtcgatcagatcgaaaacagcgaagggccgacgctcgttgttacgccgtcttttgctctggcaaaccagttgggtgaactcgttagcgacgcgactgttcgaacccgtgaggagacaacatcagaagcggcagcgcggatgggtaacagcaagatcctgatcgcagccggggcctgggcaggtcttgacaccccaaccgaatggtcgacagtcatcgtcccgcgcgttccctttggacagcccaagtatctcaccgacgagtggaacgagacaccggacgagtggatcgaaaaagaagcgatggcctccttcttcgatagccggaacctggcgacgcggagaatgaagcaggtttttggtcgcggtcttcggaggccggacgcggtctgccgtgttgtcatttgtgatccccgcatcttgatgctgggggagacagtcagtccggcgcgtttccggacaggctggctagagggccgtgctatttcgctgacccaaaccgtgtccgagcgggaccctcgtttgcgcaaggacgccctgaaattttatgggatcacctgcatggcctgcaagttcgtccccttggtgccgcgccaagtcgaagttcaccacaagaaccctctggcggaccggggcgcgggaattaccaggatggaggacgtctgtgttctttgtcgaaattgccacggcctggcccatacgcgagggaatgacgtcatccccctggagcggctcattgggattgctgaggcacgaggagcaggcgaggatgccctgccgcttgtgaggatgagaaaatagagggtcagttcgatgcccatctcgggcgtttgcgtgcgctgtacctggacctgtacgacaaggtccgcagtgaccgagaaaaggaaaaggtctcgatcccgactatcccagaaagcattagctcgattgcccggaggccggtcatgcgctaacactcgaaagacgccaaaagagtgg

SEQ ID NO: 221 - DNA, 11870 bp, Artificial Sequence
  Synthetic Oligonucleotide
  misc_feature (1)..(7192): n is a, c, g, or t
nnnnnnnnnnnnnnnnnnnnnnnnnnnnnnnnnnnnnnnnnnnnnnnnnnnnnnnnnnnnnnnnnnnnnnnnnnnnnnnnnnnnnnnnnnnnnnnnnnnnnnnnnnnnnnnnnnnnnnnnnnnnnnnnnnnnnnnnnnnnnnnnnnnnnnnnnnnnnnnnnnnnnnnnnnnnnnnnnnnnnnnnnnnnnnnnnnnnnnnnnnnnnnnnnnnnnnnnnnnnnnnnnnnnnnnnnnnnnnnnnnnnnnnnnnnnnnnnnnnnnnnnnnnnnnnnnnnnnnnnnnnnnnnnnnnnnnnnnnnnnnnnnnnnnnnnnnnnnnnnnnnnnnnnnnnnnnnnnnnnnnnnnnnnnnnnnnnnnnnnnnnnnnnnnnnnnnnnnnnnnnnnnnnnnnnnnnnnnnnnnnnnnnnnnnnnnnnnnnnnnnnnnnnnnnnnnnnnnnnnnnnnnnnnnnnnnnnnnnnnnnnnnnnnnnnnnnnnnnnnnnnnnnnnnnnnnnnnnnnnnnnnnnnnnnnnnnnnnnnnnnnnnnnnnnnnnnnnnnnnnnnnnnnnnnnnnnnnnnnnnnnnnnnnnnnnnnnnnnnnnnnnnnnnnnnnnnnnnnnnnnnnnnnnnnnnnnnnnnnnnnnnnnnnnnnnnnnnnnnnnnnnnnnnnnnnnnnnnnnnnnnnnnnnnnnnnnnnnnnnnnnnnnnnnnnnnnnnnnnnnnnnnnnnnnnnnnnnnnnnnnnnnnnnnnnnnnnnnnnnnnnnnnnnnnnnnnnnnnnnnnnnnnnnnnnnnnnnnnnnnnnnnnnnnnnnnnnnnnnnnnnnnnnnnnnnnnnnnnnnnnnnnnnnnnnnnnnnnnnnnnnnnnnnnnnnnnnnnnnnnnnnnnnnnnnnnnnnnnnnnnnnnnnnnnnnnnnnnnnnnnnnnnnnnnnnnnnnnnnnnnnnnnnnnnnnnnnnnnnnnnnnnnnnnnnnnnnnnnnnnnnnnnnnnnnnnnnnnnnnnnnnnnnnnnnnnnnnnnnnnnnnnnnnnnnnnnnnnnnnnnnnnnnnnnnnnnnnnnnnnnnnnnnnnnnnnnnnnnnnnnnnnnnnnnnnnnnnnnnnnnnnnnnnnnnnnnnnnnnnnnnnnnnnnnnnnnnnnnnnnnnnnnnnnnnnnnnnnnnnnnnnnnnnnnnnnnnnnnnnnnnnnnnnnnnnnnnnnnnnnnnnnnnnnnnnnnnnnnnnnnnnnnnnnnnnnnnnnnnnnnnnnnnnnnnnnnnnnnnnnnnnnnnnnnnnnnnnnnnnnnnnnnnnnnnnnnnnnnnnnnnnnnnnnnnnnnnnnnnnnnnnnnnnnnnnnnnnnnnnnnnnnnnnnnnnnnnnnnnnnnnnnnnnnnnnnnnnnnnnnnnnnnnnnnnnnnnnnnnnnnnnnnnnnnnnnnnnnnnnnnnnnnnnnnnnnnnnnnnnnnnnnnnnnnnnnnnnnnnnnnnnnnnnnnnnnnnnnnnnnnnnnnnnnnnnnnnnnnnnnnnnnnnnnnnnnnnnnnnnnnnnnnnnnnnnnnnnnnnnnnnnnnnnnnnnnnnnnnnnnnnnnnnnnnnnnnnnnnnnnnnnnnnnnnnnnnnnnnnnnnnnnnnnnnnnnnnnnnnnnnnnnnnnnnnnnnnnnnnnnnnnnnnnnnnnnnnnnnnnnnnnnnnnnnnnnnnnnnnnnnnnnnnnnnnnnnnnnnnnnnnnnnnnnnnnnnnnnnnnnnnnnnnnnnnnnnnnnnnnnnnnnnnnnnnnnnnnnnnnnnnnnnnnnnnnnnnnnnnnnnnnnnnnnnnnnnnnnnnnnnnnnnnnnnnnnnnnnnnnnnnnnnnnnnnnnnnnnnnnnnnnnnnnnnnnnnnnnnnnnnnnnnnnnnnnnnnnnnnnnnnnnnnnnnnnnnnnnnnnnnnnnnnnnnnnnnnnnnnnnnnnnnnnnnnnnnnnnnnnnnnnnnnnnnnnnnnnnnnnnnnnnnnnnnnnnnnnnnnnnnnnnnnnnnnnnnnnnnnnnnnnnnnnnnnnnnnnnnnnnnnnnnnnnnnnnnnnnnnnnnnnnnnnnnnnnnnnnnnnnnnnnnnnnnnnnnnnnnnnnnnnnnnnnnnnnnnnnnnnnnnnnnnnnnnnnnnnnnnnnnnnnnnnnnnnnnnnnnnnnnnnnnnnnnnnnnnnnnnnnnnnnnnnnnnnnnnnnnnnnnnnnnnnnnnnnnnnnnnnnnnnnnnnnnnnnnnnnnnnnnnnnnnnnnnnnnnnnnnnnnnnnnnnnnnnnnnnnnnnnnnnnnnnnnnnnnnnnnnnnnnnnnnnnnnnnnnnnnnnnnnnnnnnnnnnnnnnnnnnnnnnnnnnnnnnnnnnnnnnnnnnnnnnnnnnnnnnnnnnnnnnnnnnnnnnnnnnnnnnnnnnnnnnnnnnnnnnnnnnnnnnnnnnnnnnnnnnnnnnnnnnnnnnnnnnnnnnnnnnnnnnnnnnnnnnnnnnnnnnnnnnnnnnnnnnnnnnnnnnnnnnnnnnnnnnnnnnnnnnnnnnnnnnnnnnnnnnnnnnnnnnnnnnnnnnnnnnnnnnnnnnnnnnnnnnnnnnnnnnnnnnnnnnnnnnnnnnnnnnnnnnnnnnnnnnnnnnnnnnnnnnnnnnnnnnnnnnnnnnnnnnnnnnnnnnnnnnnnnnnnnnnnnnnnnnnnnnnnnnnnnnnnnnnnnnnnnnnnnnnnnnnnnnnnnnnnnnnnnnnnnnnnnnnnnnnnnnnnnnnnnnnnnnnnnnnnnnnnnnnnnnnnnnnnnnnnnnnnnnnnnnnnnnnnnnnnnnnnnnnnnnnnnnnnnnnnnnnnnnnnnnnnnnnnnnnnnnnnnnnnnnnnnnnnnnnnnnnnnnnnnnnnnnnnnnnnnnnnnnnnnnnnnnnnnnnnnnnnnnnnnnnnnnnnnnnnnnnnnnnnnnnnnnnnnnnnnnnnnnnnnnnnnnnnnnnnnnnnnnnnnnnnnnnnnnnnnnnnnnnnnnnnnnnnnnnnnnnnnnnnnnnnnnnnnnnnnnnnnnnnnnnnnnnnnnnnnnnnnnnnnnnnnnnnnnnnnnnnnnnnnnnnnnnnnnnnnnnnnnnnnnnnnnnnnnnnnnnnnnnnnnnnnnnnnnnnnnnnnnnnnnnnnnnnnnnnnnnnnnnnnnnnnnnnnnnnnnnnnnnnnnnnnnnnnnnnnnnnnnnnnnnnnnnnnnnnnnnnnnnnnnnnnnnnnnnnnnnnnnnnnnnnnnnnnnnnnnnnnnnnnnnnnnnnnnnnnnnnnnnnnnnnnnnnnnnnnnnnnnnnnnnnnnnnnnnnnnnnnnnnnnnnnnnnnnnnnnnnnnnnnnnnnnnnnnnnnnnnnnnnnnnnnnnnnnnnnnnnnnnnnnnnnnnnnnnnnnnnnnnnnnnnnnnnnnnnnnnnnnnnnnnnnnnnnnnnnnnnnnnnnnnnnnnnnnnnnnnnnnnnnnnnnnnnnnnnnnnnnnnnnnnnnnnnnnnnnnnnnnnnnnnnnnnnnnnnnnnnnnnnnnnnnnnnnnnnnnnnnnnnnnnnnnnnnnnnnnnnnnnnnnnnnnnnnnnnnnnnnnnnnnnnnnnnnnnnnnnnnnnnnnnnnnnnnnnnnnnnnnnnnnnnnnnnnnnnnnnnnnnnnnnnnnnnnnnnnnnnnnnnnnnnnnnnnnnnnnnnnnnnnnnnnnnnnnnnnnnnnnnnnnnnnnnnnnnnnnnnnnnnnnnnnnnnnnnnnnnnnnnnnnnnnnnnnnnnnnnnnnnnnnnnnnnnnnnnnnnnnnnnnnnnnnnnnnnnnnnnnnnnnnnnnnnnnnnnnnnnnnnnnnnnnnnnnnnnnnnnnnnnnnnnnnnnnnnnnnnnnnnnnnnnnnnnnnnnnnnnnnnnnnnnnnnnnnnnnnnnnnnnnnnnnnnnnnnnnnnnnnnnnnnnnnnnnnnnnnnnnnnnnnnnnnnnnnnnnnnnnnnnnnnnnnnnnnnnnnnnnnnnnnnnnnnnnnnnnnnnnnnnnnnnnnnnnnnnnnnnnnnnnnnnnnnnnnnnnnnnnnnnnnnnnnnnnnnnnnnnnnnnnnnnnnnnnnnnnnnnnnnnnnnnnnnnnnnnnnnnnnnnnnnnnnnnnnnnnnnnnnnnnnnnnnnnnnnnnnnnnnnnnnnnnnnnnnnnnnnnnnnnnnnnnnnnnnnnnnnnnnnnnnnnnnnnnnnnnnnnnnnnnnnnnnnnnnnnnnnnnnnnnnnnnnnnnnnnnnnnnnnnnnnnnnnnnnnnnnnnnnnnnnnnnnnnnnnnnnnnnnnnnnnnnnnnnnnnnnnnnnnnnnnnnnnnnnnnnnnnnnnnnnnnnnnnnnnnnnnnnnnnnnnnnnnnnnnnnnnnnnnnnnnnnnnnnnnnnnnnnnnnnnnnnnnnnnnnnnnnnnnnnnnnnnnnnnnnnnnnnnnnnnnnnnnnnnnnnnnnnnnnnnnnnnnnnnnnnnnnnnnnnnnnnnnnnnnnnnnnnnnnnnnnnnnnnnnnnnnnnnnnnnnnnnnnnnnnnnnnnnnnnnnnnnnnnnnnnnnnnnnnnnnnnnnnnnnnnnnnnnnnnnnnnnnnnnnnnnnnnnnnnnnnnnnnnnnnnnnnnnnnnnnnnnnnnnnnnnnnnnnnnnnnnnnnnnnnnnnnnnnnnnnnnnnnnnnnnnnnnnnnnnnnnnnnnnnnnnnnnnnnnnnnnnnnnnnnnnnnnnnnnnnnnnnnnnnnnnnnnnnnnnnnnnnnnnnnnnnnnnnnnnnnnnnnnnnnnnnnnnnnnnnnnnnnnnnnnnnnnnnnnnnnnnnnnnnnnnnnnnnnnnnnnnnnnnnnnnnnnnnnnnnnnnnnnnnnnnnnnnnnnnnnnnnnnnnnnnnnnnnnnnnnnnnnnnnnnnnnnnnnnnnnnnnnnnnnnnnnnnnnnnnnnnnnnnnnnnnnnnnnnnnnnnnnnnnnnnnnnnnnnnnnnnnnnnnnnnnnnnnnnnnnnnnnnnnnnnnnnnnnnnnnnnnnnnnnnnnnnnnnnnnnnnnnnnnnnnnnnnnnnnnnnnnnnnnnnnnnnnnnnnnnnnnnnnnnnnnnnnnnnnnnnnnnnnnnnnnnnnnnnnnnnnnnnnnnnnnnnnnnnnnnnnnnnnnnnnnnnnnnnnnnnnnnnnnnnnnnnnnnnnnnnnnnnnnnnnnnnnnnnnnnnnnnnnnnnnnnnnnnnnnnnnnnnnnnnnnnnnnnnnnnnnnnnnnnnnnnnnnnnnnnnnnnnnnnnnnnnnnnnnnnnnnnnnnnnnnnnnnnnnnnnnnnnnnnnnnnnnnnnnnnnnnnnnnnnnnnnnnnnnnnnnnnnnnnnnnnnnnnnnnnnnnnnnnnnnnnnnnnnnnnnnnnnnnnnnnnnnnnnnnnnnnnnnnnnnnnnnnnnnnnnnnnnnnnnnnnnnnnnnnnnnnnnnnnnnnnnnnnnnnnnnnnnnnnnnnnnnnnnnnnnnnnnnnnnnnnnnnnnnnnnnnnnnnnnnnnnnnnnnnnnnnnnnnnnnnnnnnnnnnnnnnnnnnnnnnnnnnnnnnnnnnnnnnnnnnnnnnnnnnnnnnnnnnnnnnnnnnnnnnnnnnnnnnnnnnnnnnnnnnnnnnnnnnnnnnnnnnnnnnnnnnnnnnnnnnnnnnnnnnnnnnnnnnnnnnnnnnnnnnnnnnnnnnnnnnnnnnnnnnnnnnnnnnnnnnnnnnnnnnnnnnnnnnnnnnnnnnnnnnnnnnnnnnnnnnnnnnnnnnnnnnnnnnnnnnnnnnnnnnnnnnnnnnnnnnnnnnnnnnnnnnnnnnnnnnnnnnnnnnnnnnnnnnnnnnnnnnnnnnnnnnnnnnnnnnnnnnnnnnnnnnnnnnnnnnnnnnnnnnnnnnnnnnnnnnnnnnnnnnnnnnnnnnnnnnnnnnnnnnnnnnnnnnnnnnnnnnnnnnnnnnnnnnnnnnnnnnnnnnnnnnnnnnnnnnnnnnnnnnnnnnnnnnnnnnnnnnnnnnnnnnnnnnnnnnnnnnnnnnnnnnnnnnnnnnnnnnnnnnnnnnnnnnnnnnnnnnnnnnnnnnnnnnnnnnnnnnnnnnnnnnnnnnnnnnnnnnnnnnnnnnnnnnnnnnnnnnnnnnnnnnnnnnnnnnnnnnnnnnnnnnnnnnnnnnnnnnnnnnnnnnnnnnnnnnnnnnnnnnnnnnnnnnnnnnnnnnnnnnnnnnnnnnnnnnnnnnnnnnnnnnnnnnnnnnnnnnnnnnnnnnnnnnnnnnnnnnnnnnnnnnnnnnnnnnnnnnnnnnnnnnnnnnnnnnnnnnnnnnnnnnnnnnnnnnnnnnnnnnnnnnnnnnnnnnnnnnnnnnnnnnnnnnnnnnnnnnnnnnnnnnnnnnnnnnnnnnnnnnnnnnnnnnnnnnnnnnnnnnnnnnnnnnnnnnnnnnnnnnnnnnnnnnnnnnnnnnnnnnnnnnnnnnnnnnnnnnnnnnnnnnnnnnnnnnnnnnnnnnnnnnnnnnnnnnnnnnnnnnnnnnnnnnnnnnnnnnnnnnnnnnnnnnnnnnnnnnnnnnnnnnnnnnnnnnnnnnnnnnnnnnnnnnnnnnnnnnnnnnnnnnnnnnnnnnnnnnnnnnnnnnnnnnnnnnnnnnnnnnnnnnnnnnnnnnnnnnnnnnnnnnnnnnnnnnnnnnnnnnnnnnnnnnnnnnnnnnnnnnnnnnnnnnnnnnnnnnnnnnnnnnnnnnnnnnnnnnnnnnnnnnnnnnnnnnnnnnnnnnnnnnnnnnnnnnnnnnnnnnnnnnnnnnnnnnnnnnnnnnnnnnnnnnnnnnnnnnnnnnnnnnnnnnnnnnnnnnnnnnnnnnnnnnnnnnnnnnnnnnnnnnnnnnnnnnnnnnnnnnnnnnnnnnnnnnnnnnnnnnnnnnnnnnnnnnnnnnnnnnnnnnnnnnnnnnnnnnnnnnnnnnnnnnnnnnnnnnnnnnnnnnnnnnnnnnnnnnnnnnnnnnnnnnnnnnnnnnnnnnnnnnnnnnnnnnnnnnnnnnnnnnnnnnnnnnnnnnnnnnnnnnnnnnnnnnnnnnnnnnnnnnnnnnnnnnnnnnnnnnnnnnnnnnnnnnnnnnnnnnnnnnnnnnnnnnnnnnnnnnnnnnnnnnnnnnnnnnnnnnnnnnnnnnnnnnnnnnnnnnnnnnnnnnnnnnnnnnnnnnnnnnnnnnnnnnnnnnnnnnnnnnnnnnnnnnnnnnnnnnnnnnnnnnnnnnnnnnnnnnnnnnnnnnnnnnnnnnnnnnnnnnnnnnnnnnnnnnnnnnnnnnnnnnnnnnnnnnnnnnnnnnnnntttgtactttgaggccaaagaaaaaagcaaaaccgaacataaagacaaggaactttgaatcccctcaacttgttcaacaaaaagccagacttggtctggcttttttcatgctcacttcaacagagaccatgcaaagtgggtggtttgtttaccaatatccccacgccatccaaaccatatttaattattaaaatttattcataagatcacaattttttttaccattatatttagtacttatagattctattgattcgacatcatctttcagagcgtcgtccattgaaaggcaggccaattgacaccatttgtacttcgtgcccacttgagcacaccattgatacggcgtggacacgtcaccttggacgcgctgttgatgtcctgtctgaccactggtgatgtatcccatttgttgttgtgcaaagatgatttgtactttgcaagttcaggttttgcagtggatgcaaacgccacccaacgcgtttcattcgttgccagtttgcgacctgagcattcaccgcaatggttggatgtacttcattccaacacaaaaaacggcgatttgaaaattggactgtcacggcagcgggacggcggcaacatcatcaatgcttacacggccacagttgcgagcgccattgagtggtacgccacaggcgatatgcaggcagtgctggccgtggtgaagtccatcccattcataggcaagcgcagaacatcaggatttgggcaagtcaagcaatgggaggtggcctcgggcgaattagatggtttggtgggttttgcagttgagccactgcggccagtgcctacagaacgctggtctgagggtggcgactggactcctgttgaagctgcttggaaagcgccctactgggatgtgcgaaaccgcacctgctgttttgttccggaggtgtgaggtgaatggccccgaatttttcatgcgttatgcaggctatcgcctgctacctgaggataaaaaaactgacgatgcggttgctgatgccgacacattgcttggcatgtcgctgcctatgcatacagggcaatctttgcgactgtcctcatgttggatggttgtgacaccgcaatgggttgccaccagcttcaaggctttagcccttgcgggatttcgccaagaaaccgaacgcaaaacagccatcgatgaggcactgaaaccaggcggaccgtgcatgcttttggcactggacaagcgctccatgacagcccgcgatttgttcgtcacctatgacgcacgtgcggcccgaatgtgcagcccaggttttgtgaagacctatgacgccaccaaggagaaatcatggacatcttgatcgacaagccagctcgcgtgaagggctatgccttgcaccgcatggtggcgcagttccgtaatggcaaacctgcattgtgggcagatgaaggccagcaactccgcatccgacccgaagaggccacaccacccgtgtatgccgcaggtcaaatgctggccttcaccaccacggcctgtgtcgccttcagtagcggacacaagcataaatacctgccgttgtctgattggcgtggacgccgcacatggctggaacaacaagcgcacaaacatggctttgaaattgtgggtgtccacgtgtcgggcggcatgcaagaggtgctcacccatgatggacgtcgcttcaaacttgatgccaccgaattcaccggcctgttgaaagtcatcgaaccccaagcctttgggctttgccttgtcaaaggcattggcaaagtaggcaaagcttttggcttgaatctcttgatcgtgcaataactcaccaaggaaaaaccatgacctcatctcataacctgattgcagacattgagctgctgaccttgcaacctttgaccttcacacaccatggcaccgagggcttgcccttgctgacgcgcggcattgacgatgaaggacgtcaccaacgaacggtctaccttcctgcagctcaactgcgtggcagggtgcggcatgaatcggccatggccgagttacgcaagaaacccgaaaaagccaagctcgaagacgcctacatgctggctttggggcaagacctgcgacccagcgaagacgatgagcccgaggatattcgcctcagcgaacaaatcaagtttcgacagaaaaacccgtttctcgacatttttggcacctggaaagttgccagccgtttgtatgtttcgcacctcttgcctgctgtgaatgtattacccgacaaagtcagccacattcgccgcgaccttgacaccaacgaagacatgatggctttgctggatgacgaggagcaaaaccgcttgtacgaccggcaagacaagcaaggcctggcttcaaaggcagaaagcttaatcaaactaaccaaccgggaattacttgccgctcgcaaagccaaagaccagaccaagttggcggatctcaatgccaagttggaagaactcaaagcgcttaagaaatcacagaagggggatgaccaatccgacaacaccaagcacttgcttgaattacaagtcattcccgcaggcatcacactcaccggcaaactcatcgttcgacatgccacagctttcgacttgaacactttggtcgaggccttcaacggcttaagtcgcaacccctatatgggtgcacaacgcgcccggggctgtggcgaagtgcaaggtcaagtccgctttcaaaatgacttgggtgaggtgttggttgtggtgaagtttggtggtctgcaagctgccaaggtggcgtggacagatgctgggcaacagtggttgctgccacagggcgaactgacaagcgcatgatttatcgaagcccagaacaacagcgctatgccaagttgatcgagggtgctcttcgcccaggcccgcccttgctggcgggggcctcagcaggtttgggcaaaacccatggttacagcatcccactggtgcgctcgggcaagcggattgccatcgccatgagcacacgccagttgatgcagcaatacctcgacagccatgccttggctacagccttgcaagggcacacatgcacggtgggggaactgcaatcccgtcaacactttgaaactgacaaggcctatcaagcgcaccgatccgaagccttgcaagcacaggtgctgttggtcacccatgccgccgccttgattgacagtttgcaaccgggctatgcccaactgcgcgagcgtgatgtggtgttgttcgatgaggccgatttattggccgacgccgcagaccttcgcagcacctttgccatcagcgcggaaacactcaaagcctgccaagctcaacatttgacgcctgaacaagcagcccacaaggtgcgtcaactcaccacatcaactgaagaccgctgtgcagcaagcgccatcttgtatgccctggccaatcctgcgccctacaaaatggtgggtcacaatgacgcaggtgacttggtgctgcgtcaccgcatgcctgggcgcatgctcaagcctttggtgaaagaggcgccacgctgtattttcaccagtggcaccctgcaagtgcacggcagctttgaccattttgtgcgggccatggggctcacggtcatggcgcccgaaagctgccacatcgaacccccgcagcatggccacttgagagttcaagccacggctgatgccttgtctttggaacagatcgcccttcgaatagccgccgctcaaaaccccaccttggtgctcaccagcagccaccgttcgagccaagaactcggggccttgttgccacacgctgtggtgcgtgaagcagatgaacctttggcagatgcggtgcaacgctgccccaccgatggggtgctgatagcagcgggtgcgtggtcgggcttggacgaacctcggctgcgttggcgcacggtggtgattcctcaaaccccatacggtcagcctgttcaggtgaatggaatttcggtgaactacttcatcgacagccaagtggtggccttgcggcgcaccaaccaaggtttgcaccggggtttgcgcacacccgatgcgcagtgcactctgctgttgctggacccgcgaagtagtcgattgactctgcggtcggccatcccagccaggttctcggtggattgggatggctttgaagaaggctcgttggtgttacaaacccatttcaaacgcgagcgcaatcaacaactgaaaaatgcagccttgaagcactacggcaaccagtgcatgtttgaaggctgtgaggtgaccaaagcccattggctggaagtccaccacaccctgcccatcagcgagggcgagcgccgaaccacgctagaagatgtgcaggttttatgcagcaaccaccacaaagaagcccatcatttgctgcgcatggctgctttttctgatgaaaaatcaactgaaatttcaacggagtcaacaacttaaaacgcttcaggtcaagctgccatgtgaatgtgcagttactagaacttgaatggcggtattgaggatggcgcacgaggtcaagctgccatgtgaatgtgcagttactagaactgataagttgttggtaagcagggtcagcgtaggtcaagctgccatgtgaatgtgcagttactagaacgccacagcgttcatccgtgcgccccctccgggtcaagctgccatgtgaatgtgcagttactagaactcgctcgcattaaagtgattagcgc

SEQ ID NO: 222 - DNA, 11869 bp, Artificial Sequence
  Synthetic Oligonucleotide
  misc_feature (1)..(3411): n is a, c, g, or t
nnnnnnnnnnnnnnnnnnnnnnnnnnnnnnnnnnnnnnnnnnnnnnnnnnnnnnnnnnnnnnnnnnnnnnnnnnnnnnnnnnnnnnnnnnnnnnnnnnnnnnnnnnnnnnnnnnnnnnnnnnnnnnnnnnnnnnnnnnnnnnnnnnnnnnnnnnnnnnnnnnnnnnnnnnnnnnnnnnnnnnnnnnnnnnnnnnnnnnnnnnnnnnnnnnnnnnnnnnnnnnnnnnnnnnnnnnnnnnnnnnnnnnnnnnnnnnnnnnnnnnnnnnnnnnnnnnnnnnnnnnnnnnnnnnnnnnnnnnnnnnnnnnnnnnnnnnnnnnnnnnnnnnnnnnnnnnnnnnnnnnnnnnnnnnnnnnnnnnnnnnnnnnnnnnnnnnnnnnnnnnnnnnnnnnnnnnnnnnnnnnnnnnnnnnnnnnnnnnnnnnnnnnnnnnnnnnnnnnnnnnnnnnnnnnnnnnnnnnnnnnnnnnnnnnnnnnnnnnnnnnnnnnnnnnnnnnnnnnnnnnnnnnnnnnnnnnnnnnnnnnnnnnnnnnnnnnnnnnnnnnnnnnnnnnnnnnnnnnnnnnnnnnnnnnnnnnnnnnnnnnnnnnnnnnnnnnnnnnnnnnnnnnnnnnnnnnnnnnnnnnnnnnnnnnnnnnnnnnnnnnnnnnnnnnnnnnnnnnnnnnnnnnnnnnnnnnnnnnnnnnnnnnnnnnnnnnnnnnnnnnnnnnnnnnnnnnnnnnnnnnnnnnnnnnnnnnnnnnnnnnnnnnnnnnnnnnnnnnnnnnnnnnnnnnnnnnnnnnnnnnnnnnnnnnnnnnnnnnnnnnnnnnnnnnnnnnnnnnnnnnnnnnnnnnnnnnnnnnnnnnnnnnnnnnnnnnnnnnnnnnnnnnnnnnnnnnnnnnnnnnnnnnnnnnnnnnnnnnnnnnnnnnnnnnnnnnnnnnnnnnnnnnnnnnnnnnnnnnnnnnnnnnnnnnnnnnnnnnnnnnnnnnnnnnnnnnnnnnnnnnnnnnnnnnnnnnnnnnnnnnnnnnnnnnnnnnnnnnnnnnnnnnnnnnnnnnnnnnnnnnnnnnnnnnnnnnnnnnnnnnnnnnnnnnnnnnnnnnnnnnnnnnnnnnnnnnnnnnnnnnnnnnnnnnnnnnnnnnnnnnnnnnnnnnnnnnnnnnnnnnnnnnnnnnnnnnnnnnnnnnnnnnnnnnnnnnnnnnnnnnnnnnnnnnnnnnnnnnnnnnnnnnnnnnnnnnnnnnnnnnnnnnnnnnnnnnnnnnnnnnnnnnnnnnnnnnnnnnnnnnnnnnnnnnnnnnnnnnnnnnnnnnnnnnnnnnnnnnnnnnnnnnnnnnnnnnnnnnnnnnnnnnnnnnnnnnnnnnnnnnnnnnnnnnnnnnnnnnnnnnnnnnnnnnnnnnnnnnnnnnnnnnnnnnnnnnnnnnnnnnnnnnnnnnnnnnnnnnnnnnnnnnnnnnnnnnnnnnnnnnnnnnnnnnnnnnnnnnnnnnnnnnnnnnnnnnnnnnnnnnnnnnnnnnnnnnnnnnnnnnnnnnnnnnnnnnnnnnnnnnnnnnnnnnnnnnnnnnnnnnnnnnnnnnnnnnnnnnnnnnnnnnnnnnnnnnnnnnnnnnnnnnnnnnnnnnnnnnnnnnnnnnnnnnnnnnnnnnnnnnnnnnnnnnnnnnnnnnnnnnnnnnnnnnnnnnnnnnnnnnnnnnnnnnnnnnnnnnnnnnnnnnnnnnnnnnnnnnnnnnnnnnnnnnnnnnnnnnnnnnnnnnnnnnnnnnnnnnnnnnnnnnnnnnnnnnnnnnnnnnnnnnnnnnnnnnnnnnnnnnnnnnnnnnnnnnnnnnnnnnnnnnnnnnnnnnnnnnnnnnnnnnnnnnnnnnnnnnnnnnnnnnnnnnnnnnnnnnnnnnnnnnnnnnnnnnnnnnnnnnnnnnnnnnnnnnnnnnnnnnnnnnnnnnnnnnnnnnnnnnnnnnnnnnnnnnnnnnnnnnnnnnnnnnnnnnnnnnnnnnnnnnnnnnnnnnnnnnnnnnnnnnnnnnnnnnnnnnnnnnnnnnnnnnnnnnnnnnnnnnnnnnnnnnnnnnnnnnnnnnnnnnnnnnnnnnnnnnnnnnnnnnnnnnnnnnnnnnnnnnnnnnnnnnnnnnnnnnnnnnnnnnnnnnnnnnnnnnnnnnnnnnnnnnnnnnnnnnnnnnnnnnnnnnnnnnnnnnnnnnnnnnnnnnnnnnnnnnnnnnnnnnnnnnnnnnnnnnnnnnnnnnnnnnnnnnnnnnnnnnnnnnnnnnnnnnnnnnnnnnnnnnnnnnnnnnnnnnnnnnnnnnnnnnnnnnnnnnnnnnnnnnnnnnnnnnnnnnnnnnnnnnnnnnnnnnnnnnnnnnnnnnnnnnnnnnnnnnnnnnnnnnnnnnnnnnnnnnnnnnnnnnnnnnnnnnnnnnnnnnnnnnnnnnnnnnnnnnnnnnnnnnnnnnnnnnnnnnnnnnnnnnnnnnnnnnnnnnnnnnnnnnnnnnnnnnnnnnnnnnnnnnnnnnnnnnnnnnnnnnnnnnnnnnnnnnnnnnnnnnnnnnnnnnnnnnnnnnnnnnnnnnnnnnnnnnnnnnnnnnnnnnnnnnnnnnnnnnnnnnnnnnnnnnnnnnnnnnnnnnnnnnnnnnnnnnnnnnnnnnnnnnnnnnnnnnnnnnnnnnnnnnnnnnnnnnnnnnnnnnnnnnnnnnnnnnnnnnnnnnnnnnnnnnnnnnnnnnnnnnnnnnnnnnnnnnnnnnnnnnnnnnnnnnnnnnnnnnnnnnnnnnnnnnnnnnnnnnnnnnnnnnnnnnnnnnnnnnnnnnnnnnnnnnnnnnnnnnnnnnnnnnnnnnnnnnnnnnnnnnnnnnnnnnnnnnnnnnnnnnnnnnnnnnnnnnnnnnnnnnnnnnnnnnnnnnnnnnnnnnnnnnnnnnnnnnnnnnnnnnnnnnnnnnnnnnnnnnnnnnnnnnnnnnnnnnnnnnnnnnnnnnnnnnnnnnnnnnnnnnnnnnnnnnnnnnnnnnnnnnnnnnnnnnnnnnnnnnnnnnnnnnnnnnnnnnnnnnnnnnnnnnnnnnnnnnnnnnnnnnnnnnnnnnnnnnnnnnnnnnnnnnnnnnnnnnnnnnnnnnnnnnnnnnnnnnnnnnnnnnnnnnnnnnnnnnnnnnnnnnnnnnnnnnnnnnnnnnnnnnnnnnnnnnnnnnnnnnnnnnnnnnnnnnnnnnnnnnnnnnnnnnnnnnnnnnnnnnnnnnnnnnnnnnnnnnnnnnnnnnnnnnnnnnnnnnnnnnnnnnnnnnnnnnnnnnnnnnnnnnnnnnnnnnnnnnnnnnnnnnnnnnnnnnnnnnnnnnnnnnnnnnnnnnnnnnnnnnnnnnnnnnnnnnnnnnnnnnnnnnnnnnnnnnnnnnnnnnnnnnnnnnnnnnnnnnnnnnnnnnnnnnnnnnnnnnnnnnnnnnnnnnnnnnnnnnnnnnnnnnnnnnnnnnntcaggatcagttggagcaaacttaacgggaagtgttgactgttctgcagcgaaaattaaaaattattgcgtcactggaattctcgcctcgttcgaggaagatttagatatctggtttaaaaacaacgggttttaattcttaaacgacaattagcaattgtaaaaatcggttttattaaattgcagtatgtagaaaaaaacctgctcaattggaattttaattatcaaaattttattcctaacctgtttaatgtttttttcaccaattactccagctcaaaataatatagaacggcttggactggcagctgcgaatcatttcggtactgcagtttttcttaatattttggcagactcaaattgtaaaaatcaaataatgataaatagtaatcttgacaaccaacaaatcgtaagaaaagaaattatgtcaaaattgtaatccagattatcgaaatctgactttaatcagcttcctaagttattgcaacgtgcggaagatgaaataaaaaaagacttctaccaaatgtttaaaaatgcaaatatttaccagtgcgaaattctgtctattgagtacagtactttatttaaaaaaagtaaaatcgcttgggagaacttaactaacaaataatgtgggtattccaatgaaggagaccgatgtggttaggcgccttgttcagctagtgcaacagcttaatccgttttaatgcaacaccccacaagtaatatcaagctgggaatgctgaccccaccgtacccccaccccccaatttggtttgatggtacctacttgtatttacatcgtgttttgcgcgagtgcggggggagtttttttttaagcagagtggggggtaaagtcggcacttatctttgacctctgccttgaagctctttaatgcacccatctaaagcagctgtaccttttttaaacccaatctccatacacttttttcttaaatcatctacagataaagtattgcctgattgactgggactatcaaactgaatcataaaaggaagaggccgtttattgaaggcaccttgcaaagcgtttgcgtatgcttctgagtatgcaactactttggctgcaaactgtgattttgctgaatcgcttcttattaagtctttatgccacggcgacatttcgtagctagctgaactgtcctgtaggccatatgctatagggttaagcctcaatacaacttgaagatagctaccataaccatcatactgcgtgtaattcataccaaaggttgtgcttggcaaggcaatatcattattaattaagtaagcacgcatacccgcggtcaagctattgccaccggttcctagccaattagaaacatgagaaacatataaacacctttgatcccaaacaccacccccgtaagcgttcttgtgcataacgtcgtttgctttacacagttcattagaatagcgtttgtgaccatagccatattccatgaaatatcccaatcgggaagaaaattgctcctgcaatcagaaaaccccaagctgcattggcaaaacaataaaaaatatggttaaaccaagctgctagacaaactaatccgattagccattgcataattttcttcctattttagttgtctaactgcgtcagcaattgttcgcatatttttagcggcgtcagcgcagctgattttggccgtttttttataggcatctatgccttgaagtgtgaataatgttagattttgactgacccgttcggtatcgctgtcatgcaagcgattcctatatccgtacccaataatctcgttaactgtttcatcagcgagcccatacattggggttaagttgcaagcctttatcacagtcatataagtaaaagaagccatgaatatttgctgaaactcaccttttgacaaaactttattagcttgggataagcccgtggtcatcatgaaaagtaaaacagttatgtttacccattttttcattttcgaaacctctgaattttgggtaagtttatctatttattagactaagcttaccctatccggttcaattacccaaaagcgtttcggtaacttaattactcgaaaacactagtagtctttttttgttgtcacacagctggtgcaaggtctggagttctagggcacaccgttggttgttcgcagacgatatctttgattttttgttcatgcttgagaagattgtttttcttctgatctggtgcgattcgccttaggcagcagtcaggccacatacccctactaacttggtagagctcaccgttgcaacgctcataccaaatcaaccttgccccagtcactttaacttgccacgtgggcctaataccgcactcgctccaactaataagtccctcaaacttcaataccttgactatcagccctaaattttctttttcgccgccatcatcaacaataattgcaaggtcaccgactcttacgtttctcatcacatgctcctgtttagccatttcgacgttgtcgggcatggcaattcggaataactccgccccttaattcaaccttccgtactagtaataaaaaaagccccatcaaggggcttgtagtcgtttagttatctgagcaacttaccagatcacattcgctataagcgtaagcacctttgcctttatgggcgggttgctgtggactttcgtcccctcttaatgtttttaaatattaccactaaaaacgcggtagcccaccctttttattaacgctgtacctatctttgctattgcctcctaagaacgtgcacaaaactcttttgcattctgattttggcgtcaaaaatgtcctacctaaactgaatcgagccctatctcttggcttaagagtgttcaatattgatctgtataagaccgcatctactaactaatcgaacacgatatcggggtaccagtatttgaacgagcgtgaccggcacttagggcaacgatgcagtccatgtaacaagctgccacttggaattactggttctacccaacagccaccgcaggaacagtcgccaaggaatgaaagtaacgtctgccactcaccatctcgccagctgtctccttgactaacccaacgctgctgatcacgcttttcgaagtatgctcttaactgttcctcagacaaatctggaacttggttcgactgagtggaaagacctgaaaccagtgagccaaccgcccgactcagtttttttagtggtgttacggcaggctcaggctttgaacgcggggcatagcgagggagcgactttgtttcgccgcaaccatcacaacacacatgaacgaagctaaatcctcctccctgtacgaccttgaattcgtggtcacagtctttacagcgacaatcaaatactgcacccatgtcttattcccccaagttaccttcctgtatcaggcgttaaccattttttcactgtagcgtctaaattgtaagtaccgagtttacggtaactggttttaaagagaaaaaagttagttggtatctcactttacgatacagtagttgactcatacttatttttaactaatggaggtttgtatggcaagcacaactcaacccatcacggtagaacggcaagataagcaagaaaaagtcgtttgtgatgaaataaaaagagcctacgagtttcttgctgaagagggttttaggccgtcatatgaagaagatgacacagttaaatttcgcgtagaaggtgtgactgcaaggttagaccgattagacgctggctatcgaatctacatatgggtgctcggtgagttgccggaggagcagcgtcccgtctcttattggacagctaactatattaatttgacccagccgtttgttcgtgcaggtgttactgaagataactccctaatagtttcttactcaatgatgggttcagatatttcgcagtttcttgagactctaattgatagcgttaatcgtttattatttgcagggcgaaaagcaaatcagttatttaatgatcagttaaaaccaaagcccctcaatagctgatatcgaaatatagtttcattgcatcattactgtcatcggttgtgtttcgttcctttgctttgcattaagtgtttggagagttgaatggagatgtttacgttacgtgcttacctaaacacgccgattattaaacgagggttcatgactcttgatgcattgcttatgtcaattttaggtaaaggggatgtcagtgatcttttgcgctgcgacgaagggctttattttgcgagcgcagggtttccagttgattcggtgtctgataaatttagagcatcttttgtagcaagtcttcgacccgagcacacccccgagtggttagaagtcattaaaaccaatacaaggtctgacgatttacaaatcggtttggctcgccagcgcgatgctggcaacatcatcaatagctacccaactcaagtagcaactgccatcgagtggtatgcaacggggcaaatgcttgatgttttagatgtcgttaaagatattgtggcaatcggtaagcgccgagttgttgggtacggcgaggtcaagttatgggaagctgagcttggtgaaattgacggcttagttggctttgctgatgaacctttacgcccagttccaaccgttcgctggcacttaagtcatgattttgttcctgtagaagctgcttggaaggccccttattgggatgttcgtaatcgaaccaagtgctttgtgccggagattgacttatgaatggccctgaattttttatgcagcatgctggttaccgtttgctccctgaagatgagaaaactgatgacgtagtcaaagatactgatcgtttatttagtattgcattgccgttaaacacgggtaaatttctaagactatcatcgtgttggtttgtggttactgcggattgggtagcaacaagctttaagaccctacccgaggcaggatttcgccacgatatagaccgtaaaacagcaatcgatttggcacttaaggcaggcaagccctgtgtattgcttggactaggtaaacgaaccacgacggcaaatgatatttacgtgacctacgacccaagagccgcacgtttgtgcgagcaaggtaaaaccaaaacttatgacgctacaaaggagaaagcatggacatcatgattgataagccacctcgtgtgcgcgggtacgcacttcaccgaattgtggaacaacttcaaaacggcaagcctgccttgtgggcagatgaagggtcaactgttcgtattaggcctcatgacgcgcaaccacctctgtacgagatcggaaagttattggcattcacgacaactgcatgtgttgcatttagtaagggccacaagcatgtctatctcccaacatctgattggcgagggcgaagggtatggctagataaacaagcagccaaacatggttttgaggttgttggcgtccacatctctgggggcatgcaaaaaattgaaacccataatggccgaaagttcaccattgatgccactgagtttaccgggcttctgcgcgtaagcgattcgactttattcggtcagtgtttgataaatggagtcggcaaagttggcaaggcatttggtttgaatttgatgatcgttcaataaaacaaaaaaaggcacatgaaatgactaaccagaaaatgaaaatagttgcacaaatcagcttgcattcagtacaaccgctaacgtttactcatcatagtgttgacgggttaccgcttttggcaagaggcatcgatcaagaggggcgccaccttcgcacggtctacatacctgcagcgcaatttagaggtcgagttcggcacgaagcggcgttgagtcagatgcgctctgagagcggcaaggtgaagcttgaagaagcctatatgctagcccttggccaagacctacgcccagcggaagatgacgctccagaacaagtcaggctcaaagagcagattgcggtccgtaaagaaaaccccttattggacttatttggcacatggaagttggctagtcgtttgtatgtctctcacttcatgccagaggtcaatgttctacccgcaaaaatcagccatataagaagggacctagacacgaacgaagatatgatggatgcgctgggttctgatgagcaagaccgtatgtacgatcgtcagagtaaacaaggtatggcctcacaagttggtcaattaattaagcttgccacgcgtgaactaatggctgcaaagaaagcaaaagatgtaaccaaggttgacgaaatagaagccaaaatcttagagttaaaagaacttaaaaaaacgcaaaagggtgatgacgattccgaaaataccaaacatttagttgaacttgagttcatacccgcaggtatcactctgaatggaaaattaactgtaaattcagccatacccaacgacttacgtgtgttagtggatgctttagtggggtttggcgaaaaaccttaccttggcgctcaacgtgctcgtggttgtggggaagttgcacttgaagcaacatttaagaatgcagatggtgatgtactcgctacggtagcctttgctgagggcgagggttctaatgttcaatggactgaggcagggactacttttttaaatgctgaaacaactaccacatgatttaccgcagccctgaacagacacaatatgcgaaattaattgagggtgctattaaaccgggggcaccacttctggcaggagcagcagcaggtctgggtaaaacgcacggctttagcattcctctaattacttcaggaaaacgcattgcgatttgtttaagtactcggcagttgattgatcagtatttaaaaagtgatgcgttgcaggtggcttgcggtggaagatccgtttcggttgtggcgttgcaatcaaggcgagactttacacgtgactcagattatcgctcacacaagaagcaggcgttagaagccgagttattaattaccacccatgcggcagcctttattgacagtttcaatccagagtatgcacagcttcgtagtcgtgatgttgtgctgtttgatgaggctgatttattagctgacgctgctgacctgagaagcacatttagtatttcggctgaagcacttaaagattgtggcgctatgttaggtaatgcgttgagtgcggctaaattagttaaggcaaatgccgttgacgcagaagaccgtggtgctgccagttctatcctatatgccttagagaacccagcttggtacaaagtagttggatatgaggaggatggcgctttaactttaaaacatcgtttgccgggcagaatgcttaagcggcttgtggcagatgtaccacgctgtatttttacaagcggaacacttcaggtatctgggcggtttgattactttgttaaagcacttgggctcacagctatagcaccagagagtaggcacattgatccagtcatgcacggcagcctagatgttcaagttgcatctgatgaaatgtctattaatgaaatggctgaaaagattaaagctgcgaagcggccaacattggttcttacaacaagccacaaaacaacatttgagttgggtcaattactaccagaggccactattagagagtccggagaacctttgactgatgcggttgcgcggtgccccgatgacggcattctaatcgcagcaggtgcttggtctgggctagatgcgccaaggttacgatggaaaacattagtgattccaaaaacaccttatggtgtaagaaacgttttagatggtcatgatgtcgggcgttatatcgatagtaaggttgttgctattcgtcgaactaatcagggactgcatcgtgggcttagaacgcccgacgctcaatgcactttactgctactagacccgcgcagtagtaggtcagaactaagagaggcaataccgtcaaggtttaaagttgattgggttggcttcgaagaggggggccgtgaacttgttgagcacatgaaagctgaacgaaatgaaagccttcgtaaagctgcgctaaagcattatggtgagcaatgcatgtgggtgggctgtacggtgacattacctcacctgctcgatgtgcatcactgcaaccctatttcacttgggcaacgacgaacaacgatgtcagatgttaaagttttatgtaaaaatcatcatgctgaggagcatcataggatgcgaatgagcagtttagatgctctagacaatgatttaaatcaaatagaatcaaagggttgaagaatatcagggtcaagctgccatgtaaatgagcagttactagaacttaattaaccgatggtaaatactgttattgggtcaagctgccatgtaaatgagcagttactagaacttgacaaacaacagtgttacagctcaatacggtcaagctgccatgtaaatgagcagttactagatcgacaaacgaaatataaataacattttcagtgtacgtttgatatgcaccttgtagtggagtgtaaagtggatcctttcgtcaagacaaaag

SEQ ID NO: 223 - DNA, 11862 bp, Artificial Sequence
  Synthetic Oligonucleotide
  misc_feature (1)..(6797): n is a, c, g, or t
nnnnnnnnnnnnnnnnnnnnnnnnnnnnnnnnnnnnnnnnnnnnnnnnnnnnnnnnnnnnnnnnnnnnnnnnnnnnnnnnnnnnnnnnnnnnnnnnnnnnnnnnnnnnnnnnnnnnnnnnnnnnnnnnnnnnnnnnnnnnnnnnnnnnnnnnnnnnnnnnnnnnnnnnnnnnnnnnnnnnnnnnnnnnnnnnnnnnnnnnnnnnnnnnnnnnnnnnnnnnnnnnnnnnnnnnnnnnnnnnnnnnnnnnnnnnnnnnnnnnnnnnnnnnnnnnnnnnnnnnnnnnnnnnnnnnnnnnnnnnnnnnnnnnnnnnnnnnnnnnnnnnnnnnnnnnnnnnnnnnnnnnnnnnnnnnnnnnnnnnnnnnnnnnnnnnnnnnnnnnnnnnnnnnnnnnnnnnnnnnnnnnnnnnnnnnnnnnnnnnnnnnnnnnnnnnnnnnnnnnnnnnnnnnnnnnnnnnnnnnnnnnnnnnnnnnnnnnnnnnnnnnnnnnnnnnnnnnnnnnnnnnnnnnnnnnnnnnnnnnnnnnnnnnnnnnnnnnnnnnnnnnnnnnnnnnnnnnnnnnnnnnnnnnnnnnnnnnnnnnnnnnnnnnnnnnnnnnnnnnnnnnnnnnnnnnnnnnnnnnnnnnnnnnnnnnnnnnnnnnnnnnnnnnnnnnnnnnnnnnnnnnnnnnnnnnnnnnnnnnnnnnnnnnnnnnnnnnnnnnnnnnnnnnnnnnnnnnnnnnnnnnnnnnnnnnnnnnnnnnnnnnnnnnnnnnnnnnnnnnnnnnnnnnnnnnnnnnnnnnnnnnnnnnnnnnnnnnnnnnnnnnnnnnnnnnnnnnnnnnnnnnnnnnnnnnnnnnnnnnnnnnnnnnnnnnnnnnnnnnnnnnnnnnnnnnnnnnnnnnnnnnnnnnnnnnnnnnnnnnnnnnnnnnnnnnnnnnnnnnnnnnnnnnnnnnnnnnnnnnnnnnnnnnnnnnnnnnnnnnnnnnnnnnnnnnnnnnnnnnnnnnnnnnnnnnnnnnnnnnnnnnnnnnnnnnnnnnnnnnnnnnnnnnnnnnnnnnnnnnnnnnnnnnnnnnnnnnnnnnnnnnnnnnnnnnnnnnnnnnnnnnnnnnnnnnnnnnnnnnnnnnnnnnnnnnnnnnnnnnnnnnnnnnnnnnnnnnnnnnnnnnnnnnnnnnnnnnnnnnnnnnnnnnnnnnnnnnnnnnnnnnnnnnnnnnnnnnnnnnnnnnnnnnnnnnnnnnnnnnnnnnnnnnnnnnnnnnnnnnnnnnnnnnnnnnnnnnnnnnnnnnnnnnnnnnnnnnnnnnnnnnnnnnnnnnnnnnnnnnnnnnnnnnnnnnnnnnnnnnnnnnnnnnnnnnnnnnnnnnnnnnnnnnnnnnnnnnnnnnnnnnnnnnnnnnnnnnnnnnnnnnnnnnnnnnnnnnnnnnnnnnnnnnnnnnnnnnnnnnnnnnnnnnnnnnnnnnnnnnnnnnnnnnnnnnnnnnnnnnnnnnnnnnnnnnnnnnnnnnnnnnnnnnnnnnnnnnnnnnnnnnnnnnnnnnnnnnnnnnnnnnnnnnnnnnnnnnnnnnnnnnnnnnnnnnnnnnnnnnnnnnnnnnnnnnnnnnnnnnnnnnnnnnnnnnnnnnnnnnnnnnnnnnnnnnnnnnnnnnnnnnnnnnnnnnnnnnnnnnnnnnnnnnnnnnnnnnnnnnnnnnnnnnnnnnnnnnnnnnnnnnnnnnnnnnnnnnnnnnnnnnnnnnnnnnnnnnnnnnnnnnnnnnnnnnnnnnnnnnnnnnnnnnnnnnnnnnnnnnnnnnnnnnnnnnnnnnnnnnnnnnnnnnnnnnnnnnnnnnnnnnnnnnnnnnnnnnnnnnnnnnnnnnnnnnnnnnnnnnnnnnnnnnnnnnnnnnnnnnnnnnnnnnnnnnnnnnnnnnnnnnnnnnnnnnnnnnnnnnnnnnnnnnnnnnnnnnnnnnnnnnnnnnnnnnnnnnnnnnnnnnnnnnnnnnnnnnnnnnnnnnnnnnnnnnnnnnnnnnnnnnnnnnnnnnnnnnnnnnnnnnnnnnnnnnnnnnnnnnnnnnnnnnnnnnnnnnnnnnnnnnnnnnnnnnnnnnnnnnnnnnnnnnnnnnnnnnnnnnnnnnnnnnnnnnnnnnnnnnnnnnnnnnnnnnnnnnnnnnnnnnnnnnnnnnnnnnnnnnnnnnnnnnnnnnnnnnnnnnnnnnnnnnnnnnnnnnnnnnnnnnnnnnnnnnnnnnnnnnnnnnnnnnnnnnnnnnnnnnnnnnnnnnnnnnnnnnnnnnnnnnnnnnnnnnnnnnnnnnnnnnnnnnnnnnnnnnnnnnnnnnnnnnnnnnnnnnnnnnnnnnnnnnnnnnnnnnnnnnnnnnnnnnnnnnnnnnnnnnnnnnnnnnnnnnnnnnnnnnnnnnnnnnnnnnnnnnnnnnnnnnnnnnnnnnnnnnnnnnnnnnnnnnnnnnnnnnnnnnnnnnnnnnnnnnnnnnnnnnnnnnnnnnnnnnnnnnnnnnnnnnnnnnnnnnnnnnnnnnnnnnnnnnnnnnnnnnnnnnnnnnnnnnnnnnnnnnnnnnnnnnnnnnnnnnnnnnnnnnnnnnnnnnnnnnnnnnnnnnnnnnnnnnnnnnnnnnnnnnnnnnnnnnnnnnnnnnnnnnnnnnnnnnnnnnnnnnnnnnnnnnnnnnnnnnnnnnnnnnnnnnnnnnnnnnnnnnnnnnnnnnnnnnnnnnnnnnnnnnnnnnnnnnnnnnnnnnnnnnnnnnnnnnnnnnnnnnnnnnnnnnnnnnnnnnnnnnnnnnnnnnnnnnnnnnnnnnnnnnnnnnnnnnnnnnnnnnnnnnnnnnnnnnnnnnnnnnnnnnnnnnnnnnnnnnnnnnnnnnnnnnnnnnnnnnnnnnnnnnnnnnnnnnnnnnnnnnnnnnnnnnnnnnnnnnnnnnnnnnnnnnnnnnnnnnnnnnnnnnnnnnnnnnnnnnnnnnnnnnnnnnnnnnnnnnnnnnnnnnnnnnnnnnnnnnnnnnnnnnnnnnnnnnnnnnnnnnnnnnnnnnnnnnnnnnnnnnnnnnnnnnnnnnnnnnnnnnnnnnnnnnnnnnnnnnnnnnnnnnnnnnnnnnnnnnnnnnnnnnnnnnnnnnnnnnnnnnnnnnnnnnnnnnnnnnnnnnnnnnnnnnnnnnnnnnnnnnnnnnnnnnnnnnnnnnnnnnnnnnnnnnnnnnnnnnnnnnnnnnnnnnnnnnnnnnnnnnnnnnnnnnnnnnnnnnnnnnnnnnnnnnnnnnnnnnnnnnnnnnnnnnnnnnnnnnnnnnnnnnnnnnnnnnnnnnnnnnnnnnnnnnnnnnnnnnnnnnnnnnnnnnnnnnnnnnnnnnnnnnnnnnnnnnnnnnnnnnnnnnnnnnnnnnnnnnnnnnnnnnnnnnnnnnnnnnnnnnnnnnnnnnnnnnnnnnnnnnnnnnnnnnnnnnnnnnnnnnnnnnnnnnnnnnnnnnnnnnnnnnnnnnnnnnnnnnnnnnnnnnnnnnnnnnnnnnnnnnnnnnnnnnnnnnnnnnnnnnnnnnnnnnnnnnnnnnnnnnnnnnnnnnnnnnnnnnnnnnnnnnnnnnnnnnnnnnnnnnnnnnnnnnnnnnnnnnnnnnnnnnnnnnnnnnnnnnnnnnnnnnnnnnnnnnnnnnnnnnnnnnnnnnnnnnnnnnnnnnnnnnnnnnnnnnnnnnnnnnnnnnnnnnnnnnnnnnnnnnnnnnnnnnnnnnnnnnnnnnnnnnnnnnnnnnnnnnnnnnnnnnnnnnnnnnnnnnnnnnnnnnnnnnnnnnnnnnnnnnnnnnnnnnnnnnnnnnnnnnnnnnnnnnnnnnnnnnnnnnnnnnnnnnnnnnnnnnnnnnnnnnnnnnnnnnnnnnnnnnnnnnnnnnnnnnnnnnnnnnnnnnnnnnnnnnnnnnnnnnnnnnnnnnnnnnnnnnnnnnnnnnnnnnnnnnnnnnnnnnnnnnnnnnnnnnnnnnnnnnnnnnnnnnnnnnnnnnnnnnnnnnnnnnnnnnnnnnnnnnnnnnnnnnnnnnnnnnnnnnnnnnnnnnnnnnnnnnnnnnnnnnnnnnnnnnnnnnnnnnnnnnnnnnnnnnnnnnnnnnnnnnnnnnnnnnnnnnnnnnnnnnnnnnnnnnnnnnnnnnnnnnnnnnnnnnnnnnnnnnnnnnnnnnnnnnnnnnnnnnnnnnnnnnnnnnnnnnnnnnnnnnnnnnnnnnnnnnnnnnnnnnnnnnnnnnnnnnnnnnnnnnnnnnnnnnnnnnnnnnnnnnnnnnnnnnnnnnnnnnnnnnnnnnnnnnnnnnnnnnnnnnnnnnnnnnnnnnnnnnnnnnnnnnnnnnnnnnnnnnnnnnnnnnnnnnnnnnnnnnnnnnnnnnnnnnnnnnnnnnnnnnnnnnnnnnnnnnnnnnnnnnnnnnnnnnnnnnnnnnnnnnnnnnnnnnnnnnnnnnnnnnnnnnnnnnnnnnnnnnnnnnnnnnnnnnnnnnnnnnnnnnnnnnnnnnnnnnnnnnnnnnnnnnnnnnnnnnnnnnnnnnnnnnnnnnnnnnnnnnnnnnnnnnnnnnnnnnnnnnnnnnnnnnnnnnnnnnnnnnnnnnnnnnnnnnnnnnnnnnnnnnnnnnnnnnnnnnnnnnnnnnnnnnnnnnnnnnnnnnnnnnnnnnnnnnnnnnnnnnnnnnnnnnnnnnnnnnnnnnnnnnnnnnnnnnnnnnnnnnnnnnnnnnnnnnnnnnnnnnnnnnnnnnnnnnnnnnnnnnnnnnnnnnnnnnnnnnnnnnnnnnnnnnnnnnnnnnnnnnnnnnnnnnnnnnnnnnnnnnnnnnnnnnnnnnnnnnnnnnnnnnnnnnnnnnnnnnnnnnnnnnnnnnnnnnnnnnnnnnnnnnnnnnnnnnnnnnnnnnnnnnnnnnnnnnnnnnnnnnnnnnnnnnnnnnnnnnnnnnnnnnnnnnnnnnnnnnnnnnnnnnnnnnnnnnnnnnnnnnnnnnnnnnnnnnnnnnnnnnnnnnnnnnnnnnnnnnnnnnnnnnnnnnnnnnnnnnnnnnnnnnnnnnnnnnnnnnnnnnnnnnnnnnnnnnnnnnnnnnnnnnnnnnnnnnnnnnnnnnnnnnnnnnnnnnnnnnnnnnnnnnnnnnnnnnnnnnnnnnnnnnnnnnnnnnnnnnnnnnnnnnnnnnnnnnnnnnnnnnnnnnnnnnnnnnnnnnnnnnnnnnnnnnnnnnnnnnnnnnnnnnnnnnnnnnnnnnnnnnnnnnnnnnnnnnnnnnnnnnnnnnnnnnnnnnnnnnnnnnnnnnnnnnnnnnnnnnnnnnnnnnnnnnnnnnnnnnnnnnnnnnnnnnnnnnnnnnnnnnnnnnnnnnnnnnnnnnnnnnnnnnnnnnnnnnnnnnnnnnnnnnnnnnnnnnnnnnnnnnnnnnnnnnnnnnnnnnnnnnnnnnnnnnnnnnnnnnnnnnnnnnnnnnnnnnnnnnnnnnnnnnnnnnnnnnnnnnnnnnnnnnnnnnnnnnnnnnnnnnnnnnnnnnnnnnnnnnnnnnnnnnnnnnnnnnnnnnnnnnnnnnnnnnnnnnnnnnnnnnnnnnnnnnnnnnnnnnnnnnnnnnnnnnnnnnnnnnnnnnnnnnnnnnnnnnnnnnnnnnnnnnnnnnnnnnnnnnnnnnnnnnnnnnnnnnnnnnnnnnnnnnnnnnnnnnnnnnnnnnnnnnnnnnnnnnnnnnnnnnnnnnnnnnnnnnnnnnnnnnnnnnnnnnnnnnnnnnnnnnnnnnnnnnnnnnnnnnnnnnnnnnnnnnnnnnnnnnnnnnnnnnnnnnnnnnnnnnnnnnnnnnnnnnnnnnnnnnnnnnnnnnnnnnnnnnnnnnnnnnnnnnnnnnnnnnnnnnnnnnnnnnnnnnnnnnnnnnnnnnnnnnnnnnnnnnnnnnnnnnnnnnnnnnnnnnnnnnnnnnnnnnnnnnnnnnnnnnnnnnnnnnnnnnnnnnnnnnnnnnnnnnnnnnnnnnnnnnnnnnnnnnnnnnnnnnnnnnnnnnnnnnnnnnnnnnnnnnnnnnnnnnnnnnnnnnnnnnnnnnnnnnnnnnnnnnnnnnnnnnnnnnnnnnnnnnnnnnnnnnnnnnnnnnnnnnnnnnnnnnnnnnnnnnnnnnnnnnnnnnnnnnnnnnnnnnnnnnnnnnnnnnnnnnnnnnnnnnnnnnnnnnnnnnnnnnnnnnnnnnnnnnnnnnnnnnnnnnnnnnnnnnnnnnnnnnnnnnnnnnnnnnnnnnnnnnnnnnnnnnnnnnnnnnnnnnnnnnnnnnnnnnnnnnnnnnnnnnnnnnnnnnnnnnnnnnnnnnnnnnnnnnnnnnnnnnnnnnnnnnnnnnnnnnnnnnnnnnnnnnnnnnnnnnnnnnnnnnnnnnnnnnnnnnnnnnnnnnnnnnnnnnnnnnnnnnnnnnnnnnnnnnnnnnnnnnnnnnnnnnnnnnnnnnnnnnnnnnnnnnnnnnnnnnnnnnnnnnnnnnnnnnnnnnnnnnnnnnnnnnnnnnnnnnnnnnnnnnnnnnnnnnnnnnnnnnnnnnnnnnnnnnnnnnnnnnnnnnnnnnnnnnnnnnnnnnnnnnnnnnnnnnnnnnnnnnnnnnnnnnnnnnnnnnnnnnnnnnnnnnnnnnnnnnnnnnnnnnnnnnnnnnnnnnnnnnnnnnnnnnnnnnnnnnnnnnnnnnnnnnnnnnnnnnnnnnnnnnnnnnnnnnnnnnnnnnnnnnnnnnnnnnnnnnnnnnnnnnnnnnnnnnnnnnnnnnnnnnnnnnnnnnnnnnnnnnnnnnnnnnnnnnnnnnnnnnnnnnnnnnnnnnnnnnnnnnnnnnnnnnnnnnnnnnnnnnnnnnnnnnnnnnnnnnnnnnnnnnnnnnnnnnnnnnnnnnnnnnnnnnnnnnnnnnnnnnnnnnnnnnnggtagaatgcgcgccacgccccggtagctcagtggatagagcgaccccctcctaaggggtaggtcggacgttcgattcgtcttcggggcaccaataaattcaatgtgttaggccatcgtaaccggtggcctttttgctttgtagggttccatgtaaccggtgtgcaaccgcacttttttaatccggcctgtttggtggcgtcactgaccacgcatgaaaaatcgggacgggtggggtccgatgaagaaacttgaggctcgacgtgatactcggctacattcgacgctgggttacaagccacaccgataggagacctcgtgaaaccgtttgtaattcgcgccaatttgcgcaccccggttatctttaatggctacatgacgctagacgctctgctgatggcggagcttcagcgcggtgatgtcagcgacttgatccactgcgttgatgacctgtacttcgcgagtgccgcagtactggatagcgaaacgggaaagatcaaggcatcgttcgtcgccagcatgcggccagaacgcacgccggaatggctggacgtcatcgcacccaacagcaacaaaaacacggacgtcgcgatgggtgactcgcgttctcgtgaggccggtaacgtggtcaatggctatgacgcaagggttgcctcatccgtggtgtggtacgccaccggcgacaaggatgccgtgctggaggtgctgcgagatgtgaagttcatcggcaaacggcgcgcttctggctacggcgaagtgatccattgggaagcagaagacggcgagctcgacggattggtcggctatctcaacgaccccctccgacccattcccgcccaccgctggacagaaggcggtgaccagatcgccatcgatacggcatggaagccgccctattgggcaatcgagaaccgagccaagtgcttcgcaccggaggtcacttgaacagtgctgagttctttatgaggtactgcggcgacaagttgctgccggtcgaattgaaatcaggcaatgacgtcaaggacgccgcaaccgtactggcgatgagtcatccgctttataccggcaagacgctccgtctatccagttgctggatggtcatcacgccgactggggtgaccacaagtttcaaggcacatccttcaaccggatttgatacaagcgggaagatcgaacgcaaggacgccattgttgctgcactcaagcaaggggactgcatgttgcttgccttgagcaagcggtcaatgacaccggcagacttgttcattacctacgacccacgggcggcacgcttatgcagccccggcgaggtcaaaacttttgatgccaccagggagaagacatggacaccgtaattgacaagccagcgcggattcgtggctacgcactgcaccgtatcgtcgagcagcatcagcagggcgtgcctgccttgtggtcagatgaagggagtcagctccgcatccggccaaggacggcacatgcgccggtctatgaggcggggaagttgcttggattcacggtgaccgcgtgtgtctcgttcaagtgccacggcaagcaccgctatctgccgctggatgactggcgcggccgcagggtgtggctggagaagaaagccgaaaagcacggttttgagatcgtcggcgtgcatgttgaacccaagatgcagaagatcgaatcgcacgacgggcgcaagttccggctggacgcgaccgatttcaccggcctcctgcgggtgaccgatcccgtgaagttcagcaaggcattgaccgatggcatcggcgttgtcggcaaggcattcggactcaacctattaaccgtgcagtaattctttgaaccggagaacaagcgtgagcaaaaacattttcggcaacatcaccatcaccaccgttgatcccgtgtcgttcagccaccacagtcaggaaggtctgccgatgatgactcgcggcgttgatggcgagggcaggcacctcaagacagtattcctgccggcggcaggcttgcgtgggcgcatccgccatgaggtcgcaatgtcagtgcttgagcgcgaaggcaaagccaagctggggcgcgcctacatgctggcgttggggcagtcgaccgatggtcgtgtcgaggatgaaggcgacgtgcaatacaaaattggggagcaacttgccctgcgcgaaaaggagcctgtggtcgatctgtttggcacttggaagatcaatagccgcttgcaggtcagtcacctgatgcctgcggtgaatgtccagccggataccttcagcttcattcggcgtgatctggacagcaacgaagagatgttcgcgttgtttgatgcaagtgcgcaggacgccttctatgatcgacagactacgctgtcgcaagcgtccaaggcaggcgacatgatcaaggtggcgaccagtgcgctgatgaaggcgaagaaagccaaggcctcacaggaagagatcgatgcgctggaagccaaggttgacgaattgaaggcactcaagaccgcccacaaggacgaggcaggtggcgacggcaacaacagcaagcatttgctggaagtcgaggcaatccctgctggtatcgatctgcttggcagcatggttgtgaagaatgccaaatcacgcgaccttgaaatgctgatcgaagcgttcgatcgcatcagtcaaaagcccaagcttggtgcgcatacggcacgggggtgcggcgaggtgacgggtaacgccaccttcaccaacgacgacggcgaggtgctggcagttgtgcgttttggtggatacaagaaagccgctgtcgagtggacaaaaaccgggaaggactacatcgcagcgtgatgatcttggcgattttttagatgccgcttggcgtgcaatcgtcaaggaatcatggtgactcggctgatcaggatggagagcccccttttttgtggggttactagaacttaatgccgtagaggtgatgcgccagcacggatggagagcccccttgtttgtggggttactagaacaagcaggcgatggtctattacaacccgagcgatggagagcccccttgtttgtggggttactagaacaacgaaggctatcaggtgacgctggccgacgatggagagcccccttgtttgtggggttactagaactggggacgccaccttatccccgctaaggcagatggagagcccccttgtttgtggggttatttttagggttgttcgcatgtacagaggcaaagaacaaaagcaatacgcgaagctgattaccgacgcagtcggtgccggtgcgccgctgctcgcgggtgcggccgccggtctgggcaagacccatgggtatacgatcccgctggtgaccagcggcaagcgtgtcgcgatcagcatgtcgacacggcagttgatcgatcaatacatgcagtccgatgcgctcaagtcggcgctggaactgtcacccaccacggtcgccgtcctgcgttcgcgccgtgaattcgacagcagcaaggactaccgcgaacacaaggaacaggcacttgcggcgcaggtgctggtggtgacgcacgccgccgcgctgatcgatagctttaaccctgactatgccggtctgcggaatcgtgatgttgtcctgttcgatgaggccgatttgctcgccgacgccgccgacctgcgctcgactttcgccatcgacgggcaaggtattaccgaccgcgatgccgtgctgcgtcgggcagagcggtctgatgatccagaggaacgtgcggcagcaagcgccatccgctacgccattgagcatccagcgttctacaaggtggttgggtttgatgacgatggcacgctgatgctcaagcaccggatgcccgggcggatgctcaagccgttggtgcaggactgcaaacggatcatcttcaccagcggcacgctgcaggtgaataggcgattcgactacttcattcgcgccattggactgaccgctattgatccgtccagccggcacattgacccagttcagcatggcagtctgaccgtcgagatcacgtctgacgacctgaccgccgagcagaaggcgcaatcgatcatggcggcagaacgtccctgccttgtgctgaccaccagtcatgccgatacagaggcgttaggcacactggtatccggcgcggtggtgcgcgaaaaaggtgagccgctggtagatgcagtggcacgatgcccagcagatgccatcctgattgctgcaggcgcatggagcggtctggacgagccgaggttgcgttggaagactgtggtgatacccaaggctccgtatggcgctccgaccgagatcgacggccagcagatcacgcactacatcgatagtaaggtgacggcggccaggcgcatcaaccaaggtctgcaccgtggtctgcggacacagggggcggtctgcaaattgttgctgctcgatccgcgttgcaaccgtccggagttactcgcggcgataccggcgcggtttagcgtgcagtcattcagcgagggtcagcgcgttgagttggtactgagcaaggccgagcgcgatccgatgctgagaaaggcggcattaaaggcacatggcgcggtgtgtgccgactgcggcgacaccaacctgcatcgccttgacgtccatcacctgagtcctgtcagcgagggtcagcgcaggacgacggtcaaggatgtggtggtggtctgcaagaactgccatgcagaccggcatcatgcgatgcgtgacaacgcgtgacaactttggtgaacccgccacggtatctctgttgattgaacagacatacggcagagcggagcgggtgagtcgcgaccctggtgcttctggcgtgacacggtcgggcagtacgccgagatgatctgggggaagactggggcagctatgcacctgcgggttcaaccgatcggcactagctacagttcgcggctgatcctacgcacgccgtcgtcttccgggtggggttcgctgcggaagccaaggccttgcaccagtttcagcatcgggtggttggttttcagcacttcgccttccatcactttcaggcccttgccgcgggccacgtccatcagcacgcccatgagc

SEQ ID NO: 224 - DNA, 11860 bp, Artificial Sequence
  Synthetic Oligonucleotide
  misc_feature (1)..(7154): n is a, c, g, or t
nnnnnnnnnnnnnnnnnnnnnnnnnnnnnnnnnnnnnnnnnnnnnnnnnnnnnnnnnnnnnnnnnnnnnnnnnnnnnnnnnnnnnnnnnnnnnnnnnnnnnnnnnnnnnnnnnnnnnnnnnnnnnnnnnnnnnnnnnnnnnnnnnnnnnnnnnnnnnnnnnnnnnnnnnnnnnnnnnnnnnnnnnnnnnnnnnnnnnnnnnnnnnnnnnnnnnnnnnnnnnnnnnnnnnnnnnnnnnnnnnnnnnnnnnnnnnnnnnnnnnnnnnnnnnnnnnnnnnnnnnnnnnnnnnnnnnnnnnnnnnnnnnnnnnnnnnnnnnnnnnnnnnnnnnnnnnnnnnnnnnnnnnnnnnnnnnnnnnnnnnnnnnnnnnnnnnnnnnnnnnnnnnnnnnnnnnnnnnnnnnnnnnnnnnnnnnnnnnnnnnnnnnnnnnnnnnnnnnnnnnnnnnnnnnnnnnnnnnnnnnnnnnnnnnnnnnnnnnnnnnnnnnnnnnnnnnnnnnnnnnnnnnnnnnnnnnnnnnnnnnnnnnnnnnnnnnnnnnnnnnnnnnnnnnnnnnnnnnnnnnnnnnnnnnnnnnnnnnnnnnnnnnnnnnnnnnnnnnnnnnnnnnnnnnnnnnnnnnnnnnnnnnnnnnnnnnnnnnnnnnnnnnnnnnnnnnnnnnnnnnnnnnnnnnnnnnnnnnnnnnnnnnnnnnnnnnnnnnnnnnnnnnnnnnnnnnnnnnnnnnnnnnnnnnnnnnnnnnnnnnnnnnnnnnnnnnnnnnnnnnnnnnnnnnnnnnnnnnnnnnnnnnnnnnnnnnnnnnnnnnnnnnnnnnnnnnnnnnnnnnnnnnnnnnnnnnnnnnnnnnnnnnnnnnnnnnnnnnnnnnnnnnnnnnnnnnnnnnnnnnnnnnnnnnnnnnnnnnnnnnnnnnnnnnnnnnnnnnnnnnnnnnnnnnnnnnnnnnnnnnnnnnnnnnnnnnnnnnnnnnnnnnnnnnnnnnnnnnnnnnnnnnnnnnnnnnnnnnnnnnnnnnnnnnnnnnnnnnnnnnnnnnnnnnnnnnnnnnnnnnnnnnnnnnnnnnnnnnnnnnnnnnnnnnnnnnnnnnnnnnnnnnnnnnnnnnnnnnnnnnnnnnnnnnnnnnnnnnnnnnnnnnnnnnnnnnnnnnnnnnnnnnnnnnnnnnnnnnnnnnnnnnnnnnnnnnnnnnnnnnnnnnnnnnnnnnnnnnnnnnnnnnnnnnnnnnnnnnnnnnnnnnnnnnnnnnnnnnnnnnnnnnnnnnnnnnnnnnnnnnnnnnnnnnnnnnnnnnnnnnnnnnnnnnnnnnnnnnnnnnnnnnnnnnnnnnnnnnnnnnnnnnnnnnnnnnnnnnnnnnnnnnnnnnnnnnnnnnnnnnnnnnnnnnnnnnnnnnnnnnnnnnnnnnnnnnnnnnnnnnnnnnnnnnnnnnnnnnnnnnnnnnnnnnnnnnnnnnnnnnnnnnnnnnnnnnnnnnnnnnnnnnnnnnnnnnnnnnnnnnnnnnnnnnnnnnnnnnnnnnnnnnnnnnnnnnnnnnnnnnnnnnnnnnnnnnnnnnnnnnnnnnnnnnnnnnnnnnnnnnnnnnnnnnnnnnnnnnnnnnnnnnnnnnnnnnnnnnnnnnnnnnnnnnnnnnnnnnnnnnnnnnnnnnnnnnnnnnnnnnnnnnnnnnnnnnnnnnnnnnnnnnnnnnnnnnnnnnnnnnnnnnnnnnnnnnnnnnnnnnnnnnnnnnnnnnnnnnnnnnnnnnnnnnnnnnnnnnnnnnnnnnnnnnnnnnnnnnnnnnnnnnnnnnnnnnnnnnnnnnnnnnnnnnnnnnnnnnnnnnnnnnnnnnnnnnnnnnnnnnnnnnnnnnnnnnnnnnnnnnnnnnnnnnnnnnnnnnnnnnnnnnnnnnnnnnnnnnnnnnnnnnnnnnnnnnnnnnnnnnnnnnnnnnnnnnnnnnnnnnnnnnnnnnnnnnnnnnnnnnnnnnnnnnnnnnnnnnnnnnnnnnnnnnnnnnnnnnnnnnnnnnnnnnnnnnnnnnnnnnnnnnnnnnnnnnnnnnnnnnnnnnnnnnnnnnnnnnnnnnnnnnnnnnnnnnnnnnnnnnnnnnnnnnnnnnnnnnnnnnnnnnnnnnnnnnnnnnnnnnnnnnnnnnnnnnnnnnnnnnnnnnnnnnnnnnnnnnnnnnnnnnnnnnnnnnnnnnnnnnnnnnnnnnnnnnnnnnnnnnnnnnnnnnnnnnnnnnnnnnnnnnnnnnnnnnnnnnnnnnnnnnnnnnnnnnnnnnnnnnnnnnnnnnnnnnnnnnnnnnnnnnnnnnnnnnnnnnnnnnnnnnnnnnnnnnnnnnnnnnnnnnnnnnnnnnnnnnnnnnnnnnnnnnnnnnnnnnnnnnnnnnnnnnnnnnnnnnnnnnnnnnnnnnnnnnnnnnnnnnnnnnnnnnnnnnnnnnnnnnnnnnnnnnnnnnnnnnnnnnnnnnnnnnnnnnnnnnnnnnnnnnnnnnnnnnnnnnnnnnnnnnnnnnnnnnnnnnnnnnnnnnnnnnnnnnnnnnnnnnnnnnnnnnnnnnnnnnnnnnnnnnnnnnnnnnnnnnnnnnnnnnnnnnnnnnnnnnnnnnnnnnnnnnnnnnnnnnnnnnnnnnnnnnnnnnnnnnnnnnnnnnnnnnnnnnnnnnnnnnnnnnnnnnnnnnnnnnnnnnnnnnnnnnnnnnnnnnnnnnnnnnnnnnnnnnnnnnnnnnnnnnnnnnnnnnnnnnnnnnnnnnnnnnnnnnnnnnnnnnnnnnnnnnnnnnnnnnnnnnnnnnnnnnnnnnnnnnnnnnnnnnnnnnnnnnnnnnnnnnnnnnnnnnnnnnnnnnnnnnnnnnnnnnnnnnnnnnnnnnnnnnnnnnnnnnnnnnnnnnnnnnnnnnnnnnnnnnnnnnnnnnnnnnnnnnnnnnnnnnnnnnnnnnnnnnnnnnnnnnnnnnnnnnnnnnnnnnnnnnnnnnnnnnnnnnnnnnnnnnnnnnnnnnnnnnnnnnnnnnnnnnnnnnnnnnnnnnnnnnnnnnnnnnnnnnnnnnnnnnnnnnnnnnnnnnnnnnnnnnnnnnnnnnnnnnnnnnnnnnnnnnnnnnnnnnnnnnnnnnnnnnnnnnnnnnnnnnnnnnnnnnnnnnnnnnnnnnnnnnnnnnnnnnnnnnnnnnnnnnnnnnnnnnnnnnnnnnnnnnnnnnnnnnnnnnnnnnnnnnnnnnnnnnnnnnnnnnnnnnnnnnnnnnnnnnnnnnnnnnnnnnnnnnnnnnnnnnnnnnnnnnnnnnnnnnnnnnnnnnnnnnnnnnnnnnnnnnnnnnnnnnnnnnnnnnnnnnnnnnnnnnnnnnnnnnnnnnnnnnnnnnnnnnnnnnnnnnnnnnnnnnnnnnnnnnnnnnnnnnnnnnnnnnnnnnnnnnnnnnnnnnnnnnnnnnnnnnnnnnnnnnnnnnnnnnnnnnnnnnnnnnnnnnnnnnnnnnnnnnnnnnnnnnnnnnnnnnnnnnnnnnnnnnnnnnnnnnnnnnnnnnnnnnnnnnnnnnnnnnnnnnnnnnnnnnnnnnnnnnnnnnnnnnnnnnnnnnnnnnnnnnnnnnnnnnnnnnnnnnnnnnnnnnnnnnnnnnnnnnnnnnnnnnnnnnnnnnnnnnnnnnnnnnnnnnnnnnnnnnnnnnnnnnnnnnnnnnnnnnnnnnnnnnnnnnnnnnnnnnnnnnnnnnnnnnnnnnnnnnnnnnnnnnnnnnnnnnnnnnnnnnnnnnnnnnnnnnnnnnnnnnnnnnnnnnnnnnnnnnnnnnnnnnnnnnnnnnnnnnnnnnnnnnnnnnnnnnnnnnnnnnnnnnnnnnnnnnnnnnnnnnnnnnnnnnnnnnnnnnnnnnnnnnnnnnnnnnnnnnnnnnnnnnnnnnnnnnnnnnnnnnnnnnnnnnnnnnnnnnnnnnnnnnnnnnnnnnnnnnnnnnnnnnnnnnnnnnnnnnnnnnnnnnnnnnnnnnnnnnnnnnnnnnnnnnnnnnnnnnnnnnnnnnnnnnnnnnnnnnnnnnnnnnnnnnnnnnnnnnnnnnnnnnnnnnnnnnnnnnnnnnnnnnnnnnnnnnnnnnnnnnnnnnnnnnnnnnnnnnnnnnnnnnnnnnnnnnnnnnnnnnnnnnnnnnnnnnnnnnnnnnnnnnnnnnnnnnnnnnnnnnnnnnnnnnnnnnnnnnnnnnnnnnnnnnnnnnnnnnnnnnnnnnnnnnnnnnnnnnnnnnnnnnnnnnnnnnnnnnnnnnnnnnnnnnnnnnnnnnnnnnnnnnnnnnnnnnnnnnnnnnnnnnnnnnnnnnnnnnnnnnnnnnnnnnnnnnnnnnnnnnnnnnnnnnnnnnnnnnnnnnnnnnnnnnnnnnnnnnnnnnnnnnnnnnnnnnnnnnnnnnnnnnnnnnnnnnnnnnnnnnnnnnnnnnnnnnnnnnnnnnnnnnnnnnnnnnnnnnnnnnnnnnnnnnnnnnnnnnnnnnnnnnnnnnnnnnnnnnnnnnnnnnnnnnnnnnnnnnnnnnnnnnnnnnnnnnnnnnnnnnnnnnnnnnnnnnnnnnnnnnnnnnnnnnnnnnnnnnnnnnnnnnnnnnnnnnnnnnnnnnnnnnnnnnnnnnnnnnnnnnnnnnnnnnnnnnnnnnnnnnnnnnnnnnnnnnnnnnnnnnnnnnnnnnnnnnnnnnnnnnnnnnnnnnnnnnnnnnnnnnnnnnnnnnnnnnnnnnnnnnnnnnnnnnnnnnnnnnnnnnnnnnnnnnnnnnnnnnnnnnnnnnnnnnnnnnnnnnnnnnnnnnnnnnnnnnnnnnnnnnnnnnnnnnnnnnnnnnnnnnnnnnnnnnnnnnnnnnnnnnnnnnnnnnnnnnnnnnnnnnnnnnnnnnnnnnnnnnnnnnnnnnnnnnnnnnnnnnnnnnnnnnnnnnnnnnnnnnnnnnnnnnnnnnnnnnnnnnnnnnnnnnnnnnnnnnnnnnnnnnnnnnnnnnnnnnnnnnnnnnnnnnnnnnnnnnnnnnnnnnnnnnnnnnnnnnnnnnnnnnnnnnnnnnnnnnnnnnnnnnnnnnnnnnnnnnnnnnnnnnnnnnnnnnnnnnnnnnnnnnnnnnnnnnnnnnnnnnnnnnnnnnnnnnnnnnnnnnnnnnnnnnnnnnnnnnnnnnnnnnnnnnnnnnnnnnnnnnnnnnnnnnnnnnnnnnnnnnnnnnnnnnnnnnnnnnnnnnnnnnnnnnnnnnnnnnnnnnnnnnnnnnnnnnnnnnnnnnnnnnnnnnnnnnnnnnnnnnnnnnnnnnnnnnnnnnnnnnnnnnnnnnnnnnnnnnnnnnnnnnnnnnnnnnnnnnnnnnnnnnnnnnnnnnnnnnnnnnnnnnnnnnnnnnnnnnnnnnnnnnnnnnnnnnnnnnnnnnnnnnnnnnnnnnnnnnnnnnnnnnnnnnnnnnnnnnnnnnnnnnnnnnnnnnnnnnnnnnnnnnnnnnnnnnnnnnnnnnnnnnnnnnnnnnnnnnnnnnnnnnnnnnnnnnnnnnnnnnnnnnnnnnnnnnnnnnnnnnnnnnnnnnnnnnnnnnnnnnnnnnnnnnnnnnnnnnnnnnnnnnnnnnnnnnnnnnnnnnnnnnnnnnnnnnnnnnnnnnnnnnnnnnnnnnnnnnnnnnnnnnnnnnnnnnnnnnnnnnnnnnnnnnnnnnnnnnnnnnnnnnnnnnnnnnnnnnnnnnnnnnnnnnnnnnnnnnnnnnnnnnnnnnnnnnnnnnnnnnnnnnnnnnnnnnnnnnnnnnnnnnnnnnnnnnnnnnnnnnnnnnnnnnnnnnnnnnnnnnnnnnnnnnnnnnnnnnnnnnnnnnnnnnnnnnnnnnnnnnnnnnnnnnnnnnnnnnnnnnnnnnnnnnnnnnnnnnnnnnnnnnnnnnnnnnnnnnnnnnnnnnnnnnnnnnnnnnnnnnnnnnnnnnnnnnnnnnnnnnnnnnnnnnnnnnnnnnnnnnnnnnnnnnnnnnnnnnnnnnnnnnnnnnnnnnnnnnnnnnnnnnnnnnnnnnnnnnnnnnnnnnnnnnnnnnnnnnnnnnnnnnnnnnnnnnnnnnnnnnnnnnnnnnnnnnnnnnnnnnnnnnnnnnnnnnnnnnnnnnnnnnnnnnnnnnnnnnnnnnnnnnnnnnnnnnnnnnnnnnnnnnnnnnnnnnnnnnnnnnnnnnnnnnnnnnnnnnnnnnnnnnnnnnnnnnnnnnnnnnnnnnnnnnnnnnnnnnnnnnnnnnnnnnnnnnnnnnnnnnnnnnnnnnnnnnnnnnnnnnnnnnnnnnnnnnnnnnnnnnnnnnnnnnnnnnnnnnnnnnnnnnnnnnnnnnnnnnnnnnnnnnnnnnnnnnnnnnnnnnnnnnnnnnnnnnnnnnnnnnnnnnnnnnnnnnnnnnnnnnnnnnnnnnnnnnnnnnnnnnnnnnnnnnnnnnnnnnnnnnnnnnnnnnnnnnnnnnnnnnnnnnnnnnnnnnnnnnnnnnnnnnnnnnnnnnnnnnnnnnnnnnnnnnnnnnnnnnnnnnnnnnnnnnnnnnnnnnnnnnnnnnnnnnnnnnnnnnnnnnnnnnnnnnnnnnnnnnnnnnnnnnnnnnnnnnnnnnnnnnnnnnnnnnnnnnnnnnnnnnnnnnnnnnnnnnnnnnnnnnnnnnnnnnnnnnnnnnnnnnnnnnnnnnnnnnnnnnnnnnnnnnnnnnnnnnnnnnnnnnnnnnnnnnnnnnnnnnnnnnnnnnnnnnnnnnnnnnnnnnnnnnnnnnnnnnnnnnnnnnnnnnnnnnnnnnnnnnnnnnnnnnnnnnnnnnnnnnnnnnnnnnnnnnnnnnnnnnnnnnnnnnnnnnnnnnnnnnnnnnnnnnnnnnnnnnnnnnnnnnnnnnnnnnnnnnnnnnnnnnnnnnnnnnnnnnnnnnnnnnnnnnnnnnnnnnnnnnnnnnnnnnnnnnnnnnnnnnnnnnnnnnnnnnnnnnnnnnnnnnnnnnnnnnnnnnnnnnnnnnnnnnnnnnnnnnnnnnnnnnnnnnnnnnnnnnnnnnnnnnnnnnnnnnnnnnnnnnnnnnnnnnnnnnnnnnnnnnnnnnnnnnnnnnnnnnnnnnnnnnnnnnnnnnnnnnnnnnnnnnnnnnnnnnnnnnnnnnnnnnnnnnnnnnnnnnnnnnnnnnnnnnnnnnnnnnnnnnnnnnnnnnnnnnnnnnnnnnnnnnnnnnnnnnnnnnnnnnnnnnnnnnnnnnnnnnnnnnnnnnnnnnnnnnnnnnnnnnnnnnnnnnnnnnnnnnnnnnnnnnnnnnnnnnnnnnncgccgggtaccagcgaggcacctacgatgcacacagtgcgttcaatgatgggcgggttttcaaaggggtgcaggtggcttgggcatctccaatcgcgtggattaagcctgacctgaattaaaaatttttcacagctgcgggaactaattcgtgacttggcgttcatactggtgtgattagatgtgttagtgcgtttgactgactcacggcttttgaatgacagcgagcggaatggcgataagcggctatctcactcccggctatagagcgcaactagctagcttttcgtaatcgttaggcgggaactaccctgcaccagcttcgaggatcccatggaaacttttacattacgtgcacaattgacaacgccgataataaaacagggttacatgacccttgatgcagtgttgatgtcgattctaggccgaggggatgtgacggatcttctgcactgctacgacgagctttactttgcgagcgcaggcttcttagttgctccaacacctgataaaactaaggcctcatttgtctcgagccttcgcccccagcacactccagagtggctagacgttattaagacgaacacaaaatctgacgacttgcaaattggtctagcgcggcagcgcgaaggtggcaacataactaatagctactcagctcaagtaacccctgcaatcgagtggtacgcgacgggtcacatgcacgacattctggatatcgtgaaagatgtgtttgcaataggtaaacgccgcacgtcaggttacggcgaagtcaagttatgggaagctgaggttggagaaatcgacggattagtcggcttcgctgatgagcctttgcgccccgttcccacagaccgctggcatttaagacaggattttgtccctttagaggcagcttggaaagctccatattgggatgtgcgcaaccggaccaagtgctttgtgccggaggtacacctatgaacggaccagagttttttatgcttcatgcaggttatcgactacttcccagtcatgaaaagaccgaagatgtggttaaagacgcagaccgtttattcagtatctctttaccgttgaatactggcaaatcattacgcctttcatcatgttggtttgtggttactgcagactgggtcgcgacaagttttaagacgctgccggaaacaggctttcgccatgatttagatcgtaaaacagcaattgatctggcgctaaaggcaggcaatccgtgtgttttgcttgcactaggtaaacgaacaatgacggctaacgatatatatgtgactcatgacccaagagccgtgcgtttgtgcgaacagggcaaaaccagaacttatgacgctacaaaggaaaaaacatggatatcttgattgaaaaaccgccgagggtacgcggttatgcgttgcatcgaattgttgagcagttccaaaagggaaagccagctttgtgggtagatgaggggtcttcagttcgcatcagacccaaagactctcaaccaccagtattcgaaattggaaagctattagccttcacgacgaccgcatgtgtctcttttagtagcgggcataaacatgtttacctacccatatctgactggcgggggcgcaggaaatggattgataagcaagctgttaagcacggatttgaggttgtcggcgttcacatctccggagggatgcaaaggattgagacccatgatggacggaagttttctatagatgcgacggagtttacagggctacttcgcgtaactgattcacatttattcggtaattgcttaaccaatggaatcggaaaagtcggaaaagcgtttggattgaatttaatgatcgttcactaaagaaagaggtgtatagaatgagcaaccaaaaaatgaagatatttgcagaaataagcctacgatcaatccaaccagtgacatttacacatcacagtgtagacggtttaccgctgctagcgcgagggatcaacaaagaaggacgtcacgaacacacagtgtatatacccgcagcgcaatttcgaggtcgcataaggcacgaggctgcgttaagtgagatgcggagtaaaagtgataaggtgaagcttgaagaggcttacatgttggcccttggtcaagacctacggcctgctgaagaaaagacacccgagcagatcagacttaaagagcagattgctattcgaaaagaaaacccgttattggacttatttggcacttggaagctggctagccgattgtacgtctcgcattttgtacctgaagtcaacgtgttacctgcgaagattagccacatcagaagagacctagatacaaatgaagaaatgatggatgctctcgggtctgacgaacaagatcgcctttacgatcgtcaaagtaagcaagggatggcttcgcaaattgggcaactcatcaaaactaccaaccgcgaactatcggcggcaaggaaagcaaaagatgcggcaaagatcgatgagatggaagcgaaaattctagagcttgaagagcttaaaaagacccaaaagggtgatgatgagtctgaaaacaccaagcatctggttgagcttcaagtcatacccgcgggtatcactttatatggaaaattaactgtaaattcaccgagaccgaacgatcttcgcatattaattaatgcattagaaggcttcggcgtgaaaccttaccttggagcccaacgtgctcgaggttgcggagcaatatcactggatgcaacgtttagggatgcagacggagatgtactagccacagtcgcttttgcagagggcgaaagcacgatggttcaatggactgagctaggcactaattttttagatactgaaagagccaccacgtgatgtaccgcagccctgaacagactaaatatgcgacattaatcgagggcgcactgaatccagggccgccccttttggctggtgcagcagcaggcctaggaaaaacacacggctttagtatcccactcgtcgcatcagggaaacgtgttgctatttgcttaagcacacgtcagttgatcgatcaatatttaaaaagcgatgccttacatgcggcttgtgctggacgctcagtaaaaattttggaattgcaatcaaggcgagactttccgcgagacaaagacttccgtgaacacaaggagaaagccttagaagcggacgtactgataaccactcatgcggcggcttttattgatagttttaatcctgaatacgctcagcttcgaagccgtgatgttgtgctgtttgacgaggctgatttattagctgatgcagccgacctgagaagtacatttcgtgtttcaccagaggttctagaggattgtggtgcccatcaagaggaagcttttaatgcggctgaattagttaaagccaaagccattgatgcagaagatcgcagtgcagcaagttttatcctacatgctctagagaatccggcttggtacaaagtggttgggtatgaagaagatggcgcattaacgttaaaacaccgtatgccaggcagaatgcttaaatcgcttatagctgacgtgccccgttgtattttcacgagcggaacgcttcaggtatcaggtcgatttgattactttgttaaggcactagggctttcagctattgcgccagagagtcggcatatcgatccagtgatgcacggtagcctagttgtaaaagcaacatccgatgagatgtcgcttagcgaaatggctgtggcgataaaaacagctgagcgcccgacattggttcttacaacaagtcatgccttgacctttgagttggggtcgctgctgccagaagcgactatcagagaggctggtgagtcattgaccgaagcggttgcgcggtgcccggataaaggtattcttatcgctgctggggcttggtcagggcttgacatacctagattgcgctggaaaacagttgttatacctaaagctccctacggtgttagaacagttttaagcggtgaggatatcggccactacatagatagtaaggtggtcgctattcgtagaactaatcagggacttcacagagggcttagaacggctgacgctcagtgcactttactgttgcttgacccgcgcagtagtcgtccagaattgagagaggcaattccttcaagatttagagttgattgggttggctttgaagagggggggcgagtgcttgtcgagcatatgaaagttgaacgaaatgagagtctccgtaaagccgctctaaaacactatggtgagcagtgcatgtgggagggttgcgaggtcacatctgcccatcagctcgatgtacaccactgcaatccggtgtcactgggacaacggcgaactacgctctcagacgttcaagttttgtgtaaaaaccatcacgctgaggcacatcataatatgcgaattagtggtttagacgcgcagagttttgctttaaaccaaatgaaatcagatatttaggaaaattcaggtcaagctgccatgtatatgagcagttactagaactcagtcatcgaaggtgacgttgaccataagggtcaagctgccatgtatatgagcagttactagaacgagcaagctgaagcatggctgcgtgaggaggtcaagctgccatgtatatgagcagttactagaacggctatcagtacgagggaaccaacaccatgagtcaagctgccaagtaaatgagcagttactagaacgactacgatagcgagcagat

SEQ ID NO: 225 - DNA, 11857 bp, Artificial Sequence
  Synthetic Oligonucleotide
  misc_feature (1)..(8222): n is a, c, g, or t
nnnnnnnnnnnnnnnnnnnnnnnnnnnnnnnnnnnnnnnnnnnnnnnnnnnnnnnnnnnnnnnnnnnnnnnnnnnnnnnnnnnnnnnnnnnnnnnnnnnnnnnnnnnnnnnnnnnnnnnnnnnnnnnnnnnnnnnnnnnnnnnnnnnnnnnnnnnnnnnnnnnnnnnnnnnnnnnnnnnnnnnnnnnnnnnnnnnnnnnnnnnnnnnnnnnnnnnnnnnnnnnnnnnnnnnnnnnnnnnnnnnnnnnnnnnnnnnnnnnnnnnnnnnnnnnnnnnnnnnnnnnnnnnnnnnnnnnnnnnnnnnnnnnnnnnnnnnnnnnnnnnnnnnnnnnnnnnnnnnnnnnnnnnnnnnnnnnnnnnnnnnnnnnnnnnnnnnnnnnnnnnnnnnnnnnnnnnnnnnnnnnnnnnnnnnnnnnnnnnnnnnnnnnnnnnnnnnnnnnnnnnnnnnnnnnnnnnnnnnnnnnnnnnnnnnnnnnnnnnnnnnnnnnnnnnnnnnnnnnnnnnnnnnnnnnnnnnnnnnnnnnnnnnnnnnnnnnnnnnnnnnnnnnnnnnnnnnnnnnnnnnnnnnnnnnnnnnnnnnnnnnnnnnnnnnnnnnnnnnnnnnnnnnnnnnnnnnnnnnnnnnnnnnnnnnnnnnnnnnnnnnnnnnnnnnnnnnnnnnnnnnnnnnnnnnnnnnnnnnnnnnnnnnnnnnnnnnnnnnnnnnnnnnnnnnnnnnnnnnnnnnnnnnnnnnnnnnnnnnnnnnnnnnnnnnnnnnnnnnnnnnnnnnnnnnnnnnnnnnnnnnnnnnnnnnnnnnnnnnnnnnnnnnnnnnnnnnnnnnnnnnnnnnnnnnnnnnnnnnnnnnnnnnnnnnnnnnnnnnnnnnnnnnnnnnnnnnnnnnnnnnnnnnnnnnnnnnnnnnnnnnnnnnnnnnnnnnnnnnnnnnnnnnnnnnnnnnnnnnnnnnnnnnnnnnnnnnnnnnnnnnnnnnnnnnnnnnnnnnnnnnnnnnnnnnnnnnnnnnnnnnnnnnnnnnnnnnnnnnnnnnnnnnnnnnnnnnnnnnnnnnnnnnnnnnnnnnnnnnnnnnnnnnnnnnnnnnnnnnnnnnnnnnnnnnnnnnnnnnnnnnnnnnnnnnnnnnnnnnnnnnnnnnnnnnnnnnnnnnnnnnnnnnnnnnnnnnnnnnnnnnnnnnnnnnnnnnnnnnnnnnnnnnnnnnnnnnnnnnnnnnnnnnnnnnnnnnnnnnnnnnnnnnnnnnnnnnnnnnnnnnnnnnnnnnnnnnnnnnnnnnnnnnnnnnnnnnnnnnnnnnnnnnnnnnnnnnnnnnnnnnnnnnnnnnnnnnnnnnnnnnnnnnnnnnnnnnnnnnnnnnnnnnnnnnnnnnnnnnnnnnnnnnnnnnnnnnnnnnnnnnnnnnnnnnnnnnnnnnnnnnnnnnnnnnnnnnnnnnnnnnnnnnnnnnnnnnnnnnnnnnnnnnnnnnnnnnnnnnnnnnnnnnnnnnnnnnnnnnnnnnnnnnnnnnnnnnnnnnnnnnnnnnnnnnnnnnnnnnnnnnnnnnnnnnnnnnnnnnnnnnnnnnnnnnnnnnnnnnnnnnnnnnnnnnnnnnnnnnnnnnnnnnnnnnnnnnnnnnnnnnnnnnnnnnnnnnnnnnnnnnnnnnnnnnnnnnnnnnnnnnnnnnnnnnnnnnnnnnnnnnnnnnnnnnnnnnnnnnnnnnnnnnnnnnnnnnnnnnnnnnnnnnnnnnnnnnnnnnnnnnnnnnnnnnnnnnnnnnnnnnnnnnnnnnnnnnnnnnnnnnnnnnnnnnnnnnnnnnnnnnnnnnnnnnnnnnnnnnnnnnnnnnnnnnnnnnnnnnnnnnnnnnnnnnnnnnnnnnnnnnnnnnnnnnnnnnnnnnnnnnnnnnnnnnnnnnnnnnnnnnnnnnnnnnnnnnnnnnnnnnnnnnnnnnnnnnnnnnnnnnnnnnnnnnnnnnnnnnnnnnnnnnnnnnnnnnnnnnnnnnnnnnnnnnnnnnnnnnnnnnnnnnnnnnnnnnnnnnnnnnnnnnnnnnnnnnnnnnnnnnnnnnnnnnnnnnnnnnnnnnnnnnnnnnnnnnnnnnnnnnnnnnnnnnnnnnnnnnnnnnnnnnnnnnnnnnnnnnnnnnnnnnnnnnnnnnnnnnnnnnnnnnnnnnnnnnnnnnnnnnnnnnnnnnnnnnnnnnnnnnnnnnnnnnnnnnnnnnnnnnnnnnnnnnnnnnnnnnnnnnnnnnnnnnnnnnnnnnnnnnnnnnnnnnnnnnnnnnnnnnnnnnnnnnnnnnnnnnnnnnnnnnnnnnnnnnnnnnnnnnnnnnnnnnnnnnnnnnnnnnnnnnnnnnnnnnnnnnnnnnnnnnnnnnnnnnnnnnnnnnnnnnnnnnnnnnnnnnnnnnnnnnnnnnnnnnnnnnnnnnnnnnnnnnnnnnnnnnnnnnnnnnnnnnnnnnnnnnnnnnnnnnnnnnnnnnnnnnnnnnnnnnnnnnnnnnnnnnnnnnnnnnnnnnnnnnnnnnnnnnnnnnnnnnnnnnnnnnnnnnnnnnnnnnnnnnnnnnnnnnnnnnnnnnnnnnnnnnnnnnnnnnnnnnnnnnnnnnnnnnnnnnnnnnnnnnnnnnnnnnnnnnnnnnnnnnnnnnnnnnnnnnnnnnnnnnnnnnnnnnnnnnnnnnnnnnnnnnnnnnnnnnnnnnnnnnnnnnnnnnnnnnnnnnnnnnnnnnnnnnnnnnnnnnnnnnnnnnnnnnnnnnnnnnnnnnnnnnnnnnnnnnnnnnnnnnnnnnnnnnnnnnnnnnnnnnnnnnnnnnnnnnnnnnnnnnnnnnnnnnnnnnnnnnnnnnnnnnnnnnnnnnnnnnnnnnnnnnnnnnnnnnnnnnnnnnnnnnnnnnnnnnnnnnnnnnnnnnnnnnnnnnnnnnnnnnnnnnnnnnnnnnnnnnnnnnnnnnnnnnnnnnnnnnnnnnnnnnnnnnnnnnnnnnnnnnnnnnnnnnnnnnnnnnnnnnnnnnnnnnnnnnnnnnnnnnnnnnnnnnnnnnnnnnnnnnnnnnnnnnnnnnnnnnnnnnnnnnnnnnnnnnnnnnnnnnnnnnnnnnnnnnnnnnnnnnnnnnnnnnnnnnnnnnnnnnnnnnnnnnnnnnnnnnnnnnnnnnnnnnnnnnnnnnnnnnnnnnnnnnnnnnnnnnnnnnnnnnnnnnnnnnnnnnnnnnnnnnnnnnnnnnnnnnnnnnnnnnnnnnnnnnnnnnnnnnnnnnnnnnnnnnnnnnnnnnnnnnnnnnnnnnnnnnnnnnnnnnnnnnnnnnnnnnnnnnnnnnnnnnnnnnnnnnnnnnnnnnnnnnnnnnnnnnnnnnnnnnnnnnnnnnnnnnnnnnnnnnnnnnnnnnnnnnnnnnnnnnnnnnnnnnnnnnnnnnnnnnnnnnnnnnnnnnnnnnnnnnnnnnnnnnnnnnnnnnnnnnnnnnnnnnnnnnnnnnnnnnnnnnnnnnnnnnnnnnnnnnnnnnnnnnnnnnnnnnnnnnnnnnnnnnnnnnnnnnnnnnnnnnnnnnnnnnnnnnnnnnnnnnnnnnnnnnnnnnnnnnnnnnnnnnnnnnnnnnnnnnnnnnnnnnnnnnnnnnnnnnnnnnnnnnnnnnnnnnnnnnnnnnnnnnnnnnnnnnnnnnnnnnnnnnnnnnnnnnnnnnnnnnnnnnnnnnnnnnnnnnnnnnnnnnnnnnnnnnnnnnnnnnnnnnnnnnnnnnnnnnnnnnnnnnnnnnnnnnnnnnnnnnnnnnnnnnnnnnnnnnnnnnnnnnnnnnnnnnnnnnnnnnnnnnnnnnnnnnnnnnnnnnnnnnnnnnnnnnnnnnnnnnnnnnnnnnnnnnnnnnnnnnnnnnnnnnnnnnnnnnnnnnnnnnnnnnnnnnnnnnnnnnnnnnnnnnnnnnnnnnnnnnnnnnnnnnnnnnnnnnnnnnnnnnnnnnnnnnnnnnnnnnnnnnnnnnnnnnnnnnnnnnnnnnnnnnnnnnnnnnnnnnnnnnnnnnnnnnnnnnnnnnnnnnnnnnnnnnnnnnnnnnnnnnnnnnnnnnnnnnnnnnnnnnnnnnnnnnnnnnnnnnnnnnnnnnnnnnnnnnnnnnnnnnnnnnnnnnnnnnnnnnnnnnnnnnnnnnnnnnnnnnnnnnnnnnnnnnnnnnnnnnnnnnnnnnnnnnnnnnnnnnnnnnnnnnnnnnnnnnnnnnnnnnnnnnnnnnnnnnnnnnnnnnnnnnnnnnnnnnnnnnnnnnnnnnnnnnnnnnnnnnnnnnnnnnnnnnnnnnnnnnnnnnnnnnnnnnnnnnnnnnnnnnnnnnnnnnnnnnnnnnnnnnnnnnnnnnnnnnnnnnnnnnnnnnnnnnnnnnnnnnnnnnnnnnnnnnnnnnnnnnnnnnnnnnnnnnnnnnnnnnnnnnnnnnnnnnnnnnnnnnnnnnnnnnnnnnnnnnnnnnnnnnnnnnnnnnnnnnnnnnnnnnnnnnnnnnnnnnnnnnnnnnnnnnnnnnnnnnnnnnnnnnnnnnnnnnnnnnnnnnnnnnnnnnnnnnnnnnnnnnnnnnnnnnnnnnnnnnnnnnnnnnnnnnnnnnnnnnnnnnnnnnnnnnnnnnnnnnnnnnnnnnnnnnnnnnnnnnnnnnnnnnnnnnnnnnnnnnnnnnnnnnnnnnnnnnnnnnnnnnnnnnnnnnnnnnnnnnnnnnnnnnnnnnnnnnnnnnnnnnnnnnnnnnnnnnnnnnnnnnnnnnnnnnnnnnnnnnnnnnnnnnnnnnnnnnnnnnnnnnnnnnnnnnnnnnnnnnnnnnnnnnnnnnnnnnnnnnnnnnnnnnnnnnnnnnnnnnnnnnnnnnnnnnnnnnnnnnnnnnnnnnnnnnnnnnnnnnnnnnnnnnnnnnnnnnnnnnnnnnnnnnnnnnnnnnnnnnnnnnnnnnnnnnnnnnnnnnnnnnnnnnnnnnnnnnnnnnnnnnnnnnnnnnnnnnnnnnnnnnnnnnnnnnnnnnnnnnnnnnnnnnnnnnnnnnnnnnnnnnnnnnnnnnnnnnnnnnnnnnnnnnnnnnnnnnnnnnnnnnnnnnnnnnnnnnnnnnnnnnnnnnnnnnnnnnnnnnnnnnnnnnnnnnnnnnnnnnnnnnnnnnnnnnnnnnnnnnnnnnnnnnnnnnnnnnnnnnnnnnnnnnnnnnnnnnnnnnnnnnnnnnnnnnnnnnnnnnnnnnnnnnnnnnnnnnnnnnnnnnnnnnnnnnnnnnnnnnnnnnnnnnnnnnnnnnnnnnnnnnnnnnnnnnnnnnnnnnnnnnnnnnnnnnnnnnnnnnnnnnnnnnnnnnnnnnnnnnnnnnnnnnnnnnnnnnnnnnnnnnnnnnnnnnnnnnnnnnnnnnnnnnnnnnnnnnnnnnnnnnnnnnnnnnnnnnnnnnnnnnnnnnnnnnnnnnnnnnnnnnnnnnnnnnnnnnnnnnnnnnnnnnnnnnnnnnnnnnnnnnnnnnnnnnnnnnnnnnnnnnnnnnnnnnnnnnnnnnnnnnnnnnnnnnnnnnnnnnnnnnnnnnnnnnnnnnnnnnnnnnnnnnnnnnnnnnnnnnnnnnnnnnnnnnnnnnnnnnnnnnnnnnnnnnnnnnnnnnnnnnnnnnnnnnnnnnnnnnnnnnnnnnnnnnnnnnnnnnnnnnnnnnnnnnnnnnnnnnnnnnnnnnnnnnnnnnnnnnnnnnnnnnnnnnnnnnnnnnnnnnnnnnnnnnnnnnnnnnnnnnnnnnnnnnnnnnnnnnnnnnnnnnnnnnnnnnnnnnnnnnnnnnnnnnnnnnnnnnnnnnnnnnnnnnnnnnnnnnnnnnnnnnnnnnnnnnnnnnnnnnnnnnnnnnnnnnnnnnnnnnnnnnnnnnnnnnnnnnnnnnnnnnnnnnnnnnnnnnnnnnnnnnnnnnnnnnnnnnnnnnnnnnnnnnnnnnnnnnnnnnnnnnnnnnnnnnnnnnnnnnnnnnnnnnnnnnnnnnnnnnnnnnnnnnnnnnnnnnnnnnnnnnnnnnnnnnnnnnnnnnnnnnnnnnnnnnnnnnnnnnnnnnnnnnnnnnnnnnnnnnnnnnnnnnnnnnnnnnnnnnnnnnnnnnnnnnnnnnnnnnnnnnnnnnnnnnnnnnnnnnnnnnnnnnnnnnnnnnnnnnnnnnnnnnnnnnnnnnnnnnnnnnnnnnnnnnnnnnnnnnnnnnnnnnnnnnnnnnnnnnnnnnnnnnnnnnnnnnnnnnnnnnnnnnnnnnnnnnnnnnnnnnnnnnnnnnnnnnnnnnnnnnnnnnnnnnnnnnnnnnnnnnnnnnnnnnnnnnnnnnnnnnnnnnnnnnnnnnnnnnnnnnnnnnnnnnnnnnnnnnnnnnnnnnnnnnnnnnnnnnnnnnnnnnnnnnnnnnnnnnnnnnnnnnnnnnnnnnnnnnnnnnnnnnnnnnnnnnnnnnnnnnnnnnnnnnnnnnnnnnnnnnnnnnnnnnnnnnnnnnnnnnnnnnnnnnnnnnnnnnnnnnnnnnnnnnnnnnnnnnnnnnnnnnnnnnnnnnnnnnnnnnnnnnnnnnnnnnnnnnnnnnnnnnnnnnnnnnnnnnnnnnnnnnnnnnnnnnnnnnnnnnnnnnnnnnnnnnnnnnnnnnnnnnnnnnnnnnnnnnnnnnnnnnnnnnnnnnnnnnnnnnnnnnnnnnnnnnnnnnnnnnnnnnnnnnnnnnnnnnnnnnnnnnnnnnnnnnnnnnnnnnnnnnnnnnnnnnnnnnnnnnnnnnnnnnnnnnnnnnnnnnnnnnnnnnnnnnnnnnnnnnnnnnnnnnnnnnnnnnnnnnnnnnnnnnnnnnnnnnnnnnnnnnnnnnnnnnnnnnnnnnnnnnnnnnnnnnnnnnnnnnnnnnnnnnnnnnnnnnnnnnnnnnnnnnnnnnnnnnnnnnnnnnnnnnnnnnnnnnnnnnnnnnnnnnnnnnnnnnnnnnnnnnnnnnnnnnnnnnnnnnnnnnnnnnnnnnnnnnnnnnnnnnnnnnnnnnnnnnnnnnnnnnnnnnnnnnnnnnnnnnnnnnnnnnnnnnnnnnnnnnnnnnnnnnnnnnnnnnnnnnnnnnnnnnnnnnnnnnnnnnnnnnnnnnnnnnnnnnnnnnnnnnnnnnnnnnnnnnnnnnnnnnnnnnnnnnnnnnnnnnnnnnnnnnnnnnnnnnnnnnnnnnnnnnnnnnnnnnnnnnnnnnnnnnnnnnnnnnnnnnnnnnnnnnnnnnnnnnnnnnnnnnnnnnnnnnnnnnnnnnnnnnnnnnnnnnnnnnnnnnnnnnnnnnnnnnnnnnnnnnnnnnnnnnnnnnnnnnnnnnnnnnnnnnnnnnnnnnnnnnnnnnnnnnnnnnnnnnnnnnnnnnnnnnnnnnnnnnnnnnnnnnnnnnnnnnnnnnnnnnnnnnnnnnnnnnnnnnnnnnnnnnnnnnnnnnnnnnnnnnnnnnnnnnnnnnnnnnnnnnnnnnnnnnnnnnnnnnnnnnnnnnnnnnnnnnnnnnnnnnnnnnnnnnnnnnnnnnnnnnnnnnnnnnnnnnnnnnnnnnnnnnnnnnnnnnnnnnnnnnnnnnnnnnnnnnnnnnnnnnnnnnnnnnnnnnnnnnnnnnnnnnnnnnnnnnnnnnnnnnnnnnnnnnnnnnnnnnnnnnnnnnnnnnnnnnnnnnnnnnnnnnnnnnnnnnnnnnnnnnnnnnnnnnnnnnnnnnnnnnnnnnnnnnnnnnnnnnnnnnnnnnnnnnnnnnnnnnnnnnnnnnnnnnnnnnnnnnnnnnnnnnnnnnnnnnnnnnnnnnnnnnnnnnnnnnnnnnnnnnnnnnnnnnnnnnnnnnnnnnnnnnnnnnnnnnnnnnnnnnnnnnnnnnnnnnnnnnnnnnnnnnnnnnnnnnnnnnnnnnnnnnnnnnnnnnnnnnnnnnnnnnnnnnnnnnnnnnnnnnnnnnnnnnnnnnnnnnnnnnnnnnnnnnnnnnnnnnnnnnnnnnnnnnnnnnnnnnnnnnnnnnnnnnnnnnnnnnnnnnnnnnnnnnnnnnnnnnnnnnnnnnnnnnnnnnnnnnnnnnnnnnnnnnnnnnnnnnnnnnnnnnnnnnnnnnnnnnnnnnnnnnnnnnnnnnnnnnnnnnnnnnnnnnnnnnnnnnnnnnnnnnnnnnnnnnnnnnnnnnnnnnnnnnnnnnnnnnnnnnnnnnnnnnnnnnnnnnnnnnnnnnnnnnnnnnnnnnnnnnnnnnnnnnnnnnnnnnnnnnnnnnnnnnnnnnnnnnnnnnnnnnnnnnnnnnnnnnnnnnnnnnnnnnnnnnnnnnnnnnnnnnnnnnnnnnnnnnnnnnnnnnnnnnnnnnnnnnnnnnnnnnnnnnnnnnnnnnnnnnnnnnnnnnnnnnnnnacaccggaaaaacactccggctttccagttgctggtgggtgatcacacccgatgcaacgtacaccagctttaaggccatccccgagaccggcgccattcaggggcagttgcggcaggccgtcatcttgtcatccctaaaaacgggattgcccctcttgatcctcgcgattggcaagagccccatttacgcacgcgacctctttgtgacctacgacccacgcgcaacgcgctattgcagcgatcgcagtttgcgcaccgttgattcaactctggagaagtggtggacaccttaatcagcaagcccatccagctgtgcggctatgcgctgcaccgcttggttgcgcaacatcaaaacggtgcgccagcgctctggcgtgacgagggtgacaccgtgcgaattcgctcgcgtgacgcctgtccgcccacctacgtcacagggcaactgttgggctttgtcacattggcgtgtgtgtcgtttggtagcaaacaccgctacctgccggtcgccgattggcgtggtcgcaaagcgtggctggaggcacagggcatcaaacacggtttcgaggtggttggggtgcacgcccagggtggcatgcaaaccgtgaccacccatgacggtcgccacttcaccattgatgccacgcaattcacgggcttgctgcgcgtcacccagcctgcgccattcaacgactgtctgctcaatggcatcggcaaagtaggtaaagcctttggcctcaacttactcgtcgttcattaacccaacgcttaaaaacgcttatccggagttcaccaccatgcaagacgttcgcatcgatatcgccatcaatacgattcaacccatcaccttcacccatcacggcatcgacgggttgcccaccatggctcgcggcgttgacatggagggtcatcccctgcgcaccgtttacattccagccgcgcagtttcgcggtcggctaaggcatgaggcggcgttggcaaaaatgcgtaccgcacacggccccatcaagttggcggaagcctacatgctggccttggggcaaaacatcgacaccaaagaagacgaggctgatgagaaagtgcggttgggcgagctactcgctttacgggcggccaaccccttcattgatctcttcggaacgtggcgcatggacagccggctttacgtgtcgcacctgatgccggtcgtcaacgtcaagcccgacacctttcaccacatccgccgcgatctagacaccaacgacgcgttgtttgccgagttacccgaagccgagatcgacgtcttttacgaaaggcaagacggacagtcgcaagcctctcaagcggagagtctgattaaggtggccacccgcgaactgcgcaaagccaaaaaagaaaacgacctcgccaaatgcgacgagttcgaagccaagatcgaagaactcaaagccctcaagaaggcgcacaaagccggtgacgaatcgggaaacaccaaacacttggtggcgatggaggccgtccctgcgggaattcaattgttgtgcaaactcatcataaagcgggccacgccgctcgacctcagcatgctcacgggtgcgcttaacgcgatcagcgaattccccatgatgggtgcccagcgggcccgtggctgcggcgaggtgagtggcaccgcaaccgtctgccatacccagggtgaggtgttggcgcaaatcgccttcggtggttttttgccagctgtattggagtggaccgatgcgggcaccgccttcatgactggccccgaaacggttgccgtcgccgcgtgaaaggcccttaccgcagcccacagcaggcgcaatacgccaagctcatcgagcgcgctgtcagcaaacccggtgcgcccctgttggcgggtgctgcgcccgggctcggtaagacacacggctacgccatcccgttgttgtgcagtggcaaaaaagttgccatcgccatgagcacgcgccaactgatcgatcaatttatggcgagcgatgcactcgccgctgcgcaagccgcactagaggccgaggggcggcccgctgccaccgttgtcgccttgcaaccccgccgtcaatttgaaacggcggtggcctacagcgcgcacaaaacggcggcgcttgatgccgacgtcttggtgctcacacacatgggcgtgctcatcgatacccacatcccagcctacgcccagctgcgtcagcgcgctgtcttgttgtttgacgaagccgatcttttggccgatgccgccgacttgcgcagcacctatcgcattgaggctgaggccttagcccgcgcaggcgtcgaaaacgccacaccgacaaaggcggttgaaaccatcattaaaaaatccgatgaccccgaggaaaaagcagtcgccacagccatccaacgcgctttggcagagccggcttggtacaaagtgatcggtaaagaagacaacggcgatttggtgctgacccaccgcatgccggggcgcatgttgcgcaccctcatcaatgacatgccgcggtgcattttcaccagtggcaccctcacggtatcggggcgttttgaccactttgtcaaagccatcggcctgaccgcagtggcacccgaaagccagcacattgaccccgtgcaacacggccaactgcgcgttgaggtggccagtgaggccctcaccccagaagcacaagccgaacgcatcatgcacgcggcgacaccggtattggtgctgaccaccagccacgcgaccacggcggcgttgggcgccttgtgccccggtgccatctgccgcgcacccggtgaagccctcatggatgcggtggcgcgatgccctgatgatggcatcttgatcgccgctgtcgcttggtctggcctcgatgcgccgcgcctgcggtggcaaaccgtggtcatccccaaaacaccgtacggcaaaccactcatccttgacgcccagcagataagcgcttacgtggacagcaaggttgttgccatcaggcgcaccaaccaagggttacaccgtgggctgcgcaccaccgatgccacctgcaccttgctgttactcgatccggatagccgtcgtgccgatttacgtcaagccattccccgtcgtttcttggtggattgggacagcgtggccgagggctcgttggttttgcgcacgcacttcgcccgtgaacgaaaaaaaggtctgcgtgaaaaaaccctgagccggcgcgggcagcactgcgaacaccccggctgtacggccacccaagagcatttgctggaggtgcaccacctcaacccgattgccaacggcccccgcgacacagttactgatgacctgcgggtgctttgtaaaaatcaccacgcggatgcccaccaagccatgcgaaaagctgattttttaaaagtgaaaacaactgaaaagcgtgcagaggcagacacttaggccacagctggtcaagctacgccgtaaatgcgtagttactggaacaacatgatgccgaggcgtccgccgtccatgggtcaagctacgccgtaaatgcgtagttactggaacagcatcgtctccccgccggggtcgtctggggtcaagctacgccgtaaaggcgtagttacttttagcagccagttttgctggttttaagcggtccaatggcccgacttgccgcccatct

SEQ ID NO: 226 - DNA, 11833 bp, Artificial Sequence
  Synthetic Oligonucleotide
  misc_feature (1)..(8227): n is a, c, g, or t
nnnnnnnnnnnnnnnnnnnnnnnnnnnnnnnnnnnnnnnnnnnnnnnnnnnnnnnnnnnnnnnnnnnnnnnnnnnnnnnnnnnnnnnnnnnnnnnnnnnnnnnnnnnnnnnnnnnnnnnnnnnnnnnnnnnnnnnnnnnnnnnnnnnnnnnnnnnnnnnnnnnnnnnnnnnnnnnnnnnnnnnnnnnnnnnnnnnnnnnnnnnnnnnnnnnnnnnnnnnnnnnnnnnnnnnnnnnnnnnnnnnnnnnnnnnnnnnnnnnnnnnnnnnnnnnnnnnnnnnnnnnnnnnnnnnnnnnnnnnnnnnnnnnnnnnnnnnnnnnnnnnnnnnnnnnnnnnnnnnnnnnnnnnnnnnnnnnnnnnnnnnnnnnnnnnnnnnnnnnnnnnnnnnnnnnnnnnnnnnnnnnnnnnnnnnnnnnnnnnnnnnnnnnnnnnnnnnnnnnnnnnnnnnnnnnnnnnnnnnnnnnnnnnnnnnnnnnnnnnnnnnnnnnnnnnnnnnnnnnnnnnnnnnnnnnnnnnnnnnnnnnnnnnnnnnnnnnnnnnnnnnnnnnnnnnnnnnnnnnnnnnnnnnnnnnnnnnnnnnnnnnnnnnnnnnnnnnnnnnnnnnnnnnnnnnnnnnnnnnnnnnnnnnnnnnnnnnnnnnnnnnnnnnnnnnnnnnnnnnnnnnnnnnnnnnnnnnnnnnnnnnnnnnnnnnnnnnnnnnnnnnnnnnnnnnnnnnnnnnnnnnnnnnnnnnnnnnnnnnnnnnnnnnnnnnnnnnnnnnnnnnnnnnnnnnnnnnnnnnnnnnnnnnnnnnnnnnnnnnnnnnnnnnnnnnnnnnnnnnnnnnnnnnnnnnnnnnnnnnnnnnnnnnnnnnnnnnnnnnnnnnnnnnnnnnnnnnnnnnnnnnnnnnnnnnnnnnnnnnnnnnnnnnnnnnnnnnnnnnnnnnnnnnnnnnnnnnnnnnnnnnnnnnnnnnnnnnnnnnnnnnnnnnnnnnnnnnnnnnnnnnnnnnnnnnnnnnnnnnnnnnnnnnnnnnnnnnnnnnnnnnnnnnnnnnnnnnnnnnnnnnnnnnnnnnnnnnnnnnnnnnnnnnnnnnnnnnnnnnnnnnnnnnnnnnnnnnnnnnnnnnnnnnnnnnnnnnnnnnnnnnnnnnnnnnnnnnnnnnnnnnnnnnnnnnnnnnnnnnnnnnnnnnnnnnnnnnnnnnnnnnnnnnnnnnnnnnnnnnnnnnnnnnnnnnnnnnnnnnnnnnnnnnnnnnnnnnnnnnnnnnnnnnnnnnnnnnnnnnnnnnnnnnnnnnnnnnnnnnnnnnnnnnnnnnnnnnnnnnnnnnnnnnnnnnnnnnnnnnnnnnnnnnnnnnnnnnnnnnnnnnnnnnnnnnnnnnnnnnnnnnnnnnnnnnnnnnnnnnnnnnnnnnnnnnnnnnnnnnnnnnnnnnnnnnnnnnnnnnnnnnnnnnnnnnnnnnnnnnnnnnnnnnnnnnnnnnnnnnnnnnnnnnnnnnnnnnnnnnnnnnnnnnnnnnnnnnnnnnnnnnnnnnnnnnnnnnnnnnnnnnnnnnnnnnnnnnnnnnnnnnnnnnnnnnnnnnnnnnnnnnnnnnnnnnnnnnnnnnnnnnnnnnnnnnnnnnnnnnnnnnnnnnnnnnnnnnnnnnnnnnnnnnnnnnnnnnnnnnnnnnnnnnnnnnnnnnnnnnnnnnnnnnnnnnnnnnnnnnnnnnnnnnnnnnnnnnnnnnnnnnnnnnnnnnnnnnnnnnnnnnnnnnnnnnnnnnnnnnnnnnnnnnnnnnnnnnnnnnnnnnnnnnnnnnnnnnnnnnnnnnnnnnnnnnnnnnnnnnnnnnnnnnnnnnnnnnnnnnnnnnnnnnnnnnnnnnnnnnnnnnnnnnnnnnnnnnnnnnnnnnnnnnnnnnnnnnnnnnnnnnnnnnnnnnnnnnnnnnnnnnnnnnnnnnnnnnnnnnnnnnnnnnnnnnnnnnnnnnnnnnnnnnnnnnnnnnnnnnnnnnnnnnnnnnnnnnnnnnnnnnnnnnnnnnnnnnnnnnnnnnnnnnnnnnnnnnnnnnnnnnnnnnnnnnnnnnnnnnnnnnnnnnnnnnnnnnnnnnnnnnnnnnnnnnnnnnnnnnnnnnnnnnnnnnnnnnnnnnnnnnnnnnnnnnnnnnnnnnnnnnnnnnnnnnnnnnnnnnnnnnnnnnnnnnnnnnnnnnnnnnnnnnnnnnnnnnnnnnnnnnnnnnnnnnnnnnnnnnnnnnnnnnnnnnnnnnnnnnnnnnnnnnnnnnnnnnnnnnnnnnnnnnnnnnnnnnnnnnnnnnnnnnnnnnnnnnnnnnnnnnnnnnnnnnnnnnnnnnnnnnnnnnnnnnnnnnnnnnnnnnnnnnnnnnnnnnnnnnnnnnnnnnnnnnnnnnnnnnnnnnnnnnnnnnnnnnnnnnnnnnnnnnnnnnnnnnnnnnnnnnnnnnnnnnnnnnnnnnnnnnnnnnnnnnnnnnnnnnnnnnnnnnnnnnnnnnnnnnnnnnnnnnnnnnnnnnnnnnnnnnnnnnnnnnnnnnnnnnnnnnnnnnnnnnnnnnnnnnnnnnnnnnnnnnnnnnnnnnnnnnnnnnnnnnnnnnnnnnnnnnnnnnnnnnnnnnnnnnnnnnnnnnnnnnnnnnnnnnnnnnnnnnnnnnnnnnnnnnnnnnnnnnnnnnnnnnnnnnnnnnnnnnnnnnnnnnnnnnnnnnnnnnnnnnnnnnnnnnnnnnnnnnnnnnnnnnnnnnnnnnnnnnnnnnnnnnnnnnnnnnnnnnnnnnnnnnnnnnnnnnnnnnnnnnnnnnnnnnnnnnnnnnnnnnnnnnnnnnnnnnnnnnnnnnnnnnnnnnnnnnnnnnnnnnnnnnnnnnnnnnnnnnnnnnnnnnnnnnnnnnnnnnnnnnnnnnnnnnnnnnnnnnnnnnnnnnnnnnnnnnnnnnnnnnnnnnnnnnnnnnnnnnnnnnnnnnnnnnnnnnnnnnnnnnnnnnnnnnnnnnnnnnnnnnnnnnnnnnnnnnnnnnnnnnnnnnnnnnnnnnnnnnnnnnnnnnnnnnnnnnnnnnnnnnnnnnnnnnnnnnnnnnnnnnnnnnnnnnnnnnnnnnnnnnnnnnnnnnnnnnnnnnnnnnnnnnnnnnnnnnnnnnnnnnnnnnnnnnnnnnnnnnnnnnnnnnnnnnnnnnnnnnnnnnnnnnnnnnnnnnnnnnnnnnnnnnnnnnnnnnnnnnnnnnnnnnnnnnnnnnnnnnnnnnnnnnnnnnnnnnnnnnnnnnnnnnnnnnnnnnnnnnnnnnnnnnnnnnnnnnnnnnnnnnnnnnnnnnnnnnnnnnnnnnnnnnnnnnnnnnnnnnnnnnnnnnnnnnnnnnnnnnnnnnnnnnnnnnnnnnnnnnnnnnnnnnnnnnnnnnnnnnnnnnnnnnnnnnnnnnnnnnnnnnnnnnnnnnnnnnnnnnnnnnnnnnnnnnnnnnnnnnnnnnnnnnnnnnnnnnnnnnnnnnnnnnnnnnnnnnnnnnnnnnnnnnnnnnnnnnnnnnnnnnnnnnnnnnnnnnnnnnnnnnnnnnnnnnnnnnnnnnnnnnnnnnnnnnnnnnnnnnnnnnnnnnnnnnnnnnnnnnnnnnnnnnnnnnnnnnnnnnnnnnnnnnnnnnnnnnnnnnnnnnnnnnnnnnnnnnnnnnnnnnnnnnnnnnnnnnnnnnnnnnnnnnnnnnnnnnnnnnnnnnnnnnnnnnnnnnnnnnnnnnnnnnnnnnnnnnnnnnnnnnnnnnnnnnnnnnnnnnnnnnnnnnnnnnnnnnnnnnnnnnnnnnnnnnnnnnnnnnnnnnnnnnnnnnnnnnnnnnnnnnnnnnnnnnnnnnnnnnnnnnnnnnnnnnnnnnnnnnnnnnnnnnnnnnnnnnnnnnnnnnnnnnnnnnnnnnnnnnnnnnnnnnnnnnnnnnnnnnnnnnnnnnnnnnnnnnnnnnnnnnnnnnnnnnnnnnnnnnnnnnnnnnnnnnnnnnnnnnnnnnnnnnnnnnnnnnnnnnnnnnnnnnnnnnnnnnnnnnnnnnnnnnnnnnnnnnnnnnnnnnnnnnnnnnnnnnnnnnnnnnnnnnnnnnnnnnnnnnnnnnnnnnnnnnnnnnnnnnnnnnnnnnnnnnnnnnnnnnnnnnnnnnnnnnnnnnnnnnnnnnnnnnnnnnnnnnnnnnnnnnnnnnnnnnnnnnnnnnnnnnnnnnnnnnnnnnnnnnnnnnnnnnnnnnnnnnnnnnnnnnnnnnnnnnnnnnnnnnnnnnnnnnnnnnnnnnnnnnnnnnnnnnnnnnnnnnnnnnnnnnnnnnnnnnnnnnnnnnnnnnnnnnnnnnnnnnnnnnnnnnnnnnnnnnnnnnnnnnnnnnnnnnnnnnnnnnnnnnnnnnnnnnnnnnnnnnnnnnnnnnnnnnnnnnnnnnnnnnnnnnnnnnnnnnnnnnnnnnnnnnnnnnnnnnnnnnnnnnnnnnnnnnnnnnnnnnnnnnnnnnnnnnnnnnnnnnnnnnnnnnnnnnnnnnnnnnnnnnnnnnnnnnnnnnnnnnnnnnnnnnnnnnnnnnnnnnnnnnnnnnnnnnnnnnnnnnnnnnnnnnnnnnnnnnnnnnnnnnnnnnnnnnnnnnnnnnnnnnnnnnnnnnnnnnnnnnnnnnnnnnnnnnnnnnnnnnnnnnnnnnnnnnnnnnnnnnnnnnnnnnnnnnnnnnnnnnnnnnnnnnnnnnnnnnnnnnnnnnnnnnnnnnnnnnnnnnnnnnnnnnnnnnnnnnnnnnnnnnnnnnnnnnnnnnnnnnnnnnnnnnnnnnnnnnnnnnnnnnnnnnnnnnnnnnnnnnnnnnnnnnnnnnnnnnnnnnnnnnnnnnnnnnnnnnnnnnnnnnnnnnnnnnnnnnnnnnnnnnnnnnnnnnnnnnnnnnnnnnnnnnnnnnnnnnnnnnnnnnnnnnnnnnnnnnnnnnnnnnnnnnnnnnnnnnnnnnnnnnnnnnnnnnnnnnnnnnnnnnnnnnnnnnnnnnnnnnnnnnnnnnnnnnnnnnnnnnnnnnnnnnnnnnnnnnnnnnnnnnnnnnnnnnnnnnnnnnnnnnnnnnnnnnnnnnnnnnnnnnnnnnnnnnnnnnnnnnnnnnnnnnnnnnnnnnnnnnnnnnnnnnnnnnnnnnnnnnnnnnnnnnnnnnnnnnnnnnnnnnnnnnnnnnnnnnnnnnnnnnnnnnnnnnnnnnnnnnnnnnnnnnnnnnnnnnnnnnnnnnnnnnnnnnnnnnnnnnnnnnnnnnnnnnnnnnnnnnnnnnnnnnnnnnnnnnnnnnnnnnnnnnnnnnnnnnnnnnnnnnnnnnnnnnnnnnnnnnnnnnnnnnnnnnnnnnnnnnnnnnnnnnnnnnnnnnnnnnnnnnnnnnnnnnnnnnnnnnnnnnnnnnnnnnnnnnnnnnnnnnnnnnnnnnnnnnnnnnnnnnnnnnnnnnnnnnnnnnnnnnnnnnnnnnnnnnnnnnnnnnnnnnnnnnnnnnnnnnnnnnnnnnnnnnnnnnnnnnnnnnnnnnnnnnnnnnnnnnnnnnnnnnnnnnnnnnnnnnnnnnnnnnnnnnnnnnnnnnnnnnnnnnnnnnnnnnnnnnnnnnnnnnnnnnnnnnnnnnnnnnnnnnnnnnnnnnnnnnnnnnnnnnnnnnnnnnnnnnnnnnnnnnnnnnnnnnnnnnnnnnnnnnnnnnnnnnnnnnnnnnnnnnnnnnnnnnnnnnnnnnnnnnnnnnnnnnnnnnnnnnnnnnnnnnnnnnnnnnnnnnnnnnnnnnnnnnnnnnnnnnnnnnnnnnnnnnnnnnnnnnnnnnnnnnnnnnnnnnnnnnnnnnnnnnnnnnnnnnnnnnnnnnnnnnnnnnnnnnnnnnnnnnnnnnnnnnnnnnnnnnnnnnnnnnnnnnnnnnnnnnnnnnnnnnnnnnnnnnnnnnnnnnnnnnnnnnnnnnnnnnnnnnnnnnnnnnnnnnnnnnnnnnnnnnnnnnnnnnnnnnnnnnnnnnnnnnnnnnnnnnnnnnnnnnnnnnnnnnnnnnnnnnnnnnnnnnnnnnnnnnnnnnnnnnnnnnnnnnnnnnnnnnnnnnnnnnnnnnnnnnnnnnnnnnnnnnnnnnnnnnnnnnnnnnnnnnnnnnnnnnnnnnnnnnnnnnnnnnnnnnnnnnnnnnnnnnnnnnnnnnnnnnnnnnnnnnnnnnnnnnnnnnnnnnnnnnnnnnnnnnnnnnnnnnnnnnnnnnnnnnnnnnnnnnnnnnnnnnnnnnnnnnnnnnnnnnnnnnnnnnnnnnnnnnnnnnnnnnnnnnnnnnnnnnnnnnnnnnnnnnnnnnnnnnnnnnnnnnnnnnnnnnnnnnnnnnnnnnnnnnnnnnnnnnnnnnnnnnnnnnnnnnnnnnnnnnnnnnnnnnnnnnnnnnnnnnnnnnnnnnnnnnnnnnnnnnnnnnnnnnnnnnnnnnnnnnnnnnnnnnnnnnnnnnnnnnnnnnnnnnnnnnnnnnnnnnnnnnnnnnnnnnnnnnnnnnnnnnnnnnnnnnnnnnnnnnnnnnnnnnnnnnnnnnnnnnnnnnnnnnnnnnnnnnnnnnnnnnnnnnnnnnnnnnnnnnnnnnnnnnnnnnnnnnnnnnnnnnnnnnnnnnnnnnnnnnnnnnnnnnnnnnnnnnnnnnnnnnnnnnnnnnnnnnnnnnnnnnnnnnnnnnnnnnnnnnnnnnnnnnnnnnnnnnnnnnnnnnnnnnnnnnnnnnnnnnnnnnnnnnnnnnnnnnnnnnnnnnnnnnnnnnnnnnnnnnnnnnnnnnnnnnnnnnnnnnnnnnnnnnnnnnnnnnnnnnnnnnnnnnnnnnnnnnnnnnnnnnnnnnnnnnnnnnnnnnnnnnnnnnnnnnnnnnnnnnnnnnnnnnnnnnnnnnnnnnnnnnnnnnnnnnnnnnnnnnnnnnnnnnnnnnnnnnnnnnnnnnnnnnnnnnnnnnnnnnnnnnnnnnnnnnnnnnnnnnnnnnnnnnnnnnnnnnnnnnnnnnnnnnnnnnnnnnnnnnnnnnnnnnnnnnnnnnnnnnnnnnnnnnnnnnnnnnnnnnnnnnnnnnnnnnnnnnnnnnnnnnnnnnnnnnnnnnnnnnnnnnnnnnnnnnnnnnnnnnnnnnnnnnnnnnnnnnnnnnnnnnnnnnnnnnnnnnnnnnnnnnnnnnnnnnnnnnnnnnnnnnnnnnnnnnnnnnnnnnnnnnnnnnnnnnnnnnnnnnnnnnnnnnnnnnnnnnnnnnnnnnnnnnnnnnnnnnnnnnnnnnnnnnnnnnnnnnnnnnnnnnnnnnnnnnnnnnnnnnnnnnnnnnnnnnnnnnnnnnnnnnnnnnnnnnnnnnnnnnnnnnnnnnnnnnnnnnnnnnnnnnnnnnnnnnnnnnnnnnnnnnnnnnnnnnnnnnnnnnnnnnnnnnnnnnnnnnnnnnnnnnnnnnnnnnnnnnnnnnnnnnnnnnnnnnnnnnnnnnnnnnnnnnnnnnnnnnnnnnnnnnnnnnnnnnnnnnnnnnnnnnnnnnnnnnnnnnnnnnnnnnnnnnnnnnnnnnnnnnnnnnnnnnnnnnnnnnnnnnnnnnnnnnnnnnnnnnnnnnnnnnnnnnnnnnnnnnnnnnnnnnnnnnnnnnnnnnnnnnnnnnnnnnnnnnnnnnnnnnnnnnnnnnnnnnnnnnnnnnnnnnnnnnnnnnnnnnnnnnnnnnnnnnnnnnnnnnnnnnnnnnnnnnnnnnnnnnnnnnnnnnnnnnnnnnnnnnnnnnnnnnnnnnnnnnnnnnnnnnnnnnnnnnnnnnnnnnnnnnnnnnnnnnnnnnnnnnnnnnnnnnnnnnnnnnnnnnnnnnnnnnnnnnnnnnnnnnnnnnnnnnnnnnnnnnnnnnnnnnnnnnnnnnnnnnnnnnnnnnnnnnnnnnnnnnnnnnnnnnnnnnnnnnnnnnnnnnnnnnnnnnnnnnnnnnnnnnnnnnnnnnnnnnnnnnnnnnnnnnnnnnnnnnnnnnnnnnnnnnnnnnnnnnnnnnnnnnnnnnnnnnnnnnnnnnnnnnnnnnnnnnnnnnnnnnnnnnnnnnnnnnnnnnnnnnnnnnnnnnnnnnnnnnnnnnnnnnnnnnnnnnnnnnnnnnnnnnnnnnnnnnnnnnnnnnnnnnnnnnnnnnnnnnnnnnnnnnnnnnnnnnnnnnnnnnnnnnnnnnnnnnnnnnnnnnnnnnnnnnnnnnnnnnnnnnnnnnnnnnnnnnnnnnnnnnnnnnnnnnnnnnnnnnnnnnnnnnnnnnnnnnnnnnnnnnnnnnnnnnnnnnnnnnnnnnnnnnnnnnnnnnnnnnnnnnnnnnnnnnnnnnnnnnnnnnnnnnnnnnnnnnnnnnnnnnnnnnnnnnnnnnnnnnggaaaaacactccggctttccagttgctggtgggtgatcacacccgatgcaacgtacaccagctttaaggccatgcccgaaaccggcgccattcgggggcagttgcggcaggccgtcatattgtcatccctgaaaacgggatcgcccttcttgatcctcgcgattggcaagagccccatgtacgcacgcgacctctttgtgacctacgacccacgcgcaacgcgctattgcagcgatggcagtttgcgcaccgttgattcaactctggagaaatggtggacaccttaatcagcaagcccatccagctgcgcggttatgcgctgcaccgcttggttgcgcaacatcaaaacggtgcgcccgcgctctggcgtgacgagggtgaaaccgtgcgaattcgcgcacgtgacgcctttccgcccacctacctcgcagggcaactgttgggctttgtcacattggcgtgtgtgtcgtttggtagcaaacaccggtacctgccggtcgccgattggcgtggtcgcaaagcgtggctggaggcacagggcatcaaacacggtttcgaggtggttggggtgcacgcccagggtggcatgcaaaccgtgaccacccatgacggtcgccacttcaccattgatgccacgcaattcacgggcttgctgcgcgtcacccagcctgcgccattcaacgactgtctgctcaacggcatcggcaaagtgggtaaagcctttggcctcaacttactcgtcgttcattaacccaacgcttaaaaacgcttatccggagttcaccaccatgcaagacgttcgcatctatatcgccatcaacacgattcaacccatcaccttcacccatcacggcatcgacgggttgcccaccatggttcgcggcgttgacatggagggtcatcccctgcgcaccgtttacattccagccgcgcagtttcgcggtcggctaaggcatgaggcggcgttggcaaaaatgcgtaccgcacacggccccgttaagttggcggaagcctacatgctggccttggggcaaaacatcgacaccaaagaagacgaggctgatgagaaagtgcgattgggcgagctactcgctttacgggcggccaaccccttcattgatctcttcggaacgtggcgcatggacagccggctttacgtgtcgcacctgatgcctgtcgtcaacgtcaagcccgacacctttcaccacatccgccgcgatctagacaccaacgacgcgttgtttgccgagttacccgaagccgaaatcgacgtcttttacgaaaggcaagacggacagtcgcaagcctctcaagcggagggtctgataaaggtggccacccgcgaactgcgcaaagccaaaaaagaaaacgacctcgccaaatgcgacgagttcgaagccaagatcgaagaactcaaagccctcaagaaggcgcacaaagccggtgacgaatcgggcaataccaaacacttggtggcgatggaggccgtccctgcgggaactcaattgttgtgcaaactcatcataaagcgggccacgccgctcgacctcagcatgctcacgggtgcgcgcaacgcgatcagcgaattccccatgatgggtgcccagcgggcccgtggctgcggcgaggtgagtggcaccgcaaccgtctgccacacccggggtgaggtgttggcgcaaatcgccttcggtggttttttgccagctgtactggagtggaccgatgcgggcaccgccttcatgactggctccgaaacggttgcagtcgccgcgtgaaaggcccttaccgcagcctacagcaggcgcaatacgccaagctcatcgagcgcgctgtcagcaaacccggtgcgcccctgttggcgggtgccgcgcccgggctcggcaagacacacggctacgccatcccgttgttgtgcagcggcaaaaaagttgccatcgccatgagcacgcgccaactgatcgatcaattcatggcgagcgatgcactcgccgctgcgcaagctgcacttgaggccgaggggcggcccgctgccaccgttgtcgccttgcaaccgcgccgtcaatttgaaacggcggtggcctaccgcgcgcacaaaactgcggcgctggatgccgacgtcttggtgctcacacacatgggcgtgctcatcgatacccacatcccagcctacgcccagttgcgtcaacgcgctgtcttgttgtttgacgaagccgatcttttggccgatgccgccgacttgcgcagcacctatcgcattgaggctgaggccttagcccgcgcaggcgtcgaaaacgccacaccgacaaaggcggttgaaaccatcattaaaaaatccgatgaccccgaggaaaaagcagtcgccacagccatccagcgcgctttggaaaagccggcttggtacaaagtgatcggtaaagatgacaacggcgatttggtgctgacccaccgcatgccggggcgcatgttgcgccccttcatcaatgacatgccgcggtgcattttcaccagtggcaccctcacggtatcggggcgttttgaccactttgtcaaagccatcggcctgaccgcagtggcacccgaaagccagcacattgaccccgtgcaacacggccaactgcgcgtggaggtggccagtgaggccctcaccccagaagcacaagccgaaagcatcatgcacgcggcgacaccggtattggtgctgaccaccagccacgcgaccacggcggcgttgggcgccttgtgccccggtgccacctgccgcgcacccggtgaagccctcatggatgcggtggcgcgatgccctgatgatgacatcttgatcgccgctggcgcttggtctggcctcgatgcgccgcgcctgcggtggcaaaccgtggtcatccccaaaacaccttacggcaaaccactcatccttgacgcccagcaaataagcgcttacgtggacagcaaggttgttgccatcaggcgcaccaaccaagggttacaccgtgggctgcgcaccatcgatgccacttgcaccttgctgttactcgatccggacagccgtcgtgccgatttacgccaagccattccccgtcgtttcttggtggattgggacagcgtggccgagggctcgctggttttgcgcacgcacttcgaccgtgagcgcgacagaagcttgcgtgaaaaaaccctgcgccggcgcgggcagcactgcgaacaccccggctgcacgattacccaagaaaattggctggaggtacaccacctgaacccgattgccaacggcccccgcggcacaggtgccgatgacctgcgggtactttgtaaacatcaccacgtggatgcccaccaagccatgcgagaagcagattttttaaaagtgaaaacaactgaaaagcgcgcagaaacagacacttagaccacagctggtcaagctatgccgtaaatgcgtagttactggaacggctatacatactcaatcgacgtggtgcgtggtcaagctacgccgtaaaggcgtagctacttttagcagccagttttgctggtttaagcggtccaatggcctgacttgccgcccatcttttcaagcaggcgcacgcctgtcatggtcatgccgcggtcag

SEQ ID NO: 227 - DNA, 11833 bp, Artificial Sequence; identical to SEQ ID NO: 226
  Synthetic Oligonucleotide
  misc_feature (1)..(8227): n is a, c, g, or t

SEQ ID NO: 228 - DNA, 11822 bp, Artificial Sequence
  Synthetic Oligonucleotide
  misc_feature (1)..(9135): n is a, c, g, or t
nnnnnnnnnnnnnnnnnnnnnnnnnnnnnnnnnnnnnnnnnnnnnnnnnnnnnnnnnnnnnnnnnnnnnnnnnnnnnnnnnnnnnnnnnnnnnnnnnnnnnnnnnnnnnnnnnnnnnnnnnnnnnnnnnnnnnnnnnnnnnnnnnnnnnnnnnnnnnnnnnnnnnnnnnnnnnnnnnnnnnnnnnnnnnnnnnnnnnnnnnnnnnnnnnnnnnnnnnnnnnnnnnnnnnnnnnnnnnnnnnnnnnnnnnnnnnnnnnnnnnnnnnnnnnnnnnnnnnnnnnnnnnnnnnnnnnnnnnnnnnnnnnnnnnnnnnnnnnnnnnnnnnnnnnnnnnnnnnnnnnnnnnnnnnnnnnnnnnnnnnnnnnnnnnnnnnnnnnnnnnnnnnnnnnnnnnnnnnnnnnnnnnnnnnnnnnnnnnnnnnnnnnnnnnnnnnnnnnnnnnnnnnnnnnnnnnnnnnnnnnnnnnnnnnnnnnnnnnnnnnnnnnnnnnnnnnnnnnnnnnnnnnnnnnnnnnnnnnnnnnnnnnnnnnnnnnnnnnnnnnnnnnnnnnnnnnnnnnnnnnnnnnnnnnnnnnnnnnnnnnnnnnnnnnnnnnnnnnnnnnnnnnnnnnnnnnnnnnnnnnnnnnnnnnnnnnnnnnnnnnnnnnnnnnnnnnnnnnnnnnnnnnnnnnnnnnnnnnnnnnnnnnnnnnnnnnnnnnnnnnnnnnnnnnnnnnnnnnnnnnnnnnnnnnnnnnnnnnnnnnnnnnnnnnnnnnnnnnnnnnnnnnnnnnnnnnnnnnnnnnnnnnnnnnnnnnnnnnnnnnnnnnnnnnnnnnnnnnnnnnnnnnnnnnnnnnnnnnnnnnnnnnnnnnnnnnnnnnnnnnnnnnnnnnnnnnnnnnnnnnnnnnnnnnnnnnnnnnnnnnnnnnnnnnnnnnnnnnnnnnnnnnnnnnnnnnnnnnnnnnnnnnnnnnnnnnnnnnnnnnnnnnnnnnnnnnnnnnnnnnnnnnnnnnnnnnnnnnnnnnnnnnnnnnnnnnnnnnnnnnnnnnnnnnnnnnnnnnnnnnnnnnnnnnnnnnnnnnnnnnnnnnnnnnnnnnnnnnnnnnnnnnnnnnnnnnnnnnnnnnnnnnnnnnnnnnnnnnnnnnnnnnnnnnnnnnnnnnnnnnnnnnnnnnnnnnnnnnnnnnnnnnnnnnnnnnnnnnnnnnnnnnnnnnnnnnnnnnnnnnnnnnnnnnnnnnnnnnnnnnnnnnnnnnnnnnnnnnnnnnnnnnnnnnnnnnnnnnnnnnnnnnnnnnnnnnnnnnnnnnnnnnnnnnnnnnnnnnnnnnnnnnnnnnnnnnnnnnnnnnnnnnnnnnnnnnnnnnnnnnnnnnnnnnnnnnnnnnnnnnnnnnnnnnnnnnnnnnnnnnnnnnnnnnnnnnnnnnnnnnnnnnnnnnnnnnnnnnnnnnnnnnnnnnnnnnnnnnnnnnnnnnnnnnnnnnnnnnnnnnnnnnnnnnnnnnnnnnnnnnnnnnnnnnnnnnnnnnnnnnnnnnnnnnnnnnnnnnnnnnnnnnnnnnnnnnnnnnnnnnnnnnnnnnnnnnnnnnnnnnnnnnnnnnnnnnnnnnnnnnnnnnnnnnnnnnnnnnnnnnnnnnnnnnnnnnnnnnnnnnnnnnnnnnnnnnnnnnnnnnnnnnnnnnnnnnnnnnnnnnnnnnnnnnnnnnnnnnnnnnnnnnnnnnnnnnnnnnnnnnnnnnnnnnnnnnnnnnnnnnnnnnnnnnnnnnnnnnnnnnnnnnnnnnnnnnnnnnnnnnnnnnnnnnnnnnnnnnnnnnnnnnnnnnnnnnnnnnnnnnnnnnnnnnnnnnnnnnnnnnnnnnnnnnnnnnnnnnnnnnnnnnnnnnnnnnnnnnnnnnnnnnnnnnnnnnnnnnnnnnnnnnnnnnnnnnnnnnnnnnnnnnnnnnnnnnnnnnnnnnnnnnnnnnnnnnnnnnnnnnnnnnnnnnnnnnnnnnnnnnnnnnnnnnnnnnnnnnnnnnnnnnnnnnnnnnnnnnnnnnnnnnnnnnnnnnnnnnnnnnnnnnnnnnnnnnnnnnnnnnnnnnnnnnnnnnnnnnnnnnnnnnnnnnnnnnnnnnnnnnnnnnnnnnnnnnnnnnnnnnnnnnnnnnnnnnnnnnnnnnnnnnnnnnnnnnnnnnnnnnnnnnnnnnnnnnnnnnnnnnnnnnnnnnnnnnnnnnnnnnnnnnnnnnnnnnnnnnnnnnnnnnnnnnnnnnnnnnnnnnnnnnnnnnnnnnnnnnnnnnnnnnnnnnnnnnnnnnnnnnnnnnnnnnnnnnnnnnnnnnnnnnnnnnnnnnnnnnnnnnnnnnnnnnnnnnnnnnnnnnnnnnnnnnnnnnnnnnnnnnnnnnnnnnnnnnnnnnnnnnnnnnnnnnnnnnnnnnnnnnnnnnnnnnnnnnnnnnnnnnnnnnnnnnnnnnnnnnnnnnnnnnnnnnnnnnnnnnnnnnnnnnnnnnnnnnnnnnnnnnnnnnnnnnnnnnnnnnnnnnnnnnnnnnnnnnnnnnnnnnnnnnnnnnnnnnnnnnnnnnnnnnnnnnnnnnnnnnnnnnnnnnnnnnnnnnnnnnnnnnnnnnnnnnnnnnnnnnnnnnnnnnnnnnnnnnnnnnnnnnnnnnnnnnnnnnnnnnnnnnnnnnnnnnnnnnnnnnnnnnnnnnnnnnnnnnnnnnnnnnnnnnnnnnnnnnnnnnnnnnnnnnnnnnnnnnnnnnnnnnnnnnnnnnnnnnnnnnnnnnnnnnnnnnnnnnnnnnnnnnnnnnnnnnnnnnnnnnnnnnnnnnnnnnnnnnnnnnnnnnnnnnnnnnnnnnnnnnnnnnnnnnnnnnnnnnnnnnnnnnnnnnnnnnnnnnnnnnnnnnnnnnnnnnnnnnnnnnnnnnnnnnnnnnnnnnnnnnnnnnnnnnnnnnnnnnnnnnnnnnnnnnnnnnnnnnnnnnnnnnnnnnnnnnnnnnnnnnnnnnnnnnnnnnnnnnnnnnnnnnnnnnnnnnnnnnnnnnnnnnnnnnnnnnnnnnnnnnnnnnnnnnnnnnnnnnnnnnnnnnnnnnnnnnnnnnnnnnnnnnnnnnnnnnnnnnnnnnnnnnnnnnnnnnnnnnnnnnnnnnnnnnnnnnnnnnnnnnnnnnnnnnnnnnnnnnnnnnnnnnnnnnnnnnnnnnnnnnnnnnnnnnnnnnnnnnnnnnnnnnnnnnnnnnnnnnnnnnnnnnnnnnnnnnnnnnnnnnnnnnnnnnnnnnnnnnnnnnnnnnnnnnnnnnnnnnnnnnnnnnnnnnnnnnnnnnnnnnnnnnnnnnnnnnnnnnnnnnnnnnnnnnnnnnnnnnnnnnnnnnnnnnnnnnnnnnnnnnnnnnnnnnnnnnnnnnnnnnnnnnnnnnnnnnnnnnnnnnnnnnnnnnnnnnnnnnnnnnnnnnnnnnnnnnnnnnnnnnnnnnnnnnnnnnnnnnnnnnnnnnnnnnnnnnnnnnnnnnnnnnnnnnnnnnnnnnnnnnnnnnnnnnnnnnnnnnnnnnnnnnnnnnnnnnnnnnnnnnnnnnnnnnnnnnnnnnnnnnnnnnnnnnnnnnnnnnnnnnnnnnnnnnnnnnnnnnnnnnnnnnnnnnnnnnnnnnnnnnnnnnnnnnnnnnnnnnnnnnnnnnnnnnnnnnnnnnnnnnnnnnnnnnnnnnnnnnnnnnnnnnnnnnnnnnnnnnnnnnnnnnnnnnnnnnnnnnnnnnnnnnnnnnnnnnnnnnnnnnnnnnnnnnnnnnnnnnnnnnnnnnnnnnnnnnnnnnnnnnnnnnnnnnnnnnnnnnnnnnnnnnnnnnnnnnnnnnnnnnnnnnnnnnnnnnnnnnnnnnnnnnnnnnnnnnnnnnnnnnnnnnnnnnnnnnnnnnnnnnnnnnnnnnnnnnnnnnnnnnnnnnnnnnnnnnnnnnnnnnnnnnnnnnnnnnnnnnnnnnnnnnnnnnnnnnnnnnnnnnnnnnnnnnnnnnnnnnnnnnnnnnnnnnnnnnnnnnnnnnnnnnnnnnnnnnnnnnnnnnnnnnnnnnnnnnnnnnnnnnnnnnnnnnnnnnnnnnnnnnnnnnnnnnnnnnnnnnnnnnnnnnnnnnnnnnnnnnnnnnnnnnnnnnnnnnnnnnnnnnnnnnnnnnnnnnnnnnnnnnnnnnnnnnnnnnnnnnnnnnnnnnnnnnnnnnnnnnnnnnnnnnnnnnnnnnnnnnnnnnnnnnnnnnnnnnnnnnnnnnnnnnnnnnnnnnnnnnnnnnnnnnnnnnnnnnnnnnnnnnnnnnnnnnnnnnnnnnnnnnnnnnnnnnnnnnnnnnnnnnnnnnnnnnnnnnnnnnnnnnnnnnnnnnnnnnnnnnnnnnnnnnnnnnnnnnnnnnnnnnnnnnnnnnnnnnnnnnnnnnnnnnnnnnnnnnnnnnnnnnnnnnnnnnnnnnnnnnnnnnnnnnnnnnnnnnnnnnnnnnnnnnnnnnnnnnnnnnnnnnnnnnnnnnnnnnnnnnnnnnnnnnnnnnnnnnnnnnnnnnnnnnnnnnnnnnnnnnnnnnnnnnnnnnnnnnnnnnnnnnnnnnnnnnnnnnnnnnnnnnnnnnnnnnnnnnnnnnnnnnnnnnnnnnnnnnnnnnnnnnnnnnnnnnnnnnnnnnnnnnnnnnnnnnnnnnnnnnnnnnnnnnnnnnnnnnnnnnnnnnnnnnnnnnnnnnnnnnnnnnnnnnnnnnnnnnnnnnnnnnnnnnnnnnnnnnnnnnnnnnnnnnnnnnnnnnnnnnnnnnnnnnnnnnnnnnnnnnnnnnnnnnnnnnnnnnnnnnnnnnnnnnnnnnnnnnnnnnnnnnnnnnnnnnnnnnnnnnnnnnnnnnnnnnnnnnnnnnnnnnnnnnnnnnnnnnnnnnnnnnnnnnnnnnnnnnnnnnnnnnnnnnnnnnnnnnnnnnnnnnnnnnnnnnnnnnnnnnnnnnnnnnnnnnnnnnnnnnnnnnnnnnnnnnnnnnnnnnnnnnnnnnnnnnnnnnnnnnnnnnnnnnnnnnnnnnnnnnnnnnnnnnnnnnnnnnnnnnnnnnnnnnnnnnnnnnnnnnnnnnnnnnnnnnnnnnnnnnnnnnnnnnnnnnnnnnnnnnnnnnnnnnnnnnnnnnnnnnnnnnnnnnnnnnnnnnnnnnnnnnnnnnnnnnnnnnnnnnnnnnnnnnnnnnnnnnnnnnnnnnnnnnnnnnnnnnnnnnnnnnnnnnnnnnnnnnnnnnnnnnnnnnnnnnnnnnnnnnnnnnnnnnnnnnnnnnnnnnnnnnnnnnnnnnnnnnnnnnnnnnnnnnnnnnnnnnnnnnnnnnnnnnnnnnnnnnnnnnnnnnnnnnnnnnnnnnnnnnnnnnnnnnnnnnnnnnnnnnnnnnnnnnnnnnnnnnnnnnnnnnnnnnnnnnnnnnnnnnnnnnnnnnnnnnnnnnnnnnnnnnnnnnnnnnnnnnnnnnnnnnnnnnnnnnnnnnnnnnnnnnnnnnnnnnnnnnnnnnnnnnnnnnnnnnnnnnnnnnnnnnnnnnnnnnnnnnnnnnnnnnnnnnnnnnnnnnnnnnnnnnnnnnnnnnnnnnnnnnnnnnnnnnnnnnnnnnnnnnnnnnnnnnnnnnnnnnnnnnnnnnnnnnnnnnnnnnnnnnnnnnnnnnnnnnnnnnnnnnnnnnnnnnnnnnnnnnnnnnnnnnnnnnnnnnnnnnnnnnnnnnnnnnnnnnnnnnnnnnnnnnnnnnnnnnnnnnnnnnnnnnnnnnnnnnnnnnnnnnnnnnnnnnnnnnnnnnnnnnnnnnnnnnnnnnnnnnnnnnnnnnnnnnnnnnnnnnnnnnnnnnnnnnnnnnnnnnnnnnnnnnnnnnnnnnnnnnnnnnnnnnnnnnnnnnnnnnnnnnnnnnnnnnnnnnnnnnnnnnnnnnnnnnnnnnnnnnnnnnnnnnnnnnnnnnnnnnnnnnnnnnnnnnnnnnnnnnnnnnnnnnnnnnnnnnnnnnnnnnnnnnnnnnnnnnnnnnnnnnnnnnnnnnnnnnnnnnnnnnnnnnnnnnnnnnnnnnnnnnnnnnnnnnnnnnnnnnnnnnnnnnnnnnnnnnnnnnnnnnnnnnnnnnnnnnnnnnnnnnnnnnnnnnnnnnnnnnnnnnnnnnnnnnnnnnnnnnnnnnnnnnnnnnnnnnnnnnnnnnnnnnnnnnnnnnnnnnnnnnnnnnnnnnnnnnnnnnnnnnnnnnnnnnnnnnnnnnnnnnnnnnnnnnnnnnnnnnnnnnnnnnnnnnnnnnnnnnnnnnnnnnnnnnnnnnnnnnnnnnnnnnnnnnnnnnnnnnnnnnnnnnnnnnnnnnnnnnnnnnnnnnnnnnnnnnnnnnnnnnnnnnnnnnnnnnnnnnnnnnnnnnnnnnnnnnnnnnnnnnnnnnnnnnnnnnnnnnnnnnnnnnnnnnnnnnnnnnnnnnnnnnnnnnnnnnnnnnnnnnnnnnnnnnnnnnnnnnnnnnnnnnnnnnnnnnnnnnnnnnnnnnnnnnnnnnnnnnnnnnnnnnnnnnnnnnnnnnnnnnnnnnnnnnnnnnnnnnnnnnnnnnnnnnnnnnnnnnnnnnnnnnnnnnnnnnnnnnnnnnnnnnnnnnnnnnnnnnnnnnnnnnnnnnnnnnnnnnnnnnnnnnnnnnnnnnnnnnnnnnnnnnnnnnnnnnnnnnnnnnnnnnnnnnnnnnnnnnnnnnnnnnnnnnnnnnnnnnnnnnnnnnnnnnnnnnnnnnnnnnnnnnnnnnnnnnnnnnnnnnnnnnnnnnnnnnnnnnnnnnnnnnnnnnnnnnnnnnnnnnnnnnnnnnnnnnnnnnnnnnnnnnnnnnnnnnnnnnnnnnnnnnnnnnnnnnnnnnnnnnnnnnnnnnnnnnnnnnnnnnnnnnnnnnnnnnnnnnnnnnnnnnnnnnnnnnnnnnnnnnnnnnnnnnnnnnnnnnnnnnnnnnnnnnnnnnnnnnnnnnnnnnnnnnnnnnnnnnnnnnnnnnnnnnnnnnnnnnnnnnnnnnnnnnnnnnnnnnnnnnnnnnnnnnnnnnnnnnnnnnnnnnnnnnnnnnnnnnnnnnnnnnnnnnnnnnnnnnnnnnnnnnnnnnnnnnnnnnnnnnnnnnnnnnnnnnnnnnnnnnnnnnnnnnnnnnnnnnnnnnnnnnnnnnnnnnnnnnnnnnnnnnnnnnnnnnnnnnnnnnnnnnnnnnnnnnnnnnnnnnnnnnnnnnnnnnnnnnnnnnnnnnnnnnnnnnnnnnnnnnnnnnnnnnnnnnnnnnnnnnnnnnnnnnnnnnnnnnnnnnnnnnnnnnnnnnnnnnnnnnnnnnnnnnnnnnnnnnnnnnnnnnnnnnnnnnnnnnnnnnnnnnnnnnnnnnnnnnnnnnnnnnnnnnnnnnnnnnnnnnnnnnnnnnnnnnnnnnnnnnnnnnnnnnnnnnnnnnnnnnnnnnnnnnnnnnnnnnnnnnnnnnnnnnnnnnnnnnnnnnnnnnnnnnnnnnnnnnnnnnnnnnnnnnnnnnnnnnnnnnnnnnnnnnnnnnnnnnnnnnnnnnnnnnnnnnnnnnnnnnnnnnnnnnnnnnnnnnnnnnnnnnnnnnnnnnnnnnnnnnnnnnnnnnnnnnnnnnnnnnnnnnnnnnnnnnnnnnnnnnnnnnnnnnnnnnnnnnnnnnnnnnnnnnnnnnnnnnnnnnnnnnnnnnnnnnnnnnnnnnnnnnnnnnnnnnnnnnnnnnnnnnnnnnnnnnnnnnnnnnnnnnnnnnnnnnnnnnnnnnnnnnnnnnnnnnnnnnnnnnnnnnnnnnnnnnnnnnnnnnnnnnnnnnnnnnnnnnnnnnnnnnnnnnnnnnnnnnnnnnnnnnnnnnnnnnnnnnnnnnnnnnnnnnnnnnnnnnnnnnnnnnnnnnnnnnnnnnnnnnnnnnnnnnnnnnnnnnnnnnnnnnnnnnnnnnnnnnnnnnnnnnnnnnnnnnnnnnnnnnnnnnnnnnnnnnnnnnnnnnnnnnnnnnnnnnnnnnnnnnnnnnnnnnnnnnnnnnnnnnnnnnnnnnnnnnnnnnnnnnnnnnnnnnnnnnnnnnnnnnnnnnnnnnnnnnnnnnnnnnnnnnnnnnnnnnnnnnnnnnnnnnnnnnnnnnnnnnnnnnnnnnnnnnnnnnnnnnnnnnnnnnnnnnnnnnnnnnnnnnnnnnnnnnnnnnnnnnnnnnnnnnnnnnnnnnnnnnnnnnnnnnnnnnnnnnnnnnnnnnnnnnnnnnnnnnnnnnnnnnnnnnnnnnnnnnnnnnnnnnnnnnnnnnnnnnnnnnnnnnnnnnnnnnnnnnnnnnnnnnnnnnnnnnnnnnnnnnnnnnnnnnnnnnnnnnnnnnnnnnnnnnnnnnnnnnnnnnnnnnnnnnnnnnnnnnnnnnnnnnnnnnnnnnnnnnnnnnnnnnnnnnnnnnnnnnnnnnnnnnnnnnnnnnnnnnnnnnnnnnnnnnnnnnnnnnnnnnnnnnnnnnnnnnnnnnnnnnnnnnnnnnnnnnnnnnnnnnnnnnnnnnnnnnnnnnnnnnnnnnnnnnnnnnnnnnnnnnnnnnnnnnnnnnnnnnnnnnnnnnnnnnnnnnnnnnnnnnnnnnnnnnnnnnnnnnnnnnnnnnnnnnnnnnnnnnnnnnnnnnnnnnnnnnnnnnnnnnnnnnnnnnnnnnnnnnnnnnnnnnnnnnnnnnnnnnnnnnnnnnnnnnnnnnnnnnnnnnnnnnnnnnnnnnnnnnnnnnnnnnnnnnnnnnnnnnnnnnnnnnnnnnnnnnnnnnnnnnnnnnnnnnnnnnnnnnnnnnnnnnnnnnnnnnnnnnnnnnnnnnnnnnnnnnnnnnnnnnnnnnnnnnnnnnnnnnnnnnnnnnnnnnnnnnnnnnnnnnnnnnnnnnnnnnnnnnnnnnnnnnnnnnnnnnnnnnnnnnnnnnnnnnnnnnnnnnnnnnnnnnnnnnnnnnnnnnnnnnnnnnnnnnnnnnnnnnnnnnnnnnnnnnnnnnnnnnnnnnnnnnnnnnnnnnnnnnnnnnnnnnnnnnnnnnnnnnnnnnnnnnnnnnnnnnnnnnnnnnnnnnnnnnnnnnnnnnnnnnnnnnnnnnnnnnnnnnnnnnnnnnnnnnnnnnnnnnnnnnnnnnnnnnnnnnnnnnnnnnnnnnnnnnnnnnnnnnnnnnnnnnnnnnnnnnnnnnnnnnnnnnnnnnnnnnnnnnnnnnnnnnnnnnnnnnnnnnnnnnnnnnnnnnnnnnnnnnnnnnnnnnnnnnnnnnnnnnnnnnnnnnnnnnnnnnnnnnnnnnnnnnnnttcaataaccccgaaagacagcaccatgacctcaaaccacacattggttgccaccatagacctgcacactgtgcaacccctgaccttcacccaccatggcacagaaggtctgcccctgctgacccgaggcattgatgctgaaggccgccaccagcgcagtgtctacatcccagccgcgcaactgcgggggcgcttgcgccacgaggctgctttggccgaactacgcagccgcccccacaaagccaaattggaagatgcgtatctattggcactgggacaagaccttcgccccaacgaagtcgaagagcccgaagccgttcgcctcaaagaacaaatcacatttcgccaacaaaaccctttgctcgatatctttgggacttggaaagtgtccagccgcttgtatgtgtcgcacctcttgcctgcggtcaatgtcttgcccgacaaagtcagccacattcgacgtgacttggacaccaaccaagacatgatggccttgctcgatgacacagaacaagaccgcttttatgagcgccaaggcaagcaaggtttggcctccaaagccgagggtttgatcaaactcagcttgcgcgaactggccgctgcccgcaaggccaaagacacggccaaggtggacgacatcaacgccaaattggaacagctgaaagccttgaagcaaacccaaaagggcgacgacacatctgacaacaccaagcacttgctggagctgcaagtaatccctgcaggtatcgccctcagcggcaagctcaccatcacccatgccacgcccttcgacttgcagaccttggtcaccgcctttgacggcttgagccgcaagccctttctcggggcacaacaagcgaggggttgtggcgaggtgagtgggcaggttcacttcaaaacacccgatggcgaggtgctgctggtgctgcaatttggcggcttgaaagcggctcaatgcgcatggacgctagaaggccagtcctttgtacaagcagcagaaccagtacacgcagccgaatgagctttcgcagcactgagcaacagcgctacgccaagctgatcgaaaccgcgctgcgccctggcccgcccttgttggcaggcgcagccgcaggtttgggcaagacccatggctacagcattcccttggtgcgctcgggcaagcgcatcgccatcgccatgagtacgcgacagttgatgcagcaatacttggaaagcgccgccctgcaagctgcccggcaaggccaagccattagcgtggtggctttgcaaacccgccacagttttgccagcgaacaggactaccaaactcaccgcacccaagccttgcaagcgcaagtgctggtgatcacccatgcagctgcgctgatcgacagcttgcagccaggttatgcccaactgcgccaacgcgatgtggttctgtttgacgaggccgatttgctggctgatgccgccgatctgcgcagtacctttcacatcagcgccgccacccttgccgactgcggtgctgcttcgctgacaccggcaatcgcagcgcaaaaagtgctgcaacacgccacccagcccgaggaccgttgcgccgccagtgccatcttgtatgcattgactcaccctgcggtttacaaagtggttggttatgacgatgacggcgctttgctgctcaagcaccgcatgccaggtcgaatgctcaagcctctggtgcgagatgtgccacgctgcatcttcaccagcggtacgctgcaagtgaatggccgctttgactattttgtgggttgcctgggcctgcaagccatcgcccccgaaagccgccaccttgaccccgcacagcatggcaagctgaaggtggaagtgaccactgaatccctgacgcaccatgctatggcccagcgcatcgcccatgccgccaaaccctgcttggtgctgaccaacagccaccacatgagcgcccaactgggtgcgttattgcccgacacggtggtccgtacgccgcaagaatccctggctgacgccgtgcaacgctgccccgatggcggggtgctgatcgcagcgggtgcgtggtcgggattggatgaaccccgcttgcgctggcaaaccgtggtcattccgcaaacgccttatggtcaacccatggaagtaaatgggcaagccctcaaccatttcatcgacagccaagtggtggcactgcgccgaacctaccaaggcttgcaccgagggcttcgcacccccgacgcgcaatgcaccctgctgttactagacccccgcagcagccgcatggctttgcgccccgccattcctgaacgcttccatgtggactgggacggttttgaagagggtgctgaagtcttgcaaacccatctccagcgcgagcgcaacgcccagctgcgcgataccgccctcaagcaccatggccaccaatgcatgcactcagattgccttgtgaccgctttgcatttgctggaagttcaccacacccgccccatcagcgaaggtgagcgccgcaccacactcgatgaggtgcagattttgtgcaaaaaccaccatgcccaagcccatcacgaactgcgtcaagccattttttgcaaacccaaaccaaagaaaacactttgacttcaagcgcttaagaagagtcgggactagccgccatgtatttgtgcggttactagaacgacatagacgcacagtacggccca

SEQ ID NO: 229 - DNA, 11790 bp, Artificial Sequence
  Synthetic Oligonucleotide
  misc_feature (1)..(5022): n is a, c, g, or t
nnnnnnnnnnnnnnnnnnnnnnnnnnnnnnnnnnnnnnnnnnnnnnnnnnnnnnnnnnnnnnnnnnnnnnnnnnnnnnnnnnnnnnnnnnnnnnnnnnnnnnnnnnnnnnnnnnnnnnnnnnnnnnnnnnnnnnnnnnnnnnnnnnnnnnnnnnnnnnnnnnnnnnnnnnnnnnnnnnnnnnnnnnnnnnnnnnnnnnnnnnnnnnnnnnnnnnnnnnnnnnnnnnnnnnnnnnnnnnnnnnnnnnnnnnnnnnnnnnnnnnnnnnnnnnnnnnnnnnnnnnnnnnnnnnnnnnnnnnnnnnnnnnnnnnnnnnnnnnnnnnnnnnnnnnnnnnnnnnnnnnnnnnnnnnnnnnnnnnnnnnnnnnnnnnnnnnnnnnnnnnnnnnnnnnnnnnnnnnnnnnnnnnnnnnnnnnnnnnnnnnnnnnnnnnnnnnnnnnnnnnnnnnnnnnnnnnnnnnnnnnnnnnnnnnnnnnnnnnnnnnnnnnnnnnnnnnnnnnnnnnnnnnnnnnnnnnnnnnnnnnnnnnnnnnnnnnnnnnnnnnnnnnnnnnnnnnnnnnnnnnnnnnnnnnnnnnnnnnnnnnnnnnnnnnnnnnnnnnnnnnnnnnnnnnnnnnnnnnnnnnnnnnnnnnnnnnnnnnnnnnnnnnnnnnnnnnnnnnnnnnnnnnnnnnnnnnnnnnnnnnnnnnnnnnnnnnnnnnnnnnnnnnnnnnnnnnnnnnnnnnnnnnnnnnnnnnnnnnnnnnnnnnnnnnnnnnnnnnnnnnnnnnnnnnnnnnnnnnnnnnnnnnnnnnnnnnnnnnnnnnnnnnnnnnnnnnnnnnnnnnnnnnnnnnnnnnnnnnnnnnnnnnnnnnnnnnnnnnnnnnnnnnnnnnnnnnnnnnnnnnnnnnnnnnnnnnnnnnnnnnnnnnnnnnnnnnnnnnnnnnnnnnnnnnnnnnnnnnnnnnnnnnnnnnnnnnnnnnnnnnnnnnnnnnnnnnnnnnnnnnnnnnnnnnnnnnnnnnnnnnnnnnnnnnnnnnnnnnnnnnnnnnnnnnnnnnnnnnnnnnnnnnnnnnnnnnnnnnnnnnnnnnnnnnnnnnnnnnnnnnnnnnnnnnnnnnnnnnnnnnnnnnnnnnnnnnnnnnnnnnnnnnnnnnnnnnnnnnnnnnnnnnnnnnnnnnnnnnnnnnnnnnnnnnnnnnnnnnnnnnnnnnnnnnnnnnnnnnnnnnnnnnnnnnnnnnnnnnnnnnnnnnnnnnnnnnnnnnnnnnnnnnnnnnnnnnnnnnnnnnnnnnnnnnnnnnnnnnnnnnnnnnnnnnnnnnnnnnnnnnnnnnnnnnnnnnnnnnnnnnnnnnnnnnnnnnnnnnnnnnnnnnnnnnnnnnnnnnnnnnnnnnnnnnnnnnnnnnnnnnnnnnnnnnnnnnnnnnnnnnnnnnnnnnnnnnnnnnnnnnnnnnnnnnnnnnnnnnnnnnnnnnnnnnnnnnnnnnnnnnnnnnnnnnnnnnnnnnnnnnnnnnnnnnnnnnnnnnnnnnnnnnnnnnnnnnnnnnnnnnnnnnnnnnnnnnnnnnnnnnnnnnnnnnnnnnnnnnnnnnnnnnnnnnnnnnnnnnnnnnnnnnnnnnnnnnnnnnnnnnnnnnnnnnnnnnnnnnnnnnnnnnnnnnnnnnnnnnnnnnnnnnnnnnnnnnnnnnnnnnnnnnnnnnnnnnnnnnnnnnnnnnnnnnnnnnnnnnnnnnnnnnnnnnnnnnnnnnnnnnnnnnnnnnnnnnnnnnnnnnnnnnnnnnnnnnnnnnnnnnnnnnnnnnnnnnnnnnnnnnnnnnnnnnnnnnnnnnnnnnnnnnnnnnnnnnnnnnnnnnnnnnnnnnnnnnnnnnnnnnnnnnnnnnnnnnnnnnnnnnnnnnnnnnnnnnnnnnnnnnnnnnnnnnnnnnnnnnnnnnnnnnnnnnnnnnnnnnnnnnnnnnnnnnnnnnnnnnnnnnnnnnnnnnnnnnnnnnnnnnnnnnnnnnnnnnnnnnnnnnnnnnnnnnnnnnnnnnnnnnnnnnnnnnnnnnnnnnnnnnnnnnnnnnnnnnnnnnnnnnnnnnnnnnnnnnnnnnnnnnnnnnnnnnnnnnnnnnnnnnnnnnnnnnnnnnnnnnnnnnnnnnnnnnnnnnnnnnnnnnnnnnnnnnnnnnnnnnnnnnnnnnnnnnnnnnnnnnnnnnnnnnnnnnnnnnnnnnnnnnnnnnnnnnnnnnnnnnnnnnnnnnnnnnnnnnnnnnnnnnnnnnnnnnnnnnnnnnnnnnnnnnnnnnnnnnnnnnnnnnnnnnnnnnnnnnnnnnnnnnnnnnnnnnnnnnnnnnnnnnnnnnnnnnnnnnnnnnnnnnnnnnnnnnnnnnnnnnnnnnnnnnnnnnnnnnnnnnnnnnnnnnnnnnnnnnnnnnnnnnnnnnnnnnnnnnnnnnnnnnnnnnnnnnnnnnnnnnnnnnnnnnnnnnnnnnnnnnnnnnnnnnnnnnnnnnnnnnnnnnnnnnnnnnnnnnnnnnnnnnnnnnnnnnnnnnnnnnnnnnnnnnnnnnnnnnnnnnnnnnnnnnnnnnnnnnnnnnnnnnnnnnnnnnnnnnnnnnnnnnnnnnnnnnnnnnnnnnnnnnnnnnnnnnnnnnnnnnnnnnnnnnnnnnnnnnnnnnnnnnnnnnnnnnnnnnnnnnnnnnnnnnnnnnnnnnnnnnnnnnnnnnnnnnnnnnnnnnnnnnnnnnnnnnnnnnnnnnnnnnnnnnnnnnnnnnnnnnnnnnnnnnnnnnnnnnnnnnnnnnnnnnnnnnnnnnnnnnnnnnnnnnnnnnnnnnnnnnnnnnnnnnnnnnnnnnnnnnnnnnnnnnnnnnnnnnnnnnnnnnnnnnnnnnnnnnnnnnnnnnnnnnnnnnnnnnnnnnnnnnnnnnnnnnnnnnnnnnnnnnnnnnnnnnnnnnnnnnnnnnnnnnnnnnnnnnnnnnnnnnnnnnnnnnnnnnnnnnnnnnnnnnnnnnnnnnnnnnnnnnnnnnnnnnnnnnnnnnnnnnnnnnnnnnnnnnnnnnnnnnnnnnnnnnnnnnnnnnnnnnnnnnnnnnnnnnnnnnnnnnnnnnnnnnnnnnnnnnnnnnnnnnnnnnnnnnnnnnnnnnnnnnnnnnnnnnnnnnnnnnnnnnnnnnnnnnnnnnnnnnnnnnnnnnnnnnnnnnnnnnnnnnnnnnnnnnnnnnnnnnnnnnnnnnnnnnnnnnnnnnnnnnnnnnnnnnnnnnnnnnnnnnnnnnnnnnnnnnnnnnnnnnnnnnnnnnnnnnnnnnnnnnnnnnnnnnnnnnnnnnnnnnnnnnnnnnnnnnnnnnnnnnnnnnnnnnnnnnnnnnnnnnnnnnnnnnnnnnnnnnnnnnnnnnnnnnnnnnnnnnnnnnnnnnnnnnnnnnnnnnnnnnnnnnnnnnnnnnnnnnnnnnnnnnnnnnnnnnnnnnnnnnnnnnnnnnnnnnnnnnnnnnnnnnnnnnnnnnnnnnnnnnnnnnnnnnnnnnnnnnnnnnnnnnnnnnnnnnnnnnnnnnnnnnnnnnnnnnnnnnnnnnnnnnnnnnnnnnnnnnnnnnnnnnnnnnnnnnnnnnnnnnnnnnnnnnnnnnnnnnnnnnnnnnnnnnnnnnnnnnnnnnnnnnnnnnnnnnnnnnnnnnnnnnnnnnnnnnnnnnnnnnnnnnnnnnnnnnnnnnnnnnnnnnnnnnnnnnnnnnnnnnnnnnnnnnnnnnnnnnnnnnnnnnnnnnnnnnnnnnnnnnnnnnnnnnnnnnnnnnnnnnnnnnnnnnnnnnnnnnnnnnnnnnnnnnnnnnnnnnnnnnnnnnnnnnnnnnnnnnnnnnnnnnnnnnnnnnnnnnnnnnnnnnnnnnnnnnnnnnnnnnnnnnnnnnnnnnnnnnnnnnnnnnnnnnnnnnnnnnnnnnnnnnnnnnnnnnnnnnnnnnnnnnnnnnnnnnnnnnnnnnnnnnnnnnnnnnnnnnnnnnnnnnnnnnnnnnnnnnnnnnnnnnnnnnnnnnnnnnnnnnnnnnnnnnnnnnnnnnnnnnnnnnnnnnnnnnnnnnnnnnnnnnnnnnnnnnnnnnnnnnnnnnnnnnnnnnnnnnnnnnnnnnnnnnnnnnnnnnnnnnnnnnnnnnnnnnnnnnnnnnnnnnnnnnnnnnnnnnnnnnnnnnnnnnnnnnnnnnnnnnnnnnnnnnnnnnnnnnnnnnnnnnnnnnnnnnnnnnnnnnnnnnnnnnnnnnnnnnnnnnnnnnnnnnnnnnnnnnnnnnnnnnnnnnnnnnnnnnnnnnnnnnnnnnnnnnnnnnnnnnnnnnnnnnnnnnnnnnnnnnnnnnnnnnnnnnnnnnnnnnnnnnnnnnnnnnnnnnnnnnnnnnnnnnnnnnnnnnnnnnnnnnnnnnnnnnnnnnnnnnnnnnnnnnnnnnnnnnnnnnnnnnnnnnnnnnnnnnnnnnnnnnnnnnnnnnnnnnnnnnnnnnnnnnnnnnnnnnnnnnnnnnnnnnnnnnnnnnnnnnnnnnnnnnnnnnnnnnnnnnnnnnnnnnnnnnnnnnnnnnnnnnnnnnnnnnnnnnnnnnnnnnnnnnnnnnnnnnnnnnnnnnnnnnnnnnnnnnnnnnnnnnnnnnnnnnnnnnnnnnnnnnnnnnnnnnnnnnnnnnnnnnnnnnnnnnnnnnnnnnnnnnnnnnnnnnnnnnnnnnnnnnnnnnnnnnnnnnnnnnnnnnnnnnnnnnnnnnnnnnnnnnnnnnnnnnnnnnnnnnnnnnnnnnnnnnnnnnnnnnnnnnnnnnnnnnnnnnnnnnnnnnnnnnnnnnnnnnnnnnnnnnnnnnnnnnnnnnnnnnnnnnnnnnnnnnnnnnnnnnnnnnnnnnnnnnnnnnnnnnnnnnnnnnnnnnnnnnnnnnnnnnnnnnnnnnnnnnnnnnnnnnnnnnnnnnnnnnnnnnnnnnnnnnnnnnnnnnnnnnnnnnnnnnnnnnnnnnnnnnnnnnnnnnnnnnnnnnnnnnnnnnnnnnnnnnnnnnnnnnnnnnnnnnnnnnnnnnnnnnnnnnnnnnnnnnnnnnnnnnnnnnnnnnnnnnnnnnnnnnnnnnnnnnnnnnnnnnggtccacgctcggctccttcctcggttcgctcagcctgtcgctgctggtcatgcaatggctgggcgtctcggcggcggtgctggcctgcgcgctgttgctgctcggcggcacgctgctgctcggcgggcgtaatttgaaaattgcccttttttgcgcgtcgaccgcaaccgtcgccctttttttcaacctgcaccatgaagtcaccgccgacactgcctacgccgaatacatcgtcggaccggcaccgctgcccggccagaccgacccgcgcgccttctgggtcaacaaatcgacagcctcgctgatcgacgattccgagccgcccaactacacgcgctacatcaagcgcctgcgccagatcctgcttgacgaactggccttccgcgaacgcgagattctcgtcctcggcgccggcggcttcacgctatcgcaccgcgagccgatgaaccgctacacctatgtcgacatcgacccggcgatcaagggcatcgccgagcaacacttcctgcgcgagccgacgcgcggcgaattcatcgccgacgacgcccgccgcttcgtggctaccaccgaacgccacttcgacgccgtcgtcgtcgacgtctacagctcgcatacctcgatccccagccacctggtcacccgtgaattctgggcaggcacccgccgggtgctgaagcccgatggcgttttgctcgccaacctgatcctcgacggcaagctggaaacgccctacgcgcgcaacctgctggcgaccatcgacagtgttttcgggcgttgcgcggtcgacgtgctgcacaaagcagaaacgctgtccaacgtcgtcgtcacctgctttgccagcagccgaccggcggcgaccggcaacatctacgtcgacgaaaaaaaccgcgccgacctcgacatggcacgctcgcgttaggcgaatcaaggccgccgctccattgacaatttgatttgtcacactataaatcgtactattaagcgtgctttaaacaatgcttcaaaaggaaagatcatgtccaacctgacagcgaacgaccttaaaaccaaaggcatcgcagccatcgaatccgtgctggccgaatgcaccgaagcaaccgtttcggtgcgtggcaaggatcgtttcgtggtgatggatattgcgcggtatcactatctgcgcgagtgcgaactcgaagccgcgctggccgaaactcgcgccgacatggcggccgggcgttttgtgcaggaatcgccagaggcgcatctggcacgaatcaaatccgccgcatgagccattgcctgatcttcaccgcgcaatacaacaagcgcgcggcgcgtttcctgaaacggcatcccgaactcgaaaagcagtacctcaaaacactgcaactgctggaactcaatccccatcacccatccctgcgcctgcatcctttgagtggcaaactgcaagccctgcattccgtctcgatcaacctctcctaccgcattacgctggagctgctgatccaggacgagcagatcatcccggtaaacgtgggcgaccacgacgcggtgtattgaggatcgttgcaacgcgtttccggcgagcaataccatttcgccacgctgaccggcaatccgccttttccgtcaatgcccaacgcatagcagagtaaaatcctcacggacaaccagaaaacggagggcgaatggacaagctaaaaataaccgcgcatcttctcgcgccgctcgttaccggcggcggctacatgacgctcgacggcctgctggcggcacttctgttcgaccggcttcatgacgtcgacgctgcccatgcggcaattcctgtccgtcagaccgctggcctgctgcacgccagcgcggcaatcatggagccgattcgcgagcgggtctccttcatcgccgcgcttcggcccacgcacagcatcgaccccgaccacgttcagaagaacaagcacgggcagttgcaccgcaagttcgacacctcgttgaccaatgtcatgaacagctacgccatgctgaccgccccgaccgtcacctggtacgccgaaggcgacgccgaccgcatcggccagttgcttgcaccggtgcaattcatcggcaaacggcgcgccgccgggtttggtcgcgttgcgcaatggcagatcgaaccggacgacctcgacggcatcgaaggcaccttcggcgagccgctgcgcccagtgccggtcgacatgttcaagggcgacaaaacccaccccatcgtcgacgccgcctggcgcccggcctactggaacccgatacacagaacggcgtgttacgcgccaacctgaggaacaacggtgctcgctttcttcaacgacaatttcggccgccatctggtcgaacaaaccgacgatccggtcgccgatgcccggcgcgccctgtcatcggggcaccggatgaaaaagggtggcggcccgcagcgcatcgcatccggctgggccatcattcgccccgcaaaatccaccatgcaatttgaactcgcggcggatggcatcgaatacagcaagcagacacgctacgaagcatttctggccgaactggaaaactgggatggcacgccgcgcatgttcatcgaattcgccaaacgccccgttccggtcggcaatctgttccgcaccttcgatctgcgccaagtgcgcatctgctcgcccagtggcgtcgagacattcgatttcaccaaggcgccggaaaaagacgggtgcaagacacacaaggttctatggaaactcaaaaagggggaaaagtgacggacttcgtactccaaaagccaccgaccgtccgtggctacgccctgcaccgcatggctgccggactggccggtggcgacccggtactgtttgccgattgcggcgaccacttgcggttgcgtaccgacaaaccactggcggtggatcggcagccgctgcgcagcgtcagccccggcgacatcgtcggtttcgagctgcgcgcctgtgtcggcaagaagatcaagggcaaacatcgctactttccgaccgccgactggcgcagccggcaccaatggctggcgcggcagggcgagctgcacggattcaccatcgttaccgtgcattgcaccgccgcgatgctggccatcaaggcgggcgaacgacaattcaccgtcgaccagaccgatttcaccggcgttctcaaagtcaccgacgttgaacgcttcaaccaagccgtcgccaatggcatcggcaacaaggccagggctttcggctttggcatgctgctcatttaacgaggtacgccgccgtgaaaaccatcgtcatcaacgcccgcatcgccaccgttgccccgctctccatcaccctgccggtggccgaaggccagcttggcaacaagttcaacaacttccccatcgtcacccgtggccttgacgacgatggcaacaagttgcagaccggctacctgccggccaccacgctgcgcggatttctccgtcgcgccatcgtcaccgaccagatgatgcaggcagcggcggcaggcaaacactacaccctgcaaaaagcctatgccgacctgatcgggcaggatgcggcatcggaatcgaaagacgacatcgacctgctgaaactgcgccagacccgcgaggaaaatgccgtgcttgacctcttcggttccgggctgggcatcaagtcgcgcctgctggtgtcgcacttcatgccgacccacaacgtcctgcccgaagtcatgaccggcgtccgcaaagacctggaagacaccgacgacgtactggacatgctctcgccggccgaccgcgacctttatctcggccgcgccgaagccaacagccggcgcgccgccgcccagaccgtggtcaaaggcctggaaggcaagattcgccgggcacgaaaggccggcgaggaagttggcgaactggagcaagccctgacggaagcacaggcggtggtcgcccgccacgaatccgagatgggcgacatgaccaattcgtcgcgcaccctgaccaattacttcgccctgcctgccgggatcgaactgagcgggcgcctggtcatcgaaaacgcccgcgagcgcgacctgccgatgctggaactggcgctggacgcgctgtcgaagcggccgatactcggcgcgcaaagcgcccgtggttgcggcgaaatcgaaggcatgttcgatgttgcggtcgacggcgttttaacccggaaaatcaaaatcggcggctggcaagcggcgacggttacggacttttcagcggcggcaatggcaaaaactgctgtctgagcagtgggttgcggatagtgagatcaagctacctcgctgttgggtggttactggaactcagcccagcgaaggccttgcgcatctcgggatcaagctacctcgctgttgggtggttactggaacccgcgcgcagatcgacctgaccccaatgtcgatcaagctacctcgctgttgggtggttactggaacttctcggatcgggcaatgattcgatggacggatcaagctacctcgctgttgggtggttactggaactagttctcgacgatgcgctgcgcattggttgatcaagctacctcgctgttgggtggttactggaactgcaccaccatcctcgacttctacaaggtggatcaagccacctcgctgttgtgtggttactggaactaggcgcgcatataggtattgaccagctccgatcaagccaccccgctgttgggtggttactggaacagtcgaccgcgacaggtgtcgtaacggcgaagtcaagccacccggagggtgggtggttcctggaacttgcaatagccgaagccttccagcacggcggaccaagccaccccgttgttgggtggttactggaacaaaaatgcctcaaaatagccgtcagccgccaatcaagccacctgctgttgggtggttactagaacgagtatcacgagaatttcatcgatagcgaagatcaagccaccccgccgtggctactacaaaaagcaaatgtcatgtttcgctcaaccgagcaatcgacttacgcagccattgtcgccaaacacctggctatcgccgatgcgccgctgttactggaaggcgggacgggcatcggcaagacgcgggcgtatctttcggcgctcttccaatccggacggcgggttgccgttgtcctgccgacgcaccagttgatcgatcaattgctggattccggcgatctggcggcaacgcgcgacgcggctacggtggccgcgttccggcccgcgcggatgttcgagcggcgcgccgactatgaagcaggcaaacgcgccgccgacgccgcacaagtcatgttgtgcacggcggccagtgtcatcatcgaccatcgtctggatggcgaatacaacggctcgacgacccgcgactacctgttgttcgacgaggcggatcagctcccggacatggctgccctgcaaagcgatttcgccatcaccagcgccgaactggccgagttgggcattcgcgtaacgaatgttgccgatgcgctgaatgcgatcctggcgaagaagccacgcagcgtggcaccggaaacccgggcggcggcgcgcgtcattctcgacgccatcgtggaaccggcctggtatcagtccgccggcttgaacgacgatggcgacatcgtactgacgcacaagctgcccggccgcctgttgaagaagatcagcaaccggggcaacgtggcttttgtctcggcgaccctgaccgtcggcggtcgcttcaaggatttcatgaacagcatggccatcgaagcatgcagccacctgtcctgcgccatcgaaccggaacggcacggcgcgctcgatttccacatgatcccgctggcggtcgatacaccggaatggctggcggccatcgtccagacggcgcaggaggcggccaagccggtgctgatcgcaaccccgtcgcacgagctttcgtacctgcttggccaacggctgccggacgccattgtcaggacggccgatgaaaccgccacgcaagccgccatacgtgtgcccgccgggggcatcctgattgcggctggcgcctgggcggggctcgataccgcgctgcgctggcgctcaatcattgtaccaagagtaccgttcggacagccgcaggtgatcgatggcgaggtaacgaccagctatttcgatgcacgcaacacggcgacccgccgcttgcgtcaggtcatcgggcgcggcctgcgcacgcccgatgcggtctgtagcgtttatcttctcgacgcccgagccgagaaactcggtggtttcgttccggcacgcttctcggtcgcatggtcggggcgaacctatccggaaggtgcgcggcaagagttggtgctgtcaaaggcggaacgcgacccggcactacgccgcgcggcgctgaaccactacgggcggaagtgcatggctcccggctgtggtttcgtgccgaaagtcgattcgcagctcgatgttcaccacctcgacccgattgccgaggggcaacgggaaacacgaatcgaggatgtggtggttctgtgtgcgaactgccatcgactggcgcactcgacttactgaaaaccttggaggcctaacgcctttgatcgctggcctgttgcggtcgaccgccaaaaaagggcaaatttgcccgatccggaatcgcgcgacggcgcccagcccattacatccggaaacatttgcgtacacatcggcgtcagtcgcttccatcgttcccgcgttatttccatcatgaaccacgatgagataacgtcatgtccagcttactgaaaatcgccgcctcgctgg

SEQ ID NO: 230 - DNA, 11790 bp, Artificial Sequence; identical to SEQ ID NO: 229
  Synthetic Oligonucleotide
  misc_feature (1)..(5022): n is a, c, g, or t

SEQ ID NO: 231 - DNA, 11790 bp, Artificial Sequence
  Synthetic Oligonucleotide
  misc_feature (1)..(5126): n is a, c, g, or t
nnnnnnnnnnnnnnnnnnnnnnnnnnnnnnnnnnnnnnnnnnnnnnnnnnnnnnnnnnnnnnnnnnnnnnnnnnnnnnnnnnnnnnnnnnnnnnnnnnnnnnnnnnnnnnnnnnnnnnnnnnnnnnnnnnnnnnnnnnnnnnnnnnnnnnnnnnnnnnnnnnnnnnnnnnnnnnnnnnnnnnnnnnnnnnnnnnnnnnnnnnnnnnnnnnnnnnnnnnnnnnnnnnnnnnnnnnnnnnnnnnnnnnnnnnnnnnnnnnnnnnnnnnnnnnnnnnnnnnnnnnnnnnnnnnnnnnnnnnnnnnnnnnnnnnnnnnnnnnnnnnnnnnnnnnnnnnnnnnnnnnnnnnnnnnnnnnnnnnnnnnnnnnnnnnnnnnnnnnnnnnnnnnnnnnnnnnnnnnnnnnnnnnnnnnnnnnnnnnnnnnnnnnnnnnnnnnnnnnnnnnnnnnnnnnnnnnnnnnnnnnnnnnnnnnnnnnnnnnnnnnnnnnnnnnnnnnnnnnnnnnnnnnnnnnnnnnnnnnnnnnnnnnnnnnnnnnnnnnnnnnnnnnnnnnnnnnnnnnnnnnnnnnnnnnnnnnnnnnnnnnnnnnnnnnnnnnnnnnnnnnnnnnnnnnnnnnnnnnnnnnnnnnnnnnnnnnnnnnnnnnnnnnnnnnnnnnnnnnnnnnnnnnnnnnnnnnnnnnnnnnnnnnnnnnnnnnnnnnnnnnnnnnnnnnnnnnnnnnnnnnnnnnnnnnnnnnnnnnnnnnnnnnnnnnnnnnnnnnnnnnnnnnnnnnnnnnnnnnnnnnnnnnnnnnnnnnnnnnnnnnnnnnnnnnnnnnnnnnnnnnnnnnnnnnnnnnnnnnnnnnnnnnnnnnnnnnnnnnnnnnnnnnnnnnnnnnnnnnnnnnnnnnnnnnnnnnnnnnnnnnnnnnnnnnnnnnnnnnnnnnnnnnnnnnnnnnnnnnnnnnnnnnnnnnnnnnnnnnnnnnnnnnnnnnnnnnnnnnnnnnnnnnnnnnnnnnnnnnnnnnnnnnnnnnnnnnnnnnnnnnnnnnnnnnnnnnnnnnnnnnnnnnnnnnnnnnnnnnnnnnnnnnnnnnnnnnnnnnnnnnnnnnnnnnnnnnnnnnnnnnnnnnnnnnnnnnnnnnnnnnnnnnnnnnnnnnnnnnnnnnnnnnnnnnnnnnnnnnnnnnnnnnnnnnnnnnnnnnnnnnnnnnnnnnnnnnnnnnnnnnnnnnnnnnnnnnnnnnnnnnnnnnnnnnnnnnnnnnnnnnnnnnnnnnnnnnnnnnnnnnnnnnnnnnnnnnnnnnnnnnnnnnnnnnnnnnnnnnnnnnnnnnnnnnnnnnnnnnnnnnnnnnnnnnnnnnnnnnnnnnnnnnnnnnnnnnnnnnnnnnnnnnnnnnnnnnnnnnnnnnnnnnnnnnnnnnnnnnnnnnnnnnnnnnnnnnnnnnnnnnnnnnnnnnnnnnnnnnnnnnnnnnnnnnnnnnnnnnnnnnnnnnnnnnnnnnnnnnnnnnnnnnnnnnnnnnnnnnnnnnnnnnnnnnnnnnnnnnnnnnnnnnnnnnnnnnnnnnnnnnnnnnnnnnnnnnnnnnnnnnnnnnnnnnnnnnnnnnnnnnnnnnnnnnnnnnnnnnnnnnnnnnnnnnnnnnnnnnnnnnnnnnnnnnnnnnnnnnnnnnnnnnnnnnnnnnnnnnnnnnnnnnnnnnnnnnnnnnnnnnnnnnnnnnnnnnnnnnnnnnnnnnnnnnnnnnnnnnnnnnnnnnnnnnnnnnnnnnnnnnnnnnnnnnnnnnnnnnnnnnnnnnnnnnnnnnnnnnnnnnnnnnnnnnnnnnnnnnnnnnnnnnnnnnnnnnnnnnnnnnnnnnnnnnnnnnnnnnnnnnnnnnnnnnnnnnnnnnnnnnnnnnnnnnnnnnnnnnnnnnnnnnnnnnnnnnnnnnnnnnnnnnnnnnnnnnnnnnnnnnnnnnnnnnnnnnnnnnnnnnnnnnnnnnnnnnnnnnnnnnnnnnnnnnnnnnnnnnnnnnnnnnnnnnnnnnnnnnnnnnnnnnnnnnnnnnnnnnnnnnnnnnnnnnnnnnnnnnnnnnnnnnnnnnnnnnnnnnnnnnnnnnnnnnnnnnnnnnnnnnnnnnnnnnnnnnnnnnnnnnnnnnnnnnnnnnnnnnnnnnnnnnnnnnnnnnnnnnnnnnnnnnnnnnnnnnnnnnnnnnnnnnnnnnnnnnnnnnnnnnnnnnnnnnnnnnnnnnnnnnnnnnnnnnnnnnnnnnnnnnnnnnnnnnnnnnnnnnnnnnnnnnnnnnnnnnnnnnnnnnnnnnnnnnnnnnnnnnnnnnnnnnnnnnnnnnnnnnnnnnnnnnnnnnnnnnnnnnnnnnnnnnnnnnnnnnnnnnnnnnnnnnnnnnnnnnnnnnnnnnnnnnnnnnnnnnnnnnnnnnnnnnnnnnnnnnnnnnnnnnnnnnnnnnnnnnnnnnnnnnnnnnnnnnnnnnnnnnnnnnnnnnnnnnnnnnnnnnnnnnnnnnnnnnnnnnnnnnnnnnnnnnnnnnnnnnnnnnnnnnnnnnnnnnnnnnnnnnnnnnnnnnnnnnnnnnnnnnnnnnnnnnnnnnnnnnnnnnnnnnnnnnnnnnnnnnnnnnnnnnnnnnnnnnnnnnnnnnnnnnnnnnnnnnnnnnnnnnnnnnnnnnnnnnnnnnnnnnnnnnnnnnnnnnnnnnnnnnnnnnnnnnnnnnnnnnnnnnnnnnnnnnnnnnnnnnnnnnnnnnnnnnnnnnnnnnnnnnnnnnnnnnnnnnnnnnnnnnnnnnnnnnnnnnnnnnnnnnnnnnnnnnnnnnnnnnnnnnnnnnnnnnnnnnnnnnnnnnnnnnnnnnnnnnnnnnnnnnnnnnnnnnnnnnnnnnnnnnnnnnnnnnnnnnnnnnnnnnnnnnnnnnnnnnnnnnnnnnnnnnnnnnnnnnnnnnnnnnnnnnnnnnnnnnnnnnnnnnnnnnnnnnnnnnnnnnnnnnnnnnnnnnnnnnnnnnnnnnnnnnnnnnnnnnnnnnnnnnnnnnnnnnnnnnnnnnnnnnnnnnnnnnnnnnnnnnnnnnnnnnnnnnnnnnnnnnnnnnnnnnnnnnnnnnnnnnnnnnnnnnnnnnnnnnnnnnnnnnnnnnnnnnnnnnnnnnnnnnnnnnnnnnnnnnnnnnnnnnnnnnnnnnnnnnnnnnnnnnnnnnnnnnnnnnnnnnnnnnnnnnnnnnnnnnnnnnnnnnnnnnnnnnnnnnnnnnnnnnnnnnnnnnnnnnnnnnnnnnnnnnnnnnnnnnnnnnnnnnnnnnnnnnnnnnnnnnnnnnnnnnnnnnnnnnnnnnnnnnnnnnnnnnnnnnnnnnnnnnnnnnnnnnnnnnnnnnnnnnnnnnnnnnnnnnnnnnnnnnnnnnnnnnnnnnnnnnnnnnnnnnnnnnnnnnnnnnnnnnnnnnnnnnnnnnnnnnnnnnnnnnnnnnnnnnnnnnnnnnnnnnnnnnnnnnnnnnnnnnnnnnnnnnnnnnnnnnnnnnnnnnnnnnnnnnnnnnnnnnnnnnnnnnnnnnnnnnnnnnnnnnnnnnnnnnnnnnnnnnnnnnnnnnnnnnnnnnnnnnnnnnnnnnnnnnnnnnnnnnnnnnnnnnnnnnnnnnnnnnnnnnnnnnnnnnnnnnnnnnnnnnnnnnnnnnnnnnnnnnnnnnnnnnnnnnnnnnnnnnnnnnnnnnnnnnnnnnnnnnnnnnnnnnnnnnnnnnnnnnnnnnnnnnnnnnnnnnnnnnnnnnnnnnnnnnnnnnnnnnnnnnnnnnnnnnnnnnnnnnnnnnnnnnnnnnnnnnnnnnnnnnnnnnnnnnnnnnnnnnnnnnnnnnnnnnnnnnnnnnnnnnnnnnnnnnnnnnnnnnnnnnnnnnnnnnnnnnnnnnnnnnnnnnnnnnnnnnnnnnnnnnnnnnnnnnnnnnnnnnnnnnnnnnnnnnnnnnnnnnnnnnnnnnnnnnnnnnnnnnnnnnnnnnnnnnnnnnnnnnnnnnnnnnnnnnnnnnnnnnnnnnnnnnnnnnnnnnnnnnnnnnnnnnnnnnnnnnnnnnnnnnnnnnnnnnnnnnnnnnnnnnnnnnnnnnnnnnnnnnnnnnnnnnnnnnnnnnnnnnnnnnnnnnnnnnnnnnnnnnnnnnnnnnnnnnnnnnnnnnnnnnnnnnnnnnnnnnnnnnnnnnnnnnnnnnnnnnnnnnnnnnnnnnnnnnnnnnnnnnnnnnnnnnnnnnnnnnnnnnnnnnnnnnnnnnnnnnnnnnnnnnnnnnnnnnnnnnnnnnnnnnnnnnnnnnnnnnnnnnnnnnnnnnnnnnnnnnnnnnnnnnnnnnnnnnnnnnnnnnnnnnnnnnnnnnnnnnnnnnnnnnnnnnnnnnnnnnnnnnnnnnnnnnnnnnnnnnnnnnnnnnnnnnnnnnnnnnnnnnnnnnnnnnnnnnnnnnnnnnnnnnnnnnnnnnnnnnnnnnnnnnnnnnnnnnnnnnnnnnnnnnnnnnnnnnnnnnnnnnnnnnnnnnnnnnnnnnnnnnnnnnnnnnnnnnnnnnnnnnnnnnnnnnnnnnnnnnnnnnnnnnnnnnnnnnnnnnnnnnnnnnnnnnnnnnnnnnnnnnnnnnnnnnnnnnnnnnnnnnnnnnnnnnnnnnnnnnnnnnnnnnnnnnnnnnnnnnnnnnnnnnnnnnnnnnnnnnnnnnnnnnnnnnnnnnnnnnnnnnnnnnnnnnnnnnnnnnnnnnnnnnnnnnnnnnnnnnnnnnnnnnnnnnnnnnnnnnnnnnnnnnnnnnnnnnnnnnnnnnnnnnnnnnnnnnnnnnnnnnnnnnnnnnnnnnnnnnnnnnnnnnnnnnnnnnnnnnnnnnnnnnnnnnnnnnnnnnnnnnnnnnnnnnnnnnnnnnnnnnnnnnnnnnnnnnnnnnnnnnnnnnnnnnnnnnnnnnnnnnnnnnnnnnnnnnnnnnnnnnnnnnnnnnnnnnnnnnnnnnnnnnnnnnnnnnnnnnnnnnnnnnnnnnnnnnnnnnnnnnnnnnnnnnnnnnnnnnnnnnnnnnnnnnnnnnnnnnnnnnnnnnnnnnnnnnnnnnnnnnnnnnnnnnnnnnnnnnnnnnnnnnnnnnnnnnnnnnnnnnnnnnnnnnnnnnnnnnnnnnnnnnnnnnnnnnnnnnnnnnnnnnnnnnnnnnnnnnnnnnnnnnnnnnnnnnnnnnnnnnnnnnnnnnggcggcacgctgctgctcggcgggcgtaatttgaaaattgcccttttttgcgcgtcgaccgcaaccgtcgccctttttttcaacctgcaccatgaagtcaccgccgacactgcctacgccgaatacatcgtcggaccggcaccgctgcccggccagaccgacccgcgcgccttctgggtcaacaaatcgacagcctcgctgatcgacgattccgagccgcccaactacacgcgctacatcaagcgcctgcgccagatcctgcttgacgaactggccttccgcgaacgcgagattctcgtcctcggcgccggcggcttcacgctatcgcaccgcgagccgatgaaccgctacacctatgtcgacatcgacccggcgatcaagggcatcgccgagcaacacttcctgcgcgagccgacgcgcggcgaattcatcgccgacgacgcccgccgcttcgtggctaccaccgaacgccacttcgacgccgtcgtcgtcgacgtctacagctcgcatacctcgatccccagccacctggtcacccgtgaattctgggcaggcacccgccgggtgctgaagcccgatggcgttttgctcgccaacctgatcctcgacggcaagctggaaacgccctacgcgcgcaacctgctggcgaccatcgacagtgttttcgggcgttgcgcggtcgacgtgctgcacaaagcagaaacgctgtccaacgtcgtcgtcacctgctttgccagcagccgaccggcggcgaccggcaacatctacgtcgacgaaaaaaaccgcgccgacctcgacatggcacgctcgcgttaggcgaatcaaggccgccgctccattgacaatttgatttgtcacactataaatcgtactattaagcgtgctttaaacaatgcttcaaaaggaaagatcatgtccaacctgacagcgaacgaccttaaaaccaaaggcatcgcagccatcgaatccgtgctggccgaatgcaccgaagcaaccgtttcggtgcgtggcaaggatcgtttcgtggtgatggatattgcgcggtatcactatctgcgcgagtgcgaactcgaagccgcgctggccgaaactcgcgccgacatggcggccgggcgttttgtgcaggaatcgccagaggcgcatctggcacgaatcaaatccgccgcatgagccattgcctgatcttcaccgcgcaatacaacaagcgcgcggcgcgtttcctgaaacggcatcccgaactcgaaaagcagtacctcaaaacactgcaactgctggaactcaatccccatcacccatccctgcgcctgcatcctttgagtggcaaactgcaagccctgcattccgtctcgatcaacctctcctaccgcattacgctggagctgctgatccaggacgagcagatcatcccggtaaacgtgggcgaccacgacgcggtgtattgaggatcgttgcaacgcgtttccggcgagcaataccatttcgccacgctgaccggcaatccgccttttccgtcaatgcccaacgcatagcagagtaaaatcctcacggacaaccagaaaacggagggcgaatggacaagctaaaaataaccgcgcatcttctcgcgccgctcgttaccggcggcggctacatgacgctcgacggcctgctggcggcacttctgttcgaccggcttcatgacgtcgacgctgcccatgcggcaattcctgtccgtcagaccgctggcctgctgcacgccagcgcggcaatcatggagccgattcgcgagcgggtctccttcatcgccgcgcttcggcccacgcacagcatcgaccccgaccacgttcagaagaacaagcacgggcagttgcaccgcaagttcgacacctcgttgaccaatgtcatgaacagctacgccatgctgaccgccccgaccgtcacctggtacgccgaaggcgacgccgaccgcatcggccagttgcttgcaccggtgcaattcatcggcaaacggcgcgccgccgggtttggtcgcgttgcgcaatggcagatcgaaccggacgacctcgacggcatcgaaggcaccttcggcgagccgctgcgcccagtgccggtcgacatgttcaagggcgacaaaacccaccccatcgtcgacgccgcctggcgcccggcctactggaacccgatacacagaacggcgtgttacgcgccaacctgaggaacaacggtgctcgctttcttcaacgacaatttcggccgccatctggtcgaacaaaccgacgatccggtcgccgatgcccggcgcgccctgtcatcggggcaccggatgaaaaagggtggcggcccgcagcgcatcgcatccggctgggccatcattcgccccgcaaaatccaccatgcaatttgaactcgcggcggatggcatcgaatacagcaagcagacacgctacgaagcatttctggccgaactggaaaactgggatggcacgccgcgcatgttcatcgaattcgccaaacgccccgttccggtcggcaatctgttccgcaccttcgatctgcgccaagtgcgcatctgctcgcccagtggcgtcgagacattcgatttcaccaaggcgccggaaaaagacgggtgcaagacacacaaggttctatggaaactcaaaaagggggaaaagtgacggacttcgtactccaaaagccaccgaccgtccgtggctacgccctgcaccgcatggctgccggactggccggtggcgacccggtactgtttgccgattgcggcgaccacttgcggttgcgtaccgacaaaccactggcggtggatcggcagccgctgcgcagcgtcagccccggcgacatcgtcggtttcgagctgcgcgcctgtgtcggcaagaagatcaagggcaaacatcgctactttccgaccgccgactggcgcagccggcaccaatggctggcgcggcagggcgagctgcacggattcaccatcgttaccgtgcattgcaccgccgcgatgctggccatcaaggcgggcgaacgacaattcaccgtcgaccagaccgatttcaccggcgttctcaaagtcaccgacgttgaacgcttcaaccaagccgtcgccaatggcatcggcaacaaggccagggctttcggctttggcatgctgctcatttaacgaggtacgccgccgtgaaaaccatcgtcatcaacgcccgcatcgccaccgttgccccgctctccatcaccctgccggtggccgaaggccagcttggcaacaagttcaacaacttccccatcgtcacccgtggccttgacgacgatggcaacaagttgcagaccggctacctgccggccaccacgctgcgcggatttctccgtcgcgccatcgtcaccgaccagatgatgcaggcagcggcggcaggcaaacactacaccctgcaaaaagcctatgccgacctgatcgggcaggatgcggcatcggaatcgaaagacgacatcgacctgctgaaactgcgccagacccgcgaggaaaatgccgtgcttgacctcttcggttccgggctgggcatcaagtcgcgcctgctggtgtcgcacttcatgccgacccacaacgtcctgcccgaagtcatgaccggcgtccgcaaagacctggaagacaccgacgacgtactggacatgctctcgccggccgaccgcgacctttatctcggccgcgccgaagccaacagccggcgcgccgccgcccagaccgtggtcaaaggcctggaaggcaagattcgccgggcacgaaaggccggcgaggaagttggcgaactggagcaagccctgacggaagcacaggcggtggtcgcccgccacgaatccgagatgggcgacatgaccaattcgtcgcgcaccctgaccaattacttcgccctgcctgccgggatcgaactgagcgggcgcctggtcatcgaaaacgcccgcgagcgcgacctgccgatgctggaactggcgctggacgcgctgtcgaagcggccgatactcggcgcgcaaagcgcccgtggttgcggcgaaatcgaaggcatgttcgatgttgcggtcgacggcgttttaacccggaaaatcaaaatcggcggctggcaagcggcgacggttacggacttttcagcggcggcaatggcaaaaactgctgtctgagcagtgggttgcggatagtgagatcaagctacctcgctgttgggtggttactggaactcagcccagcgaaggccttgcgcatctcgggatcaagctacctcgctgttgggtggttactggaacccgcgcgcagatcgacctgaccccaatgtcgatcaagctacctcgctgttgggtggttactggaacttctcggatcgggcaatgattcgatggacggatcaagctacctcgctgttgggtggttactggaactagttctcgacgatgcgctgcgcattggttgatcaagctacctcgctgttgggtggttactggaactgcaccaccatcctcgacttctacaaggtggatcaagccacctcgctgttgtgtggttactggaactaggcgcgcatataggtattgaccagctccgatcaagccaccccgctgttgggtggttactggaacagtcgaccgcgacaggtgtcgtaacggcgaagtcaagccacccggagggtgggtggttcctggaacttgcaatagccgaagccttccagcacggcggaccaagccaccccgttgttgggtggttactggaacaaaaatgcctcaaaatagccgtcagccgccaatcaagccacctgctgttgggtggttactagaacgagtatcacgagaatttcatcgatagcgaagatcaagccaccccgccgtggctactacaaaaagcaaatgtcatgtttcgctcaaccgagcaatcgacttacgcagccattgtcgccaaacacctggctatcgccgatgcgccgctgttactggaaggcgggacgggcatcggcaagacgcgggcgtatctttcggcgctcttccaatccggacggcgggttgccgttgtcctgccgacgcaccagttgatcgatcaattgctggattccggcgatctggcggcaacgcgcgacgcggctacggtggccgcgttccggcccgcgcggatgttcgagcggcgcgccgactatgaagcaggcaaacgcgccgccgacgccgcacaagtcatgttgtgcacggcggccagtgtcatcatcgaccatcgtctggatggcgaatacaacggctcgacgacccgcgactacctgttgttcgacgaggcggatcagctcccggacatggctgccctgcaaagcgatttcgccatcaccagcgccgaactggccgagttgggcattcgcgtaacgaatgttgccgatgcgctgaatgcgatcctggcgaagaagccacgcagcgtggcaccggaaacccgggcggcggcgcgcgtcattctcgacgccatcgtggaaccggcctggtatcagtccgccggcttgaacgacgatggcgacatcgtactgacgcacaagctgcccggccgcctgttgaagaagatcagcaaccggggcaacgtggcttttgtctcggcgaccctgaccgtcggcggtcgcttcaaggatttcatgaacagcatggccatcgaagcatgcagccacctgtcctgcgccatcgaaccggaacggcacggcgcgctcgatttccacatgatcccgctggcggtcgatacaccggaatggctggcggccatcgtccagacggcgcaggaggcggccaagccggtgctgatcgcaaccccgtcgcacgagctttcgtacctgcttggccaacggctgccggacgccattgtcaggacggccgatgaaaccgccacgcaagccgccatacgtgtgcccgccgggggcatcctgattgcggctggcgcctgggcggggctcgataccgcgctgcgctggcgctcaatcattgtaccaagagtaccgttcggacagccgcaggtgatcgatggcgaggtaacgaccagctatttcgatgcacgcaacacggcgacccgccgcttgcgtcaggtcatcgggcgcggcctgcgcacgcccgatgcggtctgtagcgtttatcttctcgacgcccgagccgagaaactcggtggtttcgttccggcacgcttctcggtcgcatggtcggggcgaacctatccggaaggtgcgcggcaagagttggtgctgtcaaaggcggaacgcgacccggcactacgccgcgcggcgctgaaccactacgggcggaagtgcatggctcccggctgtggtttcgtgccgaaagtcgattcgcagctcgatgttcaccacctcgacccgattgccgaggggcaacgggaaacacgaatcgaggatgtggtggttctgtgtgcgaactgccatcgactggcgcactcgacttactgaaaaccttggaggcctaacgcctttgatcgctggcctgttgcggtcgaccgccaaaaaagggcaaatttgcccgatccggaatcgcgcgacggcgcccagcccattacatccggaaacatttgcgtacacatcggcgtcagtcgcttccatcgttcccgcgttatttccatcatgaaccacgatgagataacgtcatgtccagcttactgaaaatcgccgcctcgctgg

SEQ ID NO: 232 - DNA, 11790 bp, Artificial Sequence
  Synthetic Oligonucleotide
  misc_feature (1)..(5462): n is a, c, g, or t
nnnnnnnnnnnnnnnnnnnnnnnnnnnnnnnnnnnnnnnnnnnnnnnnnnnnnnnnnnnnnnnnnnnnnnnnnnnnnnnnnnnnnnnnnnnnnnnnnnnnnnnnnnnnnnnnnnnnnnnnnnnnnnnnnnnnnnnnnnnnnnnnnnnnnnnnnnnnnnnnnnnnnnnnnnnnnnnnnnnnnnnnnnnnnnnnnnnnnnnnnnnnnnnnnnnnnnnnnnnnnnnnnnnnnnnnnnnnnnnnnnnnnnnnnnnnnnnnnnnnnnnnnnnnnnnnnnnnnnnnnnnnnnnnnnnnnnnnnnnnnnnnnnnnnnnnnnnnnnnnnnnnnnnnnnnnnnnnnnnnnnnnnnnnnnnnnnnnnnnnnnnnnnnnnnnnnnnnnnnnnnnnnnnnnnnnnnnnnnnnnnnnnnnnnnnnnnnnnnnnnnnnnnnnnnnnnnnnnnnnnnnnnnnnnnnnnnnnnnnnnnnnnnnnnnnnnnnnnnnnnnnnnnnnnnnnnnnnnnnnnnnnnnnnnnnnnnnnnnnnnnnnnnnnnnnnnnnnnnnnnnnnnnnnnnnnnnnnnnnnnnnnnnnnnnnnnnnnnnnnnnnnnnnnnnnnnnnnnnnnnnnnnnnnnnnnnnnnnnnnnnnnnnnnnnnnnnnnnnnnnnnnnnnnnnnnnnnnnnnnnnnnnnnnnnnnnnnnnnnnnnnnnnnnnnnnnnnnnnnnnnnnnnnnnnnnnnnnnnnnnnnnnnnnnnnnnnnnnnnnnnnnnnnnnnnnnnnnnnnnnnnnnnnnnnnnnnnnnnnnnnnnnnnnnnnnnnnnnnnnnnnnnnnnnnnnnnnnnnnnnnnnnnnnnnnnnnnnnnnnnnnnnnnnnnnnnnnnnnnnnnnnnnnnnnnnnnnnnnnnnnnnnnnnnnnnnnnnnnnnnnnnnnnnnnnnnnnnnnnnnnnnnnnnnnnnnnnnnnnnnnnnnnnnnnnnnnnnnnnnnnnnnnnnnnnnnnnnnnnnnnnnnnnnnnnnnnnnnnnnnnnnnnnnnnnnnnnnnnnnnnnnnnnnnnnnnnnnnnnnnnnnnnnnnnnnnnnnnnnnnnnnnnnnnnnnnnnnnnnnnnnnnnnnnnnnnnnnnnnnnnnnnnnnnnnnnnnnnnnnnnnnnnnnnnnnnnnnnnnnnnnnnnnnnnnnnnnnnnnnnnnnnnnnnnnnnnnnnnnnnnnnnnnnnnnnnnnnnnnnnnnnnnnnnnnnnnnnnnnnnnnnnnnnnnnnnnnnnnnnnnnnnnnnnnnnnnnnnnnnnnnnnnnnnnnnnnnnnnnnnnnnnnnnnnnnnnnnnnnnnnnnnnnnnnnnnnnnnnnnnnnnnnnnnnnnnnnnnnnnnnnnnnnnnnnnnnnnnnnnnnnnnnnnnnnnnnnnnnnnnnnnnnnnnnnnnnnnnnnnnnnnnnnnnnnnnnnnnnnnnnnnnnnnnnnnnnnnnnnnnnnnnnnnnnnnnnnnnnnnnnnnnnnnnnnnnnnnnnnnnnnnnnnnnnnnnnnnnnnnnnnnnnnnnnnnnnnnnnnnnnnnnnnnnnnnnnnnnnnnnnnnnnnnnnnnnnnnnnnnnnnnnnnnnnnnnnnnnnnnnnnnnnnnnnnnnnnnnnnnnnnnnnnnnnnnnnnnnnnnnnnnnnnnnnnnnnnnnnnnnnnnnnnnnnnnnnnnnnnnnnnnnnnnnnnnnnnnnnnnnnnnnnnnnnnnnnnnnnnnnnnnnnnnnnnnnnnnnnnnnnnnnnnnnnnnnnnnnnnnnnnnnnnnnnnnnnnnnnnnnnnnnnnnnnnnnnnnnnnnnnnnnnnnnnnnnnnnnnnnnnnnnnnnnnnnnnnnnnnnnnnnnnnnnnnnnnnnnnnnnnnnnnnnnnnnnnnnnnnnnnnnnnnnnnnnnnnnnnnnnnnnnnnnnnnnnnnnnnnnnnnnnnnnnnnnnnnnnnnnnnnnnnnnnnnnnnnnnnnnnnnnnnnnnnnnnnnnnnnnnnnnnnnnnnnnnnnnnnnnnnnnnnnnnnnnnnnnnnnnnnnnnnnnnnnnnnnnnnnnnnnnnnnnnnnnnnnnnnnnnnnnnnnnnnnnnnnnnnnnnnnnnnnnnnnnnnnnnnnnnnnnnnnnnnnnnnnnnnnnnnnnnnnnnnnnnnnnnnnnnnnnnnnnnnnnnnnnnnnnnnnnnnnnnnnnnnnnnnnnnnnnnnnnnnnnnnnnnnnnnnnnnnnnnnnnnnnnnnnnnnnnnnnnnnnnnnnnnnnnnnnnnnnnnnnnnnnnnnnnnnnnnnnnnnnnnnnnnnnnnnnnnnnnnnnnnnnnnnnnnnnnnnnnnnnnnnnnnnnnnnnnnnnnnnnnnnnnnnnnnnnnnnnnnnnnnnnnnnnnnnnnnnnnnnnnnnnnnnnnnnnnnnnnnnnnnnnnnnnnnnnnnnnnnnnnnnnnnnnnnnnnnnnnnnnnnnnnnnnnnnnnnnnnnnnnnnnnnnnnnnnnnnnnnnnnnnnnnnnnnnnnnnnnnnnnnnnnnnnnnnnnnnnnnnnnnnnnnnnnnnnnnnnnnnnnnnnnnnnnnnnnnnnnnnnnnnnnnnnnnnnnnnnnnnnnnnnnnnnnnnnnnnnnnnnnnnnnnnnnnnnnnnnnnnnnnnnnnnnnnnnnnnnnnnnnnnnnnnnnnnnnnnnnnnnnnnnnnnnnnnnnnnnnnnnnnnnnnnnnnnnnnnnnnnnnnnnnnnnnnnnnnnnnnnnnnnnnnnnnnnnnnnnnnnnnnnnnnnnnnnnnnnnnnnnnnnnnnnnnnnnnnnnnnnnnnnnnnnnnnnnnnnnnnnnnnnnnnnnnnnnnnnnnnnnnnnnnnnnnnnnnnnnnnnnnnnnnnnnnnnnnnnnnnnnnnnnnnnnnnnnnnnnnnnnnnnnnnnnnnnnnnnnnnnnnnnnnnnnnnnnnnnnnnnnnnnnnnnnnnnnnnnnnnnnnnnnnnnnnnnnnnnnnnnnnnnnnnnnnnnnnnnnnnnnnnnnnnnnnnnnnnnnnnnnnnnnnnnnnnnnnnnnnnnnnnnnnnnnnnnnnnnnnnnnnnnnnnnnnnnnnnnnnnnnnnnnnnnnnnnnnnnnnnnnnnnnnnnnnnnnnnnnnnnnnnnnnnnnnnnnnnnnnnnnnnnnnnnnnnnnnnnnnnnnnnnnnnnnnnnnnnnnnnnnnnnnnnnnnnnnnnnnnnnnnnnnnnnnnnnnnnnnnnnnnnnnnnnnnnnnnnnnnnnnnnnnnnnnnnnnnnnnnnnnnnnnnnnnnnnnnnnnnnnnnnnnnnnnnnnnnnnnnnnnnnnnnnnnnnnnnnnnnnnnnnnnnnnnnnnnnnnnnnnnnnnnnnnnnnnnnnnnnnnnnnnnnnnnnnnnnnnnnnnnnnnnnnnnnnnnnnnnnnnnnnnnnnnnnnnnnnnnnnnnnnnnnnnnnnnnnnnnnnnnnnnnnnnnnnnnnnnnnnnnnnnnnnnnnnnnnnnnnnnnnnnnnnnnnnnnnnnnnnnnnnnnnnnnnnnnnnnnnnnnnnnnnnnnnnnnnnnnnnnnnnnnnnnnnnnnnnnnnnnnnnnnnnnnnnnnnnnnnnnnnnnnnnnnnnnnnnnnnnnnnnnnnnnnnnnnnnnnnnnnnnnnnnnnnnnnnnnnnnnnnnnnnnnnnnnnnnnnnnnnnnnnnnnnnnnnnnnnnnnnnnnnnnnnnnnnnnnnnnnnnnnnnnnnnnnnnnnnnnnnnnnnnnnnnnnnnnnnnnnnnnnnnnnnnnnnnnnnnnnnnnnnnnnnnnnnnnnnnnnnnnnnnnnnnnnnnnnnnnnnnnnnnnnnnnnnnnnnnnnnnnnnnnnnnnnnnnnnnnnnnnnnnnnnnnnnnnnnnnnnnnnnnnnnnnnnnnnnnnnnnnnnnnnnnnnnnnnnnnnnnnnnnnnnnnnnnnnnnnnnnnnnnnnnnnnnnnnnnnnnnnnnnnnnnnnnnnnnnnnnnnnnnnnnnnnnnnnnnnnnnnnnnnnnnnnnnnnnnnnnnnnnnnnnnnnnnnnnnnnnnnnnnnnnnnnnnnnnnnnnnnnnnnnnnnnnnnnnnnnnnnnnnnnnnnnnnnnnnnnnnnnnnnnnnnnnnnnnnnnnnnnnnnnnnnnnnnnnnnnnnnnnnnnnnnnnnnnnnnnnnnnnnnnnnnnnnnnnnnnnnnnnnnnnnnnnnnnnnnnnnnnnnnnnnnnnnnnnnnnnnnnnnnnnnnnnnnnnnnnnnnnnnnnnnnnnnnnnnnnnnnnnnnnnnnnnnnnnnnnnnnnnnnnnnnnnnnnnnnnnnnnnnnnnnnnnnnnnnnnnnnnnnnnnnnnnnnnnnnnnnnnnnnnnnnnnnnnnnnnnnnnnnnnnnnnnnnnnnnnnnnnnnnnnnnnnnnnnnnnnnnnnnnnnnnnnnnnnnnnnnnnnnnnnnnnnnnnnnnnnnnnnnnnnnnnnnnnnnnnnnnnnnnnnnnnnnnnnnnnnnnnnnnnnnnnnnnnnnnnnnnnnnnnnnnnnnnnnnnnnnnnnnnnnnnnnnnnnnnnnnnnnnnnnnnnnnnnnnnnnnnnnnnnnnnnnnnnnnnnnnnnnnnnnnnnnnnnnnnnnnnnnnnnnnnnnnnnnnnnnnnnnnnnnnnnnnnnnnnnnnnnnnnnnnnnnnnnnnnnnnnnnnnnnnnnnnnnnnnnnnnnnnnnnnnnnnnnnnnnnnnnnnnnnnnnnnnnnnnnnnnnnnnnnnnnnnnnnnnnnnnnnnnnnnnnnnnnnnnnnnnnnnnnnnnnnnnnnnnnnnnnnnnnnnnnnnnnnnnnnnnnnnnnnnnnnnnnnnnnnnnnnnnnnnnnnnnnnnnnnnnnnnnnnnnnnnnnnnnnnnnnnnnnnnnnnnnnnnnnnnnnnnnnnnnnnnnnnnnnnnnnnnnnnnnnnnnnnnnnnnnnnnnnnnnnnnnnnnnnnnnnnnnnnnnnnnnnnnnnnnnnnnnnnnnnnnnnnnnnnnnnnnnnnnnnnnnnnnnnnnnnnnnnnnnnnnnnnnnnnnnnnnnnnnnnnnnnnnnnnnnnnnnnnnnnnnnnnnnnnnnnnnnnnnnnnnnnnnnnnnnnnnnnnnnnnnnnnnnnnnnnnnnnnnnnnnnnnnnnnnnnnnnnnnnnnnnnnnnnnnnnnnnnnnnnnnnnnnnnnnnnnnnnnnnnnnnnnnnnnnnnnnnnnnnnnnnnnnnnnnnnnnnnnnnnnnnnnnnnnnnnnnnnnnnnnnnnnnnnnnnnnnnnnnnnnnnnnnnnnnnnnnnnnnnnnnnnnnnnnnnnnnnnnnnnnnnnnnnnnnnnnnnnnnnnnnnnnnnnnnnnnnnnnnnnnnnnnnnnnnnnnnnnnnnnnnnnnnnnnnnnnnnnnnnnnnnnnnnnnnnnnnnnnnnnnnnnnnnnnnnnnnnnnnnnnnnnnnnnnnnnnnnnnnnnnnnnnnnnnnnnnnnnnnnnnnnnnnnnnnnnnnnnnnnnnnnnnnnnnnnnnnnnnnnnnnnnnnnnnnnnnnnnnnnnnnnnnnnnnnnnnnnnnnnnccgatgaaccgctacacctatgtcgacatcgacccggcgatcaagggcatcgccgagcaacacttcctgcgcgagccgacgcgcggcgaattcatcgccgacgacgcccgccgcttcgtggctaccaccgaacgccacttcgacgccgtcgtcgtcgacgtctacagctcgcatacctcgatccccagccacctggtcacccgtgaattctgggcaggcacccgccgggtgctgaagcccgatggcgttttgctcgccaacctgatcctcgacggcaagctggaaacgccctacgcgcgcaacctgctggcgaccatcgacagtgttttcgggcgttgcgcggtcgacgtgctgcacaaagcagaaacgctgtccaacgtcgtcgtcacctgctttgccagcagccgaccggcggcgaccggcaacatctacgtcgacgaaaaaaaccgcgccgacctcgacatggcacgctcgcgttaggcgaatcaaggccgccgctccattgacaatttgatttgtcacactataaatcgtactattaagcgtgctttaaacaatgcttcaaaaggaaagatcatgtccaacctgacagcgaacgaccttaaaaccaaaggcatcgcagccatcgaatccgtgctggccgaatgcaccgaagcaaccgtttcggtgcgtggcaaggatcgtttcgtggtgatggatattgcgcggtatcactatctgcgcgagtgcgaactcgaagccgcgctggccgaaactcgcgccgacatggcggccgggcgttttgtgcaggaatcgccagaggcgcatctggcacgaatcaaatccgccgcatgagccattgcctgatcttcaccgcgcaatacaacaagcgcgcggcgcgtttcctgaaacggcatcccgaactcgaaaagcagtacctcaaaacactgcaactgctggaactcaatccccatcacccatccctgcgcctgcatcctttgagtggcaaactgcaagccctgcattccgtctcgatcaacctctcctaccgcattacgctggagctgctgatccaggacgagcagatcatcccggtaaacgtgggcgaccacgacgcggtgtattgaggatcgttgcaacgcgtttccggcgagcaataccatttcgccacgctgaccggcaatccgccttttccgtcaatgcccaacgcatagcagagtaaaatcctcacggacaaccagaaaacggagggcgaatggacaagctaaaaataaccgcgcatcttctcgcgccgctcgttaccggcggcggctacatgacgctcgacggcctgctggcggcacttctgttcgaccggcttcatgacgtcgacgctgcccatgcggcaattcctgtccgtcagaccgctggcctgctgcacgccagcgcggcaatcatggagccgattcgcgagcgggtctccttcatcgccgcgcttcggcccacgcacagcatcgaccccgaccacgttcagaagaacaagcacgggcagttgcaccgcaagttcgacacctcgttgaccaatgtcatgaacagctacgccatgctgaccgccccgaccgtcacctggtacgccgaaggcgacgccgaccgcatcggccagttgcttgcaccggtgcaattcatcggcaaacggcgcgccgccgggtttggtcgcgttgcgcaatggcagatcgaaccggacgacctcgacggcatcgaaggcaccttcggcgagccgctgcgcccagtgccggtcgacatgttcaagggcgacaaaacccaccccatcgtcgacgccgcctggcgcccggcctactggaacccgatacacagaacggcgtgttacgcgccaacctgaggaacaacggtgctcgctttcttcaacgacaatttcggccgccatctggtcgaacaaaccgacgatccggtcgccgatgcccggcgcgccctgtcatcggggcaccggatgaaaaagggtggcggcccgcagcgcatcgcatccggctgggccatcattcgccccgcaaaatccaccatgcaatttgaactcgcggcggatggcatcgaatacagcaagcagacacgctacgaagcatttctggccgaactggaaaactgggatggcacgccgcgcatgttcatcgaattcgccaaacgccccgttccggtcggcaatctgttccgcaccttcgatctgcgccaagtgcgcatctgctcgcccagtggcgtcgagacattcgatttcaccaaggcgccggaaaaagacgggtgcaagacacacaaggttctatggaaactcaaaaagggggaaaagtgacggacttcgtactccaaaagccaccgaccgtccgtggctacgccctgcaccgcatggctgccggactggccggtggcgacccggtactgtttgccgattgcggcgaccacttgcggttgcgtaccgacaaaccactggcggtggatcggcagccgctgcgcagcgtcagccccggcgacatcgtcggtttcgagctgcgcgcctgtgtcggcaagaagatcaagggcaaacatcgctactttccgaccgccgactggcgcagccggcaccaatggctggcgcggcagggcgagctgcacggattcaccatcgttaccgtgcattgcaccgccgcgatgctggccatcaaggcgggcgaacgacaattcaccgtcgaccagaccgatttcaccggcgttctcaaagtcaccgacgttgaacgcttcaaccaagccgtcgccaatggcatcggcaacaaggccagggctttcggctttggcatgctgctcatttaacgaggtacgccgccgtgaaaaccatcgtcatcaacgcccgcatcgccaccgttgccccgctctccatcaccctgccggtggccgaaggccagcttggcaacaagttcaacaacttccccatcgtcacccgtggccttgacgacgatggcaacaagttgcagaccggctacctgccggccaccacgctgcgcggatttctccgtcgcgccatcgtcaccgaccagatgatgcaggcagcggcggcaggcaaacactacaccctgcaaaaagcctatgccgacctgatcgggcaggatgcggcatcggaatcgaaagacgacatcgacctgctgaaactgcgccagacccgcgaggaaaatgccgtgcttgacctcttcggttccgggctgggcatcaagtcgcgcctgctggtgtcgcacttcatgccgacccacaacgtcctgcccgaagtcatgaccggcgtccgcaaagacctggaagacaccgacgacgtactggacatgctctcgccggccgaccgcgacctttatctcggccgcgccgaagccaacagccggcgcgccgccgcccagaccgtggtcaaaggcctggaaggcaagattcgccgggcacgaaaggccggcgaggaagttggcgaactggagcaagccctgacggaagcacaggcggtggtcgcccgccacgaatccgagatgggcgacatgaccaattcgtcgcgcaccctgaccaattacttcgccctgcctgccgggatcgaactgagcgggcgcctggtcatcgaaaacgcccgcgagcgcgacctgccgatgctggaactggcgctggacgcgctgtcgaagcggccgatactcggcgcgcaaagcgcccgtggttgcggcgaaatcgaaggcatgttcgatgttgcggtcgacggcgttttaacccggaaaatcaaaatcggcggctggcaagcggcgacggttacggacttttcagcggcggcaatggcaaaaactgctgtctgagcagtgggttgcggatagtgagatcaagctacctcgctgttgggtggttactggaactcagcccagcgaaggccttgcgcatctcgggatcaagctacctcgctgttgggtggttactggaacccgcgcgcagatcgacctgaccccaatgtcgatcaagctacctcgctgttgggtggttactggaacttctcggatcgggcaatgattcgatggacggatcaagctacctcgctgttgggtggttactggaactagttctcgacgatgcgctgcgcattggttgatcaagctacctcgctgttgggtggttactggaactgcaccaccatcctcgacttctacaaggtggatcaagccacctcgctgttgtgtggttactggaactaggcgcgcatataggtattgaccagctccgatcaagccaccccgctgttgggtggttactggaacagtcgaccgcgacaggtgtcgtaacggcgaagtcaagccacccggagggtgggtggttcctggaacttgcaatagccgaagccttccagcacggcggaccaagccaccccgttgttgggtggttactggaacaaaaatgcctcaaaatagccgtcagccgccaatcaagccacctgctgttgggtggttactagaacgagtatcacgagaatttcatcgatagcgaagatcaagccaccccgccgtggctactacaaaaagcaaatgtcatgtttcgctcaaccgagcaatcgacttacgcagccattgtcgccaaacacctggctatcgccgatgcgccgctgttactggaaggcgggacgggcatcggcaagacgcgggcgtatctttcggcgctcttccaatccggacggcgggttgccgttgtcctgccgacgcaccagttgatcgatcaattgctggattccggcgatctggcggcaacgcgcgacgcggctacggtggccgcgttccggcccgcgcggatgttcgagcggcgcgccgactatgaagcaggcaaacgcgccgccgacgccgcacaagtcatgttgtgcacggcggccagtgtcatcatcgaccatcgtctggatggcgaatacaacggctcgacgacccgcgactacctgttgttcgacgaggcggatcagctcccggacatggctgccctgcaaagcgatttcgccatcaccagcgccgaactggccgagttgggcattcgcgtaacgaatgttgccgatgcgctgaatgcgatcctggcgaagaagccacgcagcgtggcaccggaaacccgggcggcggcgcgcgtcattctcgacgccatcgtggaaccggcctggtatcagtccgccggcttgaacgacgatggcgacatcgtactgacgcacaagctgcccggccgcctgttgaagaagatcagcaaccggggcaacgtggcttttgtctcggcgaccctgaccgtcggcggtcgcttcaaggatttcatgaacagcatggccatcgaagcatgcagccacctgtcctgcgccatcgaaccggaacggcacggcgcgctcgatttccacatgatcccgctggcggtcgatacaccggaatggctggcggccatcgtccagacggcgcaggaggcggccaagccggtgctgatcgcaaccccgtcgcacgagctttcgtacctgcttggccaacggctgccggacgccattgtcaggacggccgatgaaaccgccacgcaagccgccatacgtgtgcccgccgggggcatcctgattgcggctggcgcctgggcggggctcgataccgcgctgcgctggcgctcaatcattgtaccaagagtaccgttcggacagccgcaggtgatcgatggcgaggtaacgaccagctatttcgatgcacgcaacacggcgacccgccgcttgcgtcaggtcatcgggcgcggcctgcgcacgcccgatgcggtctgtagcgtttatcttctcgacgcccgagccgagaaactcggtggtttcgttccggcacgcttctcggtcgcatggtcggggcgaacctatccggaaggtgcgcggcaagagttggtgctgtcaaaggcggaacgcgacccggcactacgccgcgcggcgctgaaccactacgggcggaagtgcatggctcccggctgtggtttcgtgccgaaagtcgattcgcagctcgatgttcaccacctcgacccgattgccgaggggcaacgggaaacacgaatcgaggatgtggtggttctgtgtgcgaactgccatcgactggcgcactcgacttactgaaaaccttggaggcctaacgcctttgatcgctggcctgttgcggtcgaccgccaaaaaagggcaaatttgcccgatccggaatcgcgcgacggcgcccagcccattacatccggaaacatttgcgtacacatcggcgtcagtcgcttccatcgttcccgcgttatttccatcatgaaccacgatgagataacgtcatgtccagcttactgaaaatcgccgcctcgctgg

SEQ ID NO: 233 - DNA, 11790 bp, Artificial Sequence; identical to SEQ ID NO: 231
  Synthetic Oligonucleotide
  misc_feature (1)..(5126): n is a, c, g, or t

SEQ ID NO: 234 - DNA, 11790 bp, Artificial Sequence; identical to SEQ ID NO: 232
  Synthetic Oligonucleotide
  misc_feature (1)..(5462): n is a, c, g, or t

SEQ ID NO: 235 - DNA, 11779 bp, Artificial Sequence
  Synthetic Oligonucleotide
  misc_feature (1)..(8050): n is a, c, g, or t
nnnnnnnnnnnnnnnnnnnnnnnnnnnnnnnnnnnnnnnnnnnnnnnnnnnnnnnnnnnnnnnnnnnnnnnnnnnnnnnnnnnnnnnnnnnnnnnnnnnnnnnnnnnnnnnnnnnnnnnnnnnnnnnnnnnnnnnnnnnnnnnnnnnnnnnnnnnnnnnnnnnnnnnnnnnnnnnnnnnnnnnnnnnnnnnnnnnnnnnnnnnnnnnnnnnnnnnnnnnnnnnnnnnnnnnnnnnnnnnnnnnnnnnnnnnnnnnnnnnnnnnnnnnnnnnnnnnnnnnnnnnnnnnnnnnnnnnnnnnnnnnnnnnnnnnnnnnnnnnnnnnnnnnnnnnnnnnnnnnnnnnnnnnnnnnnnnnnnnnnnnnnnnnnnnnnnnnnnnnnnnnnnnnnnnnnnnnnnnnnnnnnnnnnnnnnnnnnnnnnnnnnnnnnnnnnnnnnnnnnnnnnnnnnnnnnnnnnnnnnnnnnnnnnnnnnnnnnnnnnnnnnnnnnnnnnnnnnnnnnnnnnnnnnnnnnnnnnnnnnnnnnnnnnnnnnnnnnnnnnnnnnnnnnnnnnnnnnnnnnnnnnnnnnnnnnnnnnnnnnnnnnnnnnnnnnnnnnnnnnnnnnnnnnnnnnnnnnnnnnnnnnnnnnnnnnnnnnnnnnnnnnnnnnnnnnnnnnnnnnnnnnnnnnnnnnnnnnnnnnnnnnnnnnnnnnnnnnnnnnnnnnnnnnnnnnnnnnnnnnnnnnnnnnnnnnnnnnnnnnnnnnnnnnnnnnnnnnnnnnnnnnnnnnnnnnnnnnnnnnnnnnnnnnnnnnnnnnnnnnnnnnnnnnnnnnnnnnnnnnnnnnnnnnnnnnnnnnnnnnnnnnnnnnnnnnnnnnnnnnnnnnnnnnnnnnnnnnnnnnnnnnnnnnnnnnnnnnnnnnnnnnnnnnnnnnnnnnnnnnnnnnnnnnnnnnnnnnnnnnnnnnnnnnnnnnnnnnnnnnnnnnnnnnnnnnnnnnnnnnnnnnnnnnnnnnnnnnnnnnnnnnnnnnnnnnnnnnnnnnnnnnnnnnnnnnnnnnnnnnnnnnnnnnnnnnnnnnnnnnnnnnnnnnnnnnnnnnnnnnnnnnnnnnnnnnnnnnnnnnnnnnnnnnnnnnnnnnnnnnnnnnnnnnnnnnnnnnnnnnnnnnnnnnnnnnnnnnnnnnnnnnnnnnnnnnnnnnnnnnnnnnnnnnnnnnnnnnnnnnnnnnnnnnnnnnnnnnnnnnnnnnnnnnnnnnnnnnnnnnnnnnnnnnnnnnnnnnnnnnnnnnnnnnnnnnnnnnnnnnnnnnnnnnnnnnnnnnnnnnnnnnnnnnnnnnnnnnnnnnnnnnnnnnnnnnnnnnnnnnnnnnnnnnnnnnnnnnnnnnnnnnnnnnnnnnnnnnnnnnnnnnnnnnnnnnnnnnnnnnnnnnnnnnnnnnnnnnnnnnnnnnnnnnnnnnnnnnnnnnnnnnnnnnnnnnnnnnnnnnnnnnnnnnnnnnnnnnnnnnnnnnnnnnnnnnnnnnnnnnnnnnnnnnnnnnnnnnnnnnnnnnnnnnnnnnnnnnnnnnnnnnnnnnnnnnnnnnnnnnnnnnnnnnnnnnnnnnnnnnnnnnnnnnnnnnnnnnnnnnnnnnnnnnnnnnnnnnnnnnnnnnnnnnnnnnnnnnnnnnnnnnnnnnnnnnnnnnnnnnnnnnnnnnnnnnnnnnnnnnnnnnnnnnnnnnnnnnnnnnnnnnnnnnnnnnnnnnnnnnnnnnnnnnnnnnnnnnnnnnnnnnnnnnnnnnnnnnnnnnnnnnnnnnnnnnnnnnnnnnnnnnnnnnnnnnnnnnnnnnnnnnnnnnnnnnnnnnnnnnnnnnnnnnnnnnnnnnnnnnnnnnnnnnnnnnnnnnnnnnnnnnnnnnnnnnnnnnnnnnnnnnnnnnnnnnnnnnnnnnnnnnnnnnnnnnnnnnnnnnnnnnnnnnnnnnnnnnnnnnnnnnnnnnnnnnnnnnnnnnnnnnnnnnnnnnnnnnnnnnnnnnnnnnnnnnnnnnnnnnnnnnnnnnnnnnnnnnnnnnnnnnnnnnnnnnnnnnnnnnnnnnnnnnnnnnnnnnnnnnnnnnnnnnnnnnnnnnnnnnnnnnnnnnnnnnnnnnnnnnnnnnnnnnnnnnnnnnnnnnnnnnnnnnnnnnnnnnnnnnnnnnnnnnnnnnnnnnnnnnnnnnnnnnnnnnnnnnnnnnnnnnnnnnnnnnnnnnnnnnnnnnnnnnnnnnnnnnnnnnnnnnnnnnnnnnnnnnnnnnnnnnnnnnnnnnnnnnnnnnnnnnnnnnnnnnnnnnnnnnnnnnnnnnnnnnnnnnnnnnnnnnnnnnnnnnnnnnnnnnnnnnnnnnnnnnnnnnnnnnnnnnnnnnnnnnnnnnnnnnnnnnnnnnnnnnnnnnnnnnnnnnnnnnnnnnnnnnnnnnnnnnnnnnnnnnnnnnnnnnnnnnnnnnnnnnnnnnnnnnnnnnnnnnnnnnnnnnnnnnnnnnnnnnnnnnnnnnnnnnnnnnnnnnnnnnnnnnnnnnnnnnnnnnnnnnnnnnnnnnnnnnnnnnnnnnnnnnnnnnnnnnnnnnnnnnnnnnnnnnnnnnnnnnnnnnnnnnnnnnnnnnnnnnnnnnnnnnnnnnnnnnnnnnnnnnnnnnnnnnnnnnnnnnnnnnnnnnnnnnnnnnnnnnnnnnnnnnnnnnnnnnnnnnnnnnnnnnnnnnnnnnnnnnnnnnnnnnnnnnnnnnnnnnnnnnnnnnnnnnnnnnnnnnnnnnnnnnnnnnnnnnnnnnnnnnnnnnnnnnnnnnnnnnnnnnnnnnnnnnnnnnnnnnnnnnnnnnnnnnnnnnnnnnnnnnnnnnnnnnnnnnnnnnnnnnnnnnnnnnnnnnnnnnnnnnnnnnnnnnnnnnnnnnnnnnnnnnnnnnnnnnnnnnnnnnnnnnnnnnnnnnnnnnnnnnnnnnnnnnnnnnnnnnnnnnnnnnnnnnnnnnnnnnnnnnnnnnnnnnnnnnnnnnnnnnnnnnnnnnnnnnnnnnnnnnnnnnnnnnnnnnnnnnnnnnnnnnnnnnnnnnnnnnnnnnnnnnnnnnnnnnnnnnnnnnnnnnnnnnnnnnnnnnnnnnnnnnnnnnnnnnnnnnnnnnnnnnnnnnnnnnnnnnnnnnnnnnnnnnnnnnnnnnnnnnnnnnnnnnnnnnnnnnnnnnnnnnnnnnnnnnnnnnnnnnnnnnnnnnnnnnnnnnnnnnnnnnnnnnnnnnnnnnnnnnnnnnnnnnnnnnnnnnnnnnnnnnnnnnnnnnnnnnnnnnnnnnnnnnnnnnnnnnnnnnnnnnnnnnnnnnnnnnnnnnnnnnnnnnnnnnnnnnnnnnnnnnnnnnnnnnnnnnnnnnnnnnnnnnnnnnnnnnnnnnnnnnnnnnnnnnnnnnnnnnnnnnnnnnnnnnnnnnnnnnnnnnnnnnnnnnnnnnnnnnnnnnnnnnnnnnnnnnnnnnnnnnnnnnnnnnnnnnnnnnnnnnnnnnnnnnnnnnnnnnnnnnnnnnnnnnnnnnnnnnnnnnnnnnnnnnnnnnnnnnnnnnnnnnnnnnnnnnnnnnnnnnnnnnnnnnnnnnnnnnnnnnnnnnnnnnnnnnnnnnnnnnnnnnnnnnnnnnnnnnnnnnnnnnnnnnnnnnnnnnnnnnnnnnnnnnnnnnnnnnnnnnnnnnnnnnnnnnnnnnnnnnnnnnnnnnnnnnnnnnnnnnnnnnnnnnnnnnnnnnnnnnnnnnnnnnnnnnnnnnnnnnnnnnnnnnnnnnnnnnnnnnnnnnnnnnnnnnnnnnnnnnnnnnnnnnnnnnnnnnnnnnnnnnnnnnnnnnnnnnnnnnnnnnnnnnnnnnnnnnnnnnnnnnnnnnnnnnnnnnnnnnnnnnnnnnnnnnnnnnnnnnnnnnnnnnnnnnnnnnnnnnnnnnnnnnnnnnnnnnnnnnnnnnnnnnnnnnnnnnnnnnnnnnnnnnnnnnnnnnnnnnnnnnnnnnnnnnnnnnnnnnnnnnnnnnnnnnnnnnnnnnnnnnnnnnnnnnnnnnnnnnnnnnnnnnnnnnnnnnnnnnnnnnnnnnnnnnnnnnnnnnnnnnnnnnnnnnnnnnnnnnnnnnnnnnnnnnnnnnnnnnnnnnnnnnnnnnnnnnnnnnnnnnnnnnnnnnnnnnnnnnnnnnnnnnnnnnnnnnnnnnnnnnnnnnnnnnnnnnnnnnnnnnnnnnnnnnnnnnnnnnnnnnnnnnnnnnnnnnnnnnnnnnnnnnnnnnnnnnnnnnnnnnnnnnnnnnnnnnnnnnnnnnnnnnnnnnnnnnnnnnnnnnnnnnnnnnnnnnnnnnnnnnnnnnnnnnnnnnnnnnnnnnnnnnnnnnnnnnnnnnnnnnnnnnnnnnnnnnnnnnnnnnnnnnnnnnnnnnnnnnnnnnnnnnnnnnnnnnnnnnnnnnnnnnnnnnnnnnnnnnnnnnnnnnnnnnnnnnnnnnnnnnnnnnnnnnnnnnnnnnnnnnnnnnnnnnnnnnnnnnnnnnnnnnnnnnnnnnnnnnnnnnnnnnnnnnnnnnnnnnnnnnnnnnnnnnnnnnnnnnnnnnnnnnnnnnnnnnnnnnnnnnnnnnnnnnnnnnnnnnnnnnnnnnnnnnnnnnnnnnnnnnnnnnnnnnnnnnnnnnnnnnnnnnnnnnnnnnnnnnnnnnnnnnnnnnnnnnnnnnnnnnnnnnnnnnnnnnnnnnnnnnnnnnnnnnnnnnnnnnnnnnnnnnnnnnnnnnnnnnnnnnnnnnnnnnnnnnnnnnnnnnnnnnnnnnnnnnnnnnnnnnnnnnnnnnnnnnnnnnnnnnnnnnnnnnnnnnnnnnnnnnnnnnnnnnnnnnnnnnnnnnnnnnnnnnnnnnnnnnnnnnnnnnnnnnnnnnnnnnnnnnnnnnnnnnnnnnnnnnnnnnnnnnnnnnnnnnnnnnnnnnnnnnnnnnnnnnnnnnnnnnnnnnnnnnnnnnnnnnnnnnnnnnnnnnnnnnnnnnnnnnnnnnnnnnnnnnnnnnnnnnnnnnnnnnnnnnnnnnnnnnnnnnnnnnnnnnnnnnnnnnnnnnnnnnnnnnnnnnnnnnnnnnnnnnnnnnnnnnnnnnnnnnnnnnnnnnnnnnnnnnnnnnnnnnnnnnnnnnnnnnnnnnnnnnnnnnnnnnnnnnnnnnnnnnnnnnnnnnnnnnnnnnnnnnnnnnnnnnnnnnnnnnnnnnnnnnnnnnnnnnnnnnnnnnnnnnnnnnnnnnnnnnnnnnnnnnnnnnnnnnnnnnnnnnnnnnnnnnnnnnnnnnnnnnnnnnnnnnnnnnnnnnnnnnnnnnnnnnnnnnnnnnnnnnnnnnnnnnnnnnnnnnnnnnnnnnnnnnnnnnnnnnnnnnnnnnnnnnnnnnnnnnnnnnnnnnnnnnnnnnnnnnnnnnnnnnnnnnnnnnnnnnnnnnnnnnnnnnnnnnnnnnnnnnnnnnnnnnnnnnnnnnnnnnnnnnnnnnnnnnnnnnnnnnnnnnnnnnnnnnnnnnnnnnnnnnnnnnnnnnnnnnnnnnnnnnnnnnnnnnnnnnnnnnnnnnnnnnnnnnnnnnnnnnnnnnnnnnnnnnnnnnnnnnnnnnnnnnnnnnnnnnnnnnnnnnnnnnnnnnnnnnnnnnnnnnnnnnnnnnnnnnnnnnnnnnnnnnnnnnnnnnnnnnnnnnnnnnnnnnnnnnnnnnnnnnnnnnnnnnnnnnnnnnnnnnnnnnnnnnnnnnnnnnnnnnnnnnnnnnnnnnnnnnnnnnnnnnnnnnnnnnnnnnnnnnnnnnnnnnnnnnnnnnnnnnnnnnnnnnnnnnnnnnnnnnnnnnnnnnnnnnnnnnnnnnnnnnnnnnnnnnnnnnnnnnnnnnnnnnnnnnnnnnnnnnnnnnnnnnnnnnnnnnnnnnnnnnnnnnnnnnnnnnnnnnnnnnnnnnnnnnnnnnnnnnnnnnnnnnnnnnnnnnnnnnnnnnnnnnnnnnnnnnnnnnnnnnnnnnnnnnnnnnnnnnnnnnnnnnnnnnnnnnnnnnnnnnnnnnnnnnnnnnnnnnnnnnnnnnnnnnnnnnnnnnnnnnnnnnnnnnnnnnnnnnnnnnnnnnnnnnnnnnnnnnnnnnnnnnnnnnnnnnnnnnnnnnnnnnnnnnnnnnnnnnnnnnnnnnnnnnnnnnnnnnnnnnnnnnnnnnnnnnnnnnnnnnnnnnnnnnnnnnnnnnnnnnnnnnnnnnnnnnnnnnnnnnnnnnnnnnnnnnnnnnnnnnnnnnnnnnnnnnnnnnnnnnnnnnnnnnnnnnnnnnnnnnnnnnnnnnnnnnnnnnnnnnnnnnnnnnnnnnnnnnnnnnnnnnnnnnnnnnnnnnnnnnnnnnnnnnnnnnnnnnnnnnnnnnnnnnnnnnnnnnnnnnnnnnnnnnnnnnnnnnnnnnnnnnnnnnnnnnnnnnnnnnnnnnnnnnnnnnnnnnnnnnnnnnnnnnnnnnnnnnnnnnnnnnnnnnnnnnnnnnnnnnnnnnnnnnnnnnnnnnnnnnnnnnnnnnnnnnnnnnnnnnnnnnnnnnnnnnnnnnnnnnnnnnnnnnnnnnnnnnnnnnnnnnnnnnnnnnnnnnnnnnnnnnnnnnnnnnnnnnnnnnnnnnnnnnnnnnnnnnnnnnnnnnnnnnnnnnnnnnnnnnnnnnnnnnnnnnnnnnnnnnnnnnnnnnnnnnnnnnnnnnnnnnnnnnnnnnnnnnnnnnnnnnnnnnnnnnnnnnnnnnnnnnnnnnnnnnnnnnnnnnnnnnnnnnnnnnnnnnnnnnnnnnnnnnnnnnnnnnnnnnnnnnnnnnnnnnnnnnnnnnnnnnnnnnnnnnnnnnnnnnnnnnnnnnnnnnnnnnnnnnnnnnnnnnnnnnnnnnnnnnnnnnnnnnnnnnnnnnnnnnnnnnnnnnnnnnnnnnnnnnnnnnnnnnnnnnnnnnnnnnnnnnnnnnnnnnnnnnnnnnnnnnnnnnnnnnnnnnnnnnnnnnnnnnnnnnnnnnnnnnnnnnnnnnnnnnnnnnnnnnnnnnnnnnnnnnnnnnnnnnnnnnnnnnnnnnnnnnnnnnnnnnnnnnnnnnnnnnnnnnnnnnnnnnnnnnnnnnnnnnnnnnnnnnnnnnnnnnnnnnnnnnnnnnnnnnnnnnnnnnnnnnnnnnnnnnnnnnnnnnnnnnnnnnnnnnnnnnnnnnnnnnnnnnnnnnnnnnnnnnnnnnnnnnnnnnnnnnnnnnnnnnnnnnnnnnnnnnnnnnnnnnnnnnnnnnnnnnnnnnnnnnnnnnnnnnnnnnnnnnnnnnnnnnnnnnnnnnnnnnnnnnnnnnnnnnnnnnnnnnnnnnnnnnnnnnnnnnnnnnnnnnnnnnnnnnnnnnnnnnnnnnnnnnnnnnnnnnnnnnnnnnnnnnnnnnnnnnnnnnnnnnnnnnnnnnnnnnnnnnnnnnnnnnnnnnnnnnnnnnnnnnnnnnnnnnnnnnnnnnnnnnnnnnnnnnnnnnnnnnnnnnnnnnnnnnnnnnnnnnnnnnnnnnnnnnnnnnnnnnnnnnnnnnnnnnnnnnnnnnnnnnnnnnnnnnnnnnnnnnnnnnnnnnnnnnnnnnnnnnnnnnnnnnnnnnnnnnnnnnnnnnnnnnnnnnnnnnnnnnnnnnnnnnnnnnnnnnnnnnnnnnnnnnnnnnnnnnnnnnnnnnnnnnnnnnnnnnnnnnnnnnnnnnnnnnnnnnnnnnnnnnnnnnnnnnnnnnnnnnnnnnnnnnnnnnnnnnnnnnnnnnnnnnnnnnnnnnnnnnnnnnnnnnnnnnnnnnnnnnnnnnnnnnnnnnnnnnnnnnnnnnnnnnnnnnnnnnnnnnnnnnnnnnnnnnnnnnnnnnnnnnnnnnnnnnnnnnnnnnnnnnnnnnnnnnnnnnnnnnnnnnnnnnnnnnnnnnnnnnnnnnnnnnnnnnnnnnnnnnnnnnnnnnnnnnnnnnnnnnnnnnnnnnnnnnnnnnnnnnnnnnnnnnnnnnnnnnnnnnnnnnnnnnnnnnnnnnnnnnnnnnnnnnnnnnnnnnnnnnnnnnnnnnnnnnnnnnnnnnnnnnnnnnnnnnnnnnnnnnnnnnnnnnnnnnnnnnnnnnnnnnnnnnnnnnnnnnnnnnnnnnnnnnnnnnnnnnnnnnnnnnnnnnnnnnnnggggtaggtggcactgcgcgcgcatttggattcgggcttttagttatctaattctgaggaaaataatgaaaaccatcgtcatcaaagccacaatccacactgagtcaccattgtcgatcgccatgccagttgccgaaggtggattagctaaccgatataaaaactttccgcttatgacaaacggagtcgatgccgatggcaataagctgcaaactgcctacctaccatcgacgacaatccgcggattcttacggcgggctattgtggttaacgctatgcaaacagcagccgataccggcaaacactacacgttgcagcaggcgtacgccgatttaattggtcaagactctgccagcgaagagaagcaggaagtcgatctcctgaaactaaaggctgatcgtgacgctaacgccatcattgacctttttggctgtggcatgagtatgaaatctcgtttgctggtcagtcacttcgttccggctcacaacattctgcccgaagcatttaccggcgtacgcaaggatttagatgatacggatggtgtattggatttggttagcgcagcagaccagaagactttcctaggacgaaccgcagccaatagtgaacgtgctcaagcagcttctgtcgtaaaggatttggatcgaaagattaaagccgccgccaaaaaaggggaagagactgccgatcttgcccaagcattgctgcaagcacagaagttagttgaaaagttcgaagcagaaatgggggatatgcaaaacagtacgcgcactctggttggctacttcgccttgccagcgggtattgacttgcttggtcggctggtcatcgagggggccagagatcgtgatttgccgatgattgatctagcgctcaaagcattgagcatgcggcctatcctaggtgcgcaagtggcacgggggtgcggtgagatcagtggcacgtttgatgtgatgagcgatgggaccttgctcaaaaaatatactgttggtggctgggaaccggcaaaaatcagtgaattttcaacttcctaaacccataaaccatatagttatcaataggttgcgaaacatcagatcaagccacccgtacgttgggtggttactagaactagcggtagcctcggtcggtaatgacttgggatcaagccacccgtacgttgggtggttactagaactacgatactgttttggtgcgattccagcaaggatcaagccacccgtacgttgggtggttactagaactagagtctattggcatcgcgtgtgccggtggatcaagccacccgtacgttgggtggttactagaacacagcgcagcaccctccgtcaaaaggtgctgatcaagccacccgtacgttgggtggttactagaactacacagttactgttggtgcaggcggcgcagatcaagccacccgaacgttgggtggttactagaactacatggagaccatccgtggcttgggtattgatcaagccacccgaacgttgggtggttactagaactcgccatgaaacatcctatcgaatgcttctgatcaagccacccgaacgttgggtggttactagaacaaggaattcaatcaggctgataagggcaaggatcaagccacccgaacgttgggtggttactagaactattcaaacgcatcggtaaattgctccggtgatcaagccacccgaacgttgggtggttactagaacatgtatctaaaggcatccgcgccgtgtgaggatcaagccacccgtacgttgggtggttactagaacagtatttggatcacgtcctgatttgggttagatcaagccacccgaacgttgggtggttactagaaccagatgatgaccaccacgctcgcagcaactgatcaagccatctgtatgttgggtggttactatcgacaaatagtggtccatcagggtctgtgacgtttactggaaggcattatgtttcgctcaagcgaacagaagaatttcgcagcgattattgaaaagcacatagacctgcaagatggtccgctgctaatggaaggcactacgggtctgggcaagacacgtgcttatctctatgcgttggccaacacttcaaagcgcgtagcgatcgttttacctacacatcaactgattgatcaactgctggcctcagccgatttacaagccaccggcctttctgacattgccacattccgtcccgcacggatgttcgatacccgagataaatatcaattacagaaagacgaggcgcagtcagcgcgggtaatgctctgtaccgctgcaagcgtcatcatcgatcagcgattgtctggtgaatacaacggcgcaacagcccgcgactacatgttatttgatgaagctgatcaactacctgatatggccgcgctacagtcagacttcaagatcacgcaaaatgacttgtctgaaatcggcatcaaacttactaccgctagtgaaacactcaatgccatcttagcgaaaccgcccagaaccgttgaacctgaggtacgcgctgccgcccgtatcatcttggaagcaattgaagcccccgcttggtatcacaaggccggtattaccgacgatggcgggatcgtacttagccacacgatgccgggccggttactaaaaaagataagcaaccgaccgaatgttgcattcatctcagccacgctatctgttgacgggaaatttgacgatttcaaaaataccatgggcattgaccgtatatcggctttgtcatcaatcattgaacccgaaaaccatgggcacttgacgttcgagatcacagcgctagatgtagagtcgcctgagtggtttccagcagtggttgataaaatcaagagcgcccctcgccccacccttgtcatcacaccaagccacgctcttgccgaccaactagccagtgaaattgctggggctatcaagcgtgaaggatcaggcgaagagcgggaagacactagtcaagcagcgcgccgagtaacaaacgacggtgtactcattgcggctagcgcatgggctgggcttgatacgtctgtgcagtggaaatctgtaattatccccagagttccttttggtcagccgcttgtagttgaaggcgagatatcaacccactacctcactgcccgcaacaccgcgatccgaagactgcgccaagggattggacgtggcttacgcacacctgacgcacgatgcactatcgtcattttggaccgacgggtagcaaagctctcagggtttgttcctcaacggttcagcaaagcgtggcccgcgaatatcagcggttcagttgaaggagagccgaccgaagtcgtcatttccaaagccgagcgcgaccctgcgctacgcaaatcagccttaaaaaaatatggtgcgaattgcatggggaaatcgtgcaatagcgaaatcaaacactcatcacagttggatgtgcatcatcttgacccgattgcggaaggcgttcgcaggacaacgttggatgaccttgtcgtgctgtgtgcaaactgtcatcgattagcgcaccacttgctgcgaaatggagcttgcttagagctcgaccgtaataagaaagccggtgcgagatgaatagcttagccaagctccgtagctagaaaagctttttctcagatgcactggcgcatcagttggcacgagtacagaacactacttaatcggctagcgttaccagtttcacaaaaatcgcccaccgttcgtccaaaactcagtgtaagcgtgg

SEQ ID NO: 236 - DNA, 11768 bp, Artificial Sequence
  Synthetic Oligonucleotide
  misc_feature (1)..(6937): n is a, c, g, or t
nnnnnnnnnnnnnnnnnnnnnnnnnnnnnnnnnnnnnnnnnnnnnnnnnnnnnnnnnnnnnnnnnnnnnnnnnnnnnnnnnnnnnnnnnnnnnnnnnnnnnnnnnnnnnnnnnnnnnnnnnnnnnnnnnnnnnnnnnnnnnnnnnnnnnnnnnnnnnnnnnnnnnnnnnnnnnnnnnnnnnnnnnnnnnnnnnnnnnnnnnnnnnnnnnnnnnnnnnnnnnnnnnnnnnnnnnnnnnnnnnnnnnnnnnnnnnnnnnnnnnnnnnnnnnnnnnnnnnnnnnnnnnnnnnnnnnnnnnnnnnnnnnnnnnnnnnnnnnnnnnnnnnnnnnnnnnnnnnnnnnnnnnnnnnnnnnnnnnnnnnnnnnnnnnnnnnnnnnnnnnnnnnnnnnnnnnnnnnnnnnnnnnnnnnnnnnnnnnnnnnnnnnnnnnnnnnnnnnnnnnnnnnnnnnnnnnnnnnnnnnnnnnnnnnnnnnnnnnnnnnnnnnnnnnnnnnnnnnnnnnnnnnnnnnnnnnnnnnnnnnnnnnnnnnnnnnnnnnnnnnnnnnnnnnnnnnnnnnnnnnnnnnnnnnnnnnnnnnnnnnnnnnnnnnnnnnnnnnnnnnnnnnnnnnnnnnnnnnnnnnnnnnnnnnnnnnnnnnnnnnnnnnnnnnnnnnnnnnnnnnnnnnnnnnnnnnnnnnnnnnnnnnnnnnnnnnnnnnnnnnnnnnnnnnnnnnnnnnnnnnnnnnnnnnnnnnnnnnnnnnnnnnnnnnnnnnnnnnnnnnnnnnnnnnnnnnnnnnnnnnnnnnnnnnnnnnnnnnnnnnnnnnnnnnnnnnnnnnnnnnnnnnnnnnnnnnnnnnnnnnnnnnnnnnnnnnnnnnnnnnnnnnnnnnnnnnnnnnnnnnnnnnnnnnnnnnnnnnnnnnnnnnnnnnnnnnnnnnnnnnnnnnnnnnnnnnnnnnnnnnnnnnnnnnnnnnnnnnnnnnnnnnnnnnnnnnnnnnnnnnnnnnnnnnnnnnnnnnnnnnnnnnnnnnnnnnnnnnnnnnnnnnnnnnnnnnnnnnnnnnnnnnnnnnnnnnnnnnnnnnnnnnnnnnnnnnnnnnnnnnnnnnnnnnnnnnnnnnnnnnnnnnnnnnnnnnnnnnnnnnnnnnnnnnnnnnnnnnnnnnnnnnnnnnnnnnnnnnnnnnnnnnnnnnnnnnnnnnnnnnnnnnnnnnnnnnnnnnnnnnnnnnnnnnnnnnnnnnnnnnnnnnnnnnnnnnnnnnnnnnnnnnnnnnnnnnnnnnnnnnnnnnnnnnnnnnnnnnnnnnnnnnnnnnnnnnnnnnnnnnnnnnnnnnnnnnnnnnnnnnnnnnnnnnnnnnnnnnnnnnnnnnnnnnnnnnnnnnnnnnnnnnnnnnnnnnnnnnnnnnnnnnnnnnnnnnnnnnnnnnnnnnnnnnnnnnnnnnnnnnnnnnnnnnnnnnnnnnnnnnnnnnnnnnnnnnnnnnnnnnnnnnnnnnnnnnnnnnnnnnnnnnnnnnnnnnnnnnnnnnnnnnnnnnnnnnnnnnnnnnnnnnnnnnnnnnnnnnnnnnnnnnnnnnnnnnnnnnnnnnnnnnnnnnnnnnnnnnnnnnnnnnnnnnnnnnnnnnnnnnnnnnnnnnnnnnnnnnnnnnnnnnnnnnnnnnnnnnnnnnnnnnnnnnnnnnnnnnnnnnnnnnnnnnnnnnnnnnnnnnnnnnnnnnnnnnnnnnnnnnnnnnnnnnnnnnnnnnnnnnnnnnnnnnnnnnnnnnnnnnnnnnnnnnnnnnnnnnnnnnnnnnnnnnnnnnnnnnnnnnnnnnnnnnnnnnnnnnnnnnnnnnnnnnnnnnnnnnnnnnnnnnnnnnnnnnnnnnnnnnnnnnnnnnnnnnnnnnnnnnnnnnnnnnnnnnnnnnnnnnnnnnnnnnnnnnnnnnnnnnnnnnnnnnnnnnnnnnnnnnnnnnnnnnnnnnnnnnnnnnnnnnnnnnnnnnnnnnnnnnnnnnnnnnnnnnnnnnnnnnnnnnnnnnnnnnnnnnnnnnnnnnnnnnnnnnnnnnnnnnnnnnnnnnnnnnnnnnnnnnnnnnnnnnnnnnnnnnnnnnnnnnnnnnnnnnnnnnnnnnnnnnnnnnnnnnnnnnnnnnnnnnnnnnnnnnnnnnnnnnnnnnnnnnnnnnnnnnnnnnnnnnnnnnnnnnnnnnnnnnnnnnnnnnnnnnnnnnnnnnnnnnnnnnnnnnnnnnnnnnnnnnnnnnnnnnnnnnnnnnnnnnnnnnnnnnnnnnnnnnnnnnnnnnnnnnnnnnnnnnnnnnnnnnnnnnnnnnnnnnnnnnnnnnnnnnnnnnnnnnnnnnnnnnnnnnnnnnnnnnnnnnnnnnnnnnnnnnnnnnnnnnnnnnnnnnnnnnnnnnnnnnnnnnnnnnnnnnnnnnnnnnnnnnnnnnnnnnnnnnnnnnnnnnnnnnnnnnnnnnnnnnnnnnnnnnnnnnnnnnnnnnnnnnnnnnnnnnnnnnnnnnnnnnnnnnnnnnnnnnnnnnnnnnnnnnnnnnnnnnnnnnnnnnnnnnnnnnnnnnnnnnnnnnnnnnnnnnnnnnnnnnnnnnnnnnnnnnnnnnnnnnnnnnnnnnnnnnnnnnnnnnnnnnnnnnnnnnnnnnnnnnnnnnnnnnnnnnnnnnnnnnnnnnnnnnnnnnnnnnnnnnnnnnnnnnnnnnnnnnnnnnnnnnnnnnnnnnnnnnnnnnnnnnnnnnnnnnnnnnnnnnnnnnnnnnnnnnnnnnnnnnnnnnnnnnnnnnnnnnnnnnnnnnnnnnnnnnnnnnnnnnnnnnnnnnnnnnnnnnnnnnnnnnnnnnnnnnnnnnnnnnnnnnnnnnnnnnnnnnnnnnnnnnnnnnnnnnnnnnnnnnnnnnnnnnnnnnnnnnnnnnnnnnnnnnnnnnnnnnnnnnnnnnnnnnnnnnnnnnnnnnnnnnnnnnnnnnnnnnnnnnnnnnnnnnnnnnnnnnnnnnnnnnnnnnnnnnnnnnnnnnnnnnnnnnnnnnnnnnnnnnnnnnnnnnnnnnnnnnnnnnnnnnnnnnnnnnnnnnnnnnnnnnnnnnnnnnnnnnnnnnnnnnnnnnnnnnnnnnnnnnnnnnnnnnnnnnnnnnnnnnnnnnnnnnnnnnnnnnnnnnnnnnnnnnnnnnnnnnnnnnnnnnnnnnnnnnnnnnnnnnnnnnnnnnnnnnnnnnnnnnnnnnnnnnnnnnnnnnnnnnnnnnnnnnnnnnnnnnnnnnnnnnnnnnnnnnnnnnnnnnnnnnnnnnnnnnnnnnnnnnnnnnnnnnnnnnnnnnnnnnnnnnnnnnnnnnnnnnnnnnnnnnnnnnnnnnnnnnnnnnnnnnnnnnnnnnnnnnnnnnnnnnnnnnnnnnnnnnnnnnnnnnnnnnnnnnnnnnnnnnnnnnnnnnnnnnnnnnnnnnnnnnnnnnnnnnnnnnnnnnnnnnnnnnnnnnnnnnnnnnnnnnnnnnnnnnnnnnnnnnnnnnnnnnnnnnnnnnnnnnnnnnnnnnnnnnnnnnnnnnnnnnnnnnnnnnnnnnnnnnnnnnnnnnnnnnnnnnnnnnnnnnnnnnnnnnnnnnnnnnnnnnnnnnnnnnnnnnnnnnnnnnnnnnnnnnnnnnnnnnnnnnnnnnnnnnnnnnnnnnnnnnnnnnnnnnnnnnnnnnnnnnnnnnnnnnnnnnnnnnnnnnnnnnnnnnnnnnnnnnnnnnnnnnnnnnnnnnnnnnnnnnnnnnnnnnnnnnnnnnnnnnnnnnnnnnnnnnnnnnnnnnnnnnnnnnnnnnnnnnnnnnnnnnnnnnnnnnnnnnnnnnnnnnnnnnnnnnnnnnnnnnnnnnnnnnnnnnnnnnnnnnnnnnnnnnnnnnnnnnnnnnnnnnnnnnnnnnnnnnnnnnnnnnnnnnnnnnnnnnnnnnnnnnnnnnnnnnnnnnnnnnnnnnnnnnnnnnnnnnnnnnnnnnnnnnnnnnnnnnnnnnnnnnnnnnnnnnnnnnnnnnnnnnnnnnnnnnnnnnnnnnnnnnnnnnnnnnnnnnnnnnnnnnnnnnnnnnnnnnnnnnnnnnnnnnnnnnnnnnnnnnnnnnnnnnnnnnnnnnnnnnnnnnnnnnnnnnnnnnnnnnnnnnnnnnnnnnnnnnnnnnnnnnnnnnnnnnnnnnnnnnnnnnnnnnnnnnnnnnnnnnnnnnnnnnnnnnnnnnnnnnnnnnnnnnnnnnnnnnnnnnnnnnnnnnnnnnnnnnnnnnnnnnnnnnnnnnnnnnnnnnnnnnnnnnnnnnnnnnnnnnnnnnnnnnnnnnnnnnnnnnnnnnnnnnnnnnnnnnnnnnnnnnnnnnnnnnnnnnnnnnnnnnnnnnnnnnnnnnnnnnnnnnnnnnnnnnnnnnnnnnnnnnnnnnnnnnnnnnnnnnnnnnnnnnnnnnnnnnnnnnnnnnnnnnnnnnnnnnnnnnnnnnnnnnnnnnnnnnnnnnnnnnnnnnnnnnnnnnnnnnnnnnnnnnnnnnnnnnnnnnnnnnnnnnnnnnnnnnnnnnnnnnnnnnnnnnnnnnnnnnnnnnnnnnnnnnnnnnnnnnnnnnnnnnnnnnnnnnnnnnnnnnnnnnnnnnnnnnnnnnnnnnnnnnnnnnnnnnnnnnnnnnnnnnnnnnnnnnnnnnnnnnnnnnnnnnnnnnnnnnnnnnnnnnnnnnnnnnnnnnnnnnnnnnnnnnnnnnnnnnnnnnnnnnnnnnnnnnnnnnnnnnnnnnnnnnnnnnnnnnnnnnnnnnnnnnnnnnnnnnnnnnnnnnnnnnnnnnnnnnnnnnnnnnnnnnnnnnnnnnnnnnnnnnnnnnnnnnnnnnnnnnnnnnnnnnnnnnnnnnnnnnnnnnnnnnnnnnnnnnnnnnnnnnnnnnnnnnnnnnnnnnnnnnnnnnnnnnnnnnnnnnnnnnnnnnnnnnnnnnnnnnnnnnnnnnnnnnnnnnnnnnnnnnnnnnnnnnnnnnnnnnnnnnnnnnnnnnnnnnnnnnnnnnnnnnnnnnnnnnnnnnnnnnnnnnnnnnnnnnnnnnnnnnnnnnnnnnnnnnnnnnnnnnnnnnnnnnnnnnnnnnnnnnnnnnnnnnnnnnnnnnnnnnnnnnnnnnnnnnnnnnnnnnnnnnnnnnnnnnnnnnnnnnnnnnnnnnnnnnnnnnnnnnnnnnnnnnnnnnnnnnnnnnnnnnnnnnnnnnnnnnnnnnnnnnnnnnnnnnnnnnnnnnnnnnnnnnnnnnnnnnnnnnnnnnnnnnnnnnnnnnnnnnnnnnnnnnnnnnnnnnnnnnnnnnnnnnnnnnnnnnnnnnnnnnnnnnnnnnnnnnnnnnnnnnnnnnnnnnnnnnnnnnnnnnnnnnnnnnnnnnnnnnnnnnnnnnnnnnnnnnnnnnnnnnnnnnnnnnnnnnnnnnnnnnnnnnnnnnnnnnnnnnnnnnnnnnnnnnnnnnnnnnnnnnnnnnnnnnnnnnnnnnnnnnnnnnnnnnnnnnnnnnnnnnnnnnnnnnnnnnnnnnnnnnnnnnnnnnnnnnnnnnnnnnnnnnnnnnnnnnnnnnnnnnnnnnnnnnnnnnnnnnnnnnnnnnnnnnnnnnnnnnnnnnnnnnnnnnnnnnnnnnnnnnnnnnnnnnnnnnnnnnnnnnnnnnnnnnnnnnnnnnnnnnnnnnnnnnnnnnnnnnnnnnnnnnnnnnnnnnnnnnnnnnnnnnnnnnnnnnnnnnnnnnnnnnnnnnnnnnnnnnnnnnnnnnnnnnnnnnnnnnnnnnnnnnnnnnnnnnnnnnnnnnnnnnnnnnnnnnnnnnnnnnnnnnnnnnnnnnnnnnnnnnnnnnnnnnnnnnnnnnnnnnnnnnnnnnnnnnnnnnnnnnnnnnnnnnnnnnnnnnnnnnnnnnnnnnnnnnnnnnnnnnnnnnnnnnnnnnnnnnnnnnnnnnnnnnnnnnnnnnnnnnnnnnnnnnnnnnnnnnnnnnnnnnnnnnnnnnnnnnnnnnnnnnnnnnnnnnnnnnnnnnnnnnnnnnnnnnnnnnnnnnnnnnnnnnnnnnnnnnnnnnnnnnnnnnnnnnnnnnnnnnnnnnnnnnnnnnnnnnnnnnnnnnnnnnnnnnnnnnnnnnnnnnnnnnnnnnnnnnnnnnnnnnnnnnnnnnnnnnnnnnnnnnnnnnnnnnnnnnnnnnnnnnnnnnnnnnnnnnnnnnnnnnnnnnnnnnnnnnnnnnnnnnnnnnnnnnnnnnnnnnnnnnnnnnnnnnnnnnnnnnnnnnnnnnnnnnnnnnnnnnnnnnnnnnnnnnnnnnnnnnnnnnnnnnnnnnnnnnnnnnnnnnnnnnnnnnnnnnnnnnnnnnnnnnnnnnnnnnnnnnnnnnnnnnnnnnnnnnnnnnnnnnnnnnnnnnnnnnnnnnnnnnnnnnnnnnnnnnnnnnnnnnnnnnnnnnnnnnnnnnnnnnnnnnnnnnnnnnnnnnnnnnnnnnnnnnnnnnnnnnnnnnnnnnnnnnnnnnnnnnnnnnnnnnnnnnnnnnnnnnnnnnnnnnnnnnnnnnnnnnnnnnnnnnnnnnnnnnnnnnnnnnnnnnnnnnnnnnnnnnnnnnnnnnnnnnnnnnnnnnnnnnnnnnnnnnnnnnnnnnnnnnnnnnnnnnnnnnnnnnnnnnnnnnnnnnnnnnnnnnnnnnnnnnnnnnnnnnnnnnnnnnnnnnnnnnnnnnnnnnnnnnnnnnnnnnnnnnnnnnnnnnnnnnnnnnnnnnnnnnnnnnnnnnnnnnnnnnnnnnnnnnnnnnnnnnnnnnnnnnnnnnnnnnnnnnnnnnnnnnnnnnnnnnnnnnnnnnnnnnnnnnnnnnnnnnnnnnnnnnnnnnnnnnnnnnnnnnnnnnnnnnnnnnnnnnnnnnnnnnnnnnnnnnnnnnnnnnnnnnnnnnnnnnnnnnnnnnnnnnnnnnnnnnnnnnnnnnnnnnnnnnnnnnnnnnnnnnnnnnnnnnnnnnnnnnnnnnnnnnnnnnnnnnnnnnnnnnnnnnnnnnnnnnnnnnnnnnnnnnnnnnnnnnnnnnnnnngggcaattggggttgatcggcgataagttaccggaaatccgcctgttgcggtcaacacgccaaaacagccgattttcggtgcctataccgctcgcatcacagcgtaaaatcccttaacccgcttcgctatctcacccaagaaaaggaaagtggatggacaggatcaaggtcaccgcacatctgctggcgccggttgtaaccggcggcggctacatgaccctcgacggcctgctggcggcgctgctgttcgacgaactgcaagaggtggaagcggcgcatgccgctgtcccggtccgccagacggacggcctgtttcacgccagtgccgcgatcatggaagccagccgcgagcatgtgtctttcatcgccgcgttgcgacccggccacagcatcgaccccgacctgatcctcaagaacaagcacgggcaggtgcatcgcaagttcgacacgtcgctgaccaacgtaatgaacagctacgccctgctcaccgcgccaacagtcacgtggtatgccgagggcgacgcggatcgcatcagccgcctgctcgttcccgtgtcgttcatcggcaagcgccgcgcctccggtttcggtcgcgtttcccgctgggagatcgagccggatgacctcgacggcatcgaaggcccgtttggcgagccgctgcgcccggtcccggtcgcgatgttcaagggcgacacgtcgcacccggttgtcgatgccgcttggcgcccggcgtactggaacccgttgcaccgcaccgcctgctacgcaccggtctaggaagaagcaatgctcaagttcttcaacgacaatttcggtcgccatctggtcgagcaatccgacgaccccgttgccaatgcccggcgcgccctgtcatcgggtcaccggatgaaaaagggcggcggaccccagcgcatcgcttcgggctgggcggtcatccggcccgggacatccacgatgcagttcgagctggcagcggatggcatcgagtacagcaagcagacgcgctacgaggcatttctcgccgaactggaaagctgggacggcacgccgcgcatgttcatcgagtttgccaagcgccccgtgccggttggcaacctgtttcgcactttcgatttgcggcaggttcgcatctgttcatcgggcggggtcgagactttcgatttcaccaaggcgccagagaaagacggatgcaaaacgcacaagattctgtggaagctcaaaaaaggggacaagtaatggacttcgtactgcccaagccaccgtcgatccgtggctatgacctgcaccggatggcggccggattgaccggcggcgacaaggtgctgttcgccgactgcggcgaccacctgctactgcgcaccgaaaagccgctggcagtggatcagcgcccgctgcgcgccatcgccgccggcgacatcatcgggttcgagttgcgcgcctgcgtcggcaagaaggtcaagggaaaacatcgctacttcccgaccgccgactggcgcagccgccatcaatggctggagcggcagggcgaactgcatggctttgccatcatcaccgtccattgcaccgccgagatgcacgccgtcacggcaggcgaccgccaattcacggtcgatcaaaccgactttaccggtgtcctgaagatcacggacgccgaacgattcaggaacgctgtcgccaccggcgtcgggaacaaggccaaggcattcggctttggcatgctgctcatctaacgcgagatacctaccgtgaaaaccatcgtcatcaacgccagcatcagcaccgtcggcccgctctccatcaccatgccggttgccgaaggcttacaggccaaccgcttcaacaatttccccatcgtcgcccgcggcctcgacgacgatggccacaagcagcagaccggctacctgccggcaacaacgctacgcggcttcctgcgccgggccatcgtcacccaccagatgaccgaggccgccgccgcaggcaagcactacaccctgcagcgcgcctatgccgatctcatcggtcaggatgcggcgtccgaatcgaaggacgacatcgacctgctcaagctgcgccagacgcgcgaggaaaacgccgtgctcgatcttttcgggtccgggctgggcatcaagtcgcgcctgctggtatcgcacttcatgccgacccacaacatattgccggaagtcatcaccggggtccgcaaggacttggaagataccgacggcgtgctggacatgctttcggaaaccgaccgcgacctctatctcggacgctccgaggccaacagccggcgcgcagccgccctgacggtggccaagggacttgaggccaagattcgccgggcaaagaaggccggcgaagacattgccgatctggaagctgcactgaaggaagcgcaggcggtggtcgaacgctatgaatcatcgatgggcgagatgaccaactcgtcgcgcacactgaccagttattttgcgctgccggctggcattgagctgaagggccggctggtcatcgagaacgcccgcgagcgcgacctgccgatgatcgaactggcgctcaacgaactctcgcagcgcccgattctgggtgcgcagagcgcacggggttgtggcgaaatcgaaggacggttcgacgtgttgattgacggcgttctggccaaaaagattgccattgggggttggcaggcggcgactgtgaccgatttttccggggagggttcagctcaagctgccgcctagccttgtgatgcgtgcagttgggtcaagccaccccttgtttgggtggttgctagaacaacgtctggtagaacgtcgctccgagagcgggtcaagccaccccttgtttgggtggttgctggaacaccgactgcccgaccgcagtgaccggcgtcgttcaagccaccccttttttgggtggttactagaactccgatatctctaagctgctttccgtgcggcggtcaagccaccccttgtttgggtggttgctagaactacagcaaggctgacaccggccaagtcaagaatcaagccacctcgcagtggctattgaaaatggaaaacaggatgtttcgttcaactgaacaatcgacttacgccgctatcgtcgccaaacacctgacgaccgccgacgcccctctgatgcttgagggcggcaccggcatcggcaagacccgcgcctatctatcggcgctggtcgcgtccgggcgccgggtggcgatcgtcctgccgacgcatcagttgatcgaccagttgctcggttcaggcgacttggcggcaacgcgcggcgccagcaccgtggctgcgttccggccggcacgaatgttcgagcggcgcgccgagtatgaagccaacaagcgcacggcgagcgaagcccaagtgatgttctgcaccgccgccagcgtcatcatcgaccatcgcttgagcggcgaatacaacggcgccaccacccgcgattacctgctcttcgacgaggccgaccagctccccgacatggccgcgctacagagcgatttcaccatcaccgccgcccaactggcggaaatgggcattgccgtggcgaacgtcagcgacgcgctgaatgcgatcctggcgaagaaagcgcgtgtcgtcgagccggaaatcagggcggccgccaaggtcattctcgaagcgatcgaggaacccgcgtggtatcagtcggccggcctcagcgacgacggcgacatcatgctgacgcacaagctgccgggccgcctgttgaaaaagatcagcaaccggggcaacgtggcgttcgtttcggcgaccctgacggtgggcggccgtttcaaggattttcagaacagcatgggcatcgacaagatcagccacctgtccgatgcgattgaaccagagcaacacggcaggcttgaattccacatgattccgatggaggtggatacgccggaatggattgccgccgtcgtgcaggctgcgatggatgcgccgcgaccgacgttggtggcgacgacatcccatgacttgtcgaatctgctcggcgagcagttgccgggcgccatcgtcaggtcggttgatgaaatggcgtcgcaagccgccgaacgggttggcgccgacggcattctgatttcagccggggcgtgggccgggctcgacacaccgctgcgctggcgctcgatcgtcgttccccgcgttccgtttggtcagccggtggtgatcgacggtgaagcaacgaccagctatttcgacgcgcgcaacacagcggtccgccgcctgcggcaggtcatcggacgcgggctgaggacgccggatgctgaatgcagcgtatatctcttggatgcaagggcagagaatctgagcgggttcgttccggcgcgctttgttgtggcatgggccggcagaagctatctcgaaggcgcgcggagtgaggttacgctgtcaaaggccgaacgtgacccggcggtgcgccgggcggcgctgaaacattatggccggaagtgcatggcctgtggcttcgtgccacaggtcgattcgcaactggatgtccatcaccgcgacccgatcgccgaagggcagcggcgcacccggatcgaggacgtgatggtgttgtgcgcgaactgccatcggctggcgcatgcgaattgaatactcctgaagttgacaggttcgcttccggctcaggggacgtagaattgcagttgaataaattcgtcgcttccggagacccaaaatgactcacccgctcgccggccaacccgcaccgtccgatgtcctgaccgacattcccgccctgcttgccgcctatttcaaccagcccgatgtcagccagcccgcccagcgcgtcgccttcggcaccagcg

SEQ ID NO: 237 - DNA, 11747 bp, Artificial Sequence
  Synthetic Oligonucleotide
  misc_feature (1)..(8130): n is a, c, g, or t
nnnnnnnnnnnnnnnnnnnnnnnnnnnnnnnnnnnnnnnnnnnnnnnnnnnnnnnnnnnnnnnnnnnnnnnnnnnnnnnnnnnnnnnnnnnnnnnnnnnnnnnnnnnnnnnnnnnnnnnnnnnnnnnnnnnnnnnnnnnnnnnnnnnnnnnnnnnnnnnnnnnnnnnnnnnnnnnnnnnnnnnnnnnnnnnnnnnnnnnnnnnnnnnnnnnnnnnnnnnnnnnnnnnnnnnnnnnnnnnnnnnnnnnnnnnnnnnnnnnnnnnnnnnnnnnnnnnnnnnnnnnnnnnnnnnnnnnnnnnnnnnnnnnnnnnnnnnnnnnnnnnnnnnnnnnnnnnnnnnnnnnnnnnnnnnnnnnnnnnnnnnnnnnnnnnnnnnnnnnnnnnnnnnnnnnnnnnnnnnnnnnnnnnnnnnnnnnnnnnnnnnnnnnnnnnnnnnnnnnnnnnnnnnnnnnnnnnnnnnnnnnnnnnnnnnnnnnnnnnnnnnnnnnnnnnnnnnnnnnnnnnnnnnnnnnnnnnnnnnnnnnnnnnnnnnnnnnnnnnnnnnnnnnnnnnnnnnnnnnnnnnnnnnnnnnnnnnnnnnnnnnnnnnnnnnnnnnnnnnnnnnnnnnnnnnnnnnnnnnnnnnnnnnnnnnnnnnnnnnnnnnnnnnnnnnnnnnnnnnnnnnnnnnnnnnnnnnnnnnnnnnnnnnnnnnnnnnnnnnnnnnnnnnnnnnnnnnnnnnnnnnnnnnnnnnnnnnnnnnnnnnnnnnnnnnnnnnnnnnnnnnnnnnnnnnnnnnnnnnnnnnnnnnnnnnnnnnnnnnnnnnnnnnnnnnnnnnnnnnnnnnnnnnnnnnnnnnnnnnnnnnnnnnnnnnnnnnnnnnnnnnnnnnnnnnnnnnnnnnnnnnnnnnnnnnnnnnnnnnnnnnnnnnnnnnnnnnnnnnnnnnnnnnnnnnnnnnnnnnnnnnnnnnnnnnnnnnnnnnnnnnnnnnnnnnnnnnnnnnnnnnnnnnnnnnnnnnnnnnnnnnnnnnnnnnnnnnnnnnnnnnnnnnnnnnnnnnnnnnnnnnnnnnnnnnnnnnnnnnnnnnnnnnnnnnnnnnnnnnnnnnnnnnnnnnnnnnnnnnnnnnnnnnnnnnnnnnnnnnnnnnnnnnnnnnnnnnnnnnnnnnnnnnnnnnnnnnnnnnnnnnnnnnnnnnnnnnnnnnnnnnnnnnnnnnnnnnnnnnnnnnnnnnnnnnnnnnnnnnnnnnnnnnnnnnnnnnnnnnnnnnnnnnnnnnnnnnnnnnnnnnnnnnnnnnnnnnnnnnnnnnnnnnnnnnnnnnnnnnnnnnnnnnnnnnnnnnnnnnnnnnnnnnnnnnnnnnnnnnnnnnnnnnnnnnnnnnnnnnnnnnnnnnnnnnnnnnnnnnnnnnnnnnnnnnnnnnnnnnnnnnnnnnnnnnnnnnnnnnnnnnnnnnnnnnnnnnnnnnnnnnnnnnnnnnnnnnnnnnnnnnnnnnnnnnnnnnnnnnnnnnnnnnnnnnnnnnnnnnnnnnnnnnnnnnnnnnnnnnnnnnnnnnnnnnnnnnnnnnnnnnnnnnnnnnnnnnnnnnnnnnnnnnnnnnnnnnnnnnnnnnnnnnnnnnnnnnnnnnnnnnnnnnnnnnnnnnnnnnnnnnnnnnnnnnnnnnnnnnnnnnnnnnnnnnnnnnnnnnnnnnnnnnnnnnnnnnnnnnnnnnnnnnnnnnnnnnnnnnnnnnnnnnnnnnnnnnnnnnnnnnnnnnnnnnnnnnnnnnnnnnnnnnnnnnnnnnnnnnnnnnnnnnnnnnnnnnnnnnnnnnnnnnnnnnnnnnnnnnnnnnnnnnnnnnnnnnnnnnnnnnnnnnnnnnnnnnnnnnnnnnnnnnnnnnnnnnnnnnnnnnnnnnnnnnnnnnnnnnnnnnnnnnnnnnnnnnnnnnnnnnnnnnnnnnnnnnnnnnnnnnnnnnnnnnnnnnnnnnnnnnnnnnnnnnnnnnnnnnnnnnnnnnnnnnnnnnnnnnnnnnnnnnnnnnnnnnnnnnnnnnnnnnnnnnnnnnnnnnnnnnnnnnnnnnnnnnnnnnnnnnnnnnnnnnnnnnnnnnnnnnnnnnnnnnnnnnnnnnnnnnnnnnnnnnnnnnnnnnnnnnnnnnnnnnnnnnnnnnnnnnnnnnnnnnnnnnnnnnnnnnnnnnnnnnnnnnnnnnnnnnnnnnnnnnnnnnnnnnnnnnnnnnnnnnnnnnnnnnnnnnnnnnnnnnnnnnnnnnnnnnnnnnnnnnnnnnnnnnnnnnnnnnnnnnnnnnnnnnnnnnnnnnnnnnnnnnnnnnnnnnnnnnnnnnnnnnnnnnnnnnnnnnnnnnnnnnnnnnnnnnnnnnnnnnnnnnnnnnnnnnnnnnnnnnnnnnnnnnnnnnnnnnnnnnnnnnnnnnnnnnnnnnnnnnnnnnnnnnnnnnnnnnnnnnnnnnnnnnnnnnnnnnnnnnnnnnnnnnnnnnnnnnnnnnnnnnnnnnnnnnnnnnnnnnnnnnnnnnnnnnnnnnnnnnnnnnnnnnnnnnnnnnnnnnnnnnnnnnnnnnnnnnnnnnnnnnnnnnnnnnnnnnnnnnnnnnnnnnnnnnnnnnnnnnnnnnnnnnnnnnnnnnnnnnnnnnnnnnnnnnnnnnnnnnnnnnnnnnnnnnnnnnnnnnnnnnnnnnnnnnnnnnnnnnnnnnnnnnnnnnnnnnnnnnnnnnnnnnnnnnnnnnnnnnnnnnnnnnnnnnnnnnnnnnnnnnnnnnnnnnnnnnnnnnnnnnnnnnnnnnnnnnnnnnnnnnnnnnnnnnnnnnnnnnnnnnnnnnnnnnnnnnnnnnnnnnnnnnnnnnnnnnnnnnnnnnnnnnnnnnnnnnnnnnnnnnnnnnnnnnnnnnnnnnnnnnnnnnnnnnnnnnnnnnnnnnnnnnnnnnnnnnnnnnnnnnnnnnnnnnnnnnnnnnnnnnnnnnnnnnnnnnnnnnnnnnnnnnnnnnnnnnnnnnnnnnnnnnnnnnnnnnnnnnnnnnnnnnnnnnnnnnnnnnnnnnnnnnnnnnnnnnnnnnnnnnnnnnnnnnnnnnnnnnnnnnnnnnnnnnnnnnnnnnnnnnnnnnnnnnnnnnnnnnnnnnnnnnnnnnnnnnnnnnnnnnnnnnnnnnnnnnnnnnnnnnnnnnnnnnnnnnnnnnnnnnnnnnnnnnnnnnnnnnnnnnnnnnnnnnnnnnnnnnnnnnnnnnnnnnnnnnnnnnnnnnnnnnnnnnnnnnnnnnnnnnnnnnnnnnnnnnnnnnnnnnnnnnnnnnnnnnnnnnnnnnnnnnnnnnnnnnnnnnnnnnnnnnnnnnnnnnnnnnnnnnnnnnnnnnnnnnnnnnnnnnnnnnnnnnnnnnnnnnnnnnnnnnnnnnnnnnnnnnnnnnnnnnnnnnnnnnnnnnnnnnnnnnnnnnnnnnnnnnnnnnnnnnnnnnnnnnnnnnnnnnnnnnnnnnnnnnnnnnnnnnnnnnnnnnnnnnnnnnnnnnnnnnnnnnnnnnnnnnnnnnnnnnnnnnnnnnnnnnnnnnnnnnnnnnnnnnnnnnnnnnnnnnnnnnnnnnnnnnnnnnnnnnnnnnnnnnnnnnnnnnnnnnnnnnnnnnnnnnnnnnnnnnnnnnnnnnnnnnnnnnnnnnnnnnnnnnnnnnnnnnnnnnnnnnnnnnnnnnnnnnnnnnnnnnnnnnnnnnnnnnnnnnnnnnnnnnnnnnnnnnnnnnnnnnnnnnnnnnnnnnnnnnnnnnnnnnnnnnnnnnnnnnnnnnnnnnnnnnnnnnnnnnnnnnnnnnnnnnnnnnnnnnnnnnnnnnnnnnnnnnnnnnnnnnnnnnnnnnnnnnnnnnnnnnnnnnnnnnnnnnnnnnnnnnnnnnnnnnnnnnnnnnnnnnnnnnnnnnnnnnnnnnnnnnnnnnnnnnnnnnnnnnnnnnnnnnnnnnnnnnnnnnnnnnnnnnnnnnnnnnnnnnnnnnnnnnnnnnnnnnnnnnnnnnnnnnnnnnnnnnnnnnnnnnnnnnnnnnnnnnnnnnnnnnnnnnnnnnnnnnnnnnnnnnnnnnnnnnnnnnnnnnnnnnnnnnnnnnnnnnnnnnnnnnnnnnnnnnnnnnnnnnnnnnnnnnnnnnnnnnnnnnnnnnnnnnnnnnnnnnnnnnnnnnnnnnnnnnnnnnnnnnnnnnnnnnnnnnnnnnnnnnnnnnnnnnnnnnnnnnnnnnnnnnnnnnnnnnnnnnnnnnnnnnnnnnnnnnnnnnnnnnnnnnnnnnnnnnnnnnnnnnnnnnnnnnnnnnnnnnnnnnnnnnnnnnnnnnnnnnnnnnnnnnnnnnnnnnnnnnnnnnnnnnnnnnnnnnnnnnnnnnnnnnnnnnnnnnnnnnnnnnnnnnnnnnnnnnnnnnnnnnnnnnnnnnnnnnnnnnnnnnnnnnnnnnnnnnnnnnnnnnnnnnnnnnnnnnnnnnnnnnnnnnnnnnnnnnnnnnnnnnnnnnnnnnnnnnnnnnnnnnnnnnnnnnnnnnnnnnnnnnnnnnnnnnnnnnnnnnnnnnnnnnnnnnnnnnnnnnnnnnnnnnnnnnnnnnnnnnnnnnnnnnnnnnnnnnnnnnnnnnnnnnnnnnnnnnnnnnnnnnnnnnnnnnnnnnnnnnnnnnnnnnnnnnnnnnnnnnnnnnnnnnnnnnnnnnnnnnnnnnnnnnnnnnnnnnnnnnnnnnnnnnnnnnnnnnnnnnnnnnnnnnnnnnnnnnnnnnnnnnnnnnnnnnnnnnnnnnnnnnnnnnnnnnnnnnnnnnnnnnnnnnnnnnnnnnnnnnnnnnnnnnnnnnnnnnnnnnnnnnnnnnnnnnnnnnnnnnnnnnnnnnnnnnnnnnnnnnnnnnnnnnnnnnnnnnnnnnnnnnnnnnnnnnnnnnnnnnnnnnnnnnnnnnnnnnnnnnnnnnnnnnnnnnnnnnnnnnnnnnnnnnnnnnnnnnnnnnnnnnnnnnnnnnnnnnnnnnnnnnnnnnnnnnnnnnnnnnnnnnnnnnnnnnnnnnnnnnnnnnnnnnnnnnnnnnnnnnnnnnnnnnnnnnnnnnnnnnnnnnnnnnnnnnnnnnnnnnnnnnnnnnnnnnnnnnnnnnnnnnnnnnnnnnnnnnnnnnnnnnnnnnnnnnnnnnnnnnnnnnnnnnnnnnnnnnnnnnnnnnnnnnnnnnnnnnnnnnnnnnnnnnnnnnnnnnnnnnnnnnnnnnnnnnnnnnnnnnnnnnnnnnnnnnnnnnnnnnnnnnnnnnnnnnnnnnnnnnnnnnnnnnnnnnnnnnnnnnnnnnnnnnnnnnnnnnnnnnnnnnnnnnnnnnnnnnnnnnnnnnnnnnnnnnnnnnnnnnnnnnnnnnnnnnnnnnnnnnnnnnnnnnnnnnnnnnnnnnnnnnnnnnnnnnnnnnnnnnnnnnnnnnnnnnnnnnnnnnnnnnnnnnnnnnnnnnnnnnnnnnnnnnnnnnnnnnnnnnnnnnnnnnnnnnnnnnnnnnnnnnnnnnnnnnnnnnnnnnnnnnnnnnnnnnnnnnnnnnnnnnnnnnnnnnnnnnnnnnnnnnnnnnnnnnnnnnnnnnnnnnnnnnnnnnnnnnnnnnnnnnnnnnnnnnnnnnnnnnnnnnnnnnnnnnnnnnnnnnnnnnnnnnnnnnnnnnnnnnnnnnnnnnnnnnnnnnnnnnnnnnnnnnnnnnnnnnnnnnnnnnnnnnnnnnnnnnnnnnnnnnnnnnnnnnnnnnnnnnnnnnnnnnnnnnnnnnnnnnnnnnnnnnnnnnnnnnnnnnnnnnnnnnnnnnnnnnnnnnnnnnnnnnnnnnnnnnnnnnnnnnnnnnnnnnnnnnnnnnnnnnnnnnnnnnnnnnnnnnnnnnnnnnnnnnnnnnnnnnnnnnnnnnnnnnnnnnnnnnnnnnnnnnnnnnnnnnnnnnnnnnnnnnnnnnnnnnnnnnnnnnnnnnnnnnnnnnnnnnnnnnnnnnnnnnnnnnnnnnnnnnnnnnnnnnnnnnnnnnnnnnnnnnnnnnnnnnnnnnnnnnnnnnnnnnnnnnnnnnnnnnnnnnnnnnnnnnnnnnnnnnnnnnnnnnnnnnnnnnnnnnnnnnnnnnnnnnnnnnnnnnnnnnnnnnnnnnnnnnnnnnnnnnnnnnnnnnnnnnnnnnnnnnnnnnnnnnnnnnnnnnnnnnnnnnnnnnnnnnnnnnnnnnnnnnnnnnnnnnnnnnnnnnnnnnnnnnnnnnnnnnnnnnnnnnnnnnnnnnnnnnnnnnnnnnnnnnnnnnnnnnnnnnnnnnnnnnnnnnnnnnnnnnnnnnnnnnnnnnnnnnnnnnnnnnnnnnnnnnnnnnnnnnnnnnnnnnnnnnnnnnnnnnnnnnnnnnnnnnnnnnnnnnnnnnnnnnnnnnnnnnnnnnnnnnnnnnnnnnnnnnnnnnnnnnnnnnnnnnnnnnnnnnnnnnnnnnnnnnnnnnnnnnnnnnnnnnnnnnnnnnnnnnnnnnnnnnnnnnnnnnnnnnnnnnnnnnnnnnnnnnnnnnnnnnnnnnnnnnnnnnnnnnnnnnnnnnnnnnnnnnnnnnnnnnnnnnnnnnnnnnnnnnnnnnnnnnnnnnnnnnnnnnnnnnnnnnnnnnnnnnnnnnnnnnnnnnnnnnnnnnnnnnnnnnnnnnnnnnnnnnnnnnnnnnnnnnnnnnnnnnnnnnnnnnnnnnnnnnnnnnnnnnnnnnnnnnnnnnnnnnnnnnnnnnnnnnnnnnnnnnnnnnnnnnnnnnnnnnnnnnnnnnnnnnnnnnnnnnnnnnnnnnnnnnnnnnnnnnnnnnnnnnnnnnnnnnnnnnnnnnnnnnnnnnnnnnnnnnnnnnnnnnnnnnnnnnnnnnnnnnnnnnnnnnnnnnnnnnnnnnnnnnnnnnnnnnnnnnnnnnnnnnnnnnnnnnnnnnnnnnnnnnnnnnnnnnnnnnnnnnnnnnnnnnnnnnnnnnnnnnnnnnnnnnnnnnnnnnnnnnnnnnnnnnnnnnnnnnnnnnnnnnnnnnnnnnnnnnnnnnnnnnnnnnnnnnnnnnnnnnnnnnnnnnnnnnnnnnnnnnnnnnnnnnnnnnnnnnnnnnnnnnnnnnnnnnnnnnnnnnnnnnnnnnnnnnnnnnnnnnnnnnnnnnnnnnnnnnnnnnnnnnnnnnnnnnnnnnnnnnnnnnnnnnnnnnnnnnnnnnnnnnnnnnnnnnnnnnnnnnnnnnnnnnnnnnnnnnnnnnnnnnnnnnnnnnnnnnnnnnnnnnnnnnnnnnnnnnnnnnnnnnnnnnnnnnnnnnnnnnnnnnnnnnnnnnnnnnnnnnnnnnnnnnnnnnnnnnnnnnnnnnnnnnnnnnnnnnnnnnnnnnnnnnnnnnnnnnnnnnnnnnnnnnnnnnnnnnnnnnnnnnnnnnnnnnnnnnnnnnnnnnnnnnnnnnnnnnnnnnnnnnnnnnnnnnnnnnnnnnnnnnnnnnnnnnnnnnnnnnnnnnnnnnnnnnnnnnnnnnnnnnnnnnnnnnnnnnnnnnnnnnnnnnnnnnnnnnnnnnnnnnnnnnnnnnnnnnnnnnnnnnnnnnnnnnnnnnnnnnnnnnnnnnnnnnnnnnnnnnnnnnnnnnnnnnnnnnnnnnnnnnnnnnnnnnnnnnnnnnnnnnnnnnnnnnnnnnnnnnnnnnnnnnnnnnnnnnnnnnnnnnnnnnnnnnnnnnnnnnnnnnnnnnnnnnnnnnnnnnnnnnnnnnnnnnnnnnnnnnnnnnnnnnnnnnnnnnnnnnnnnnnnnnnnnnnnnnnnnnnnnnnnnnnnnnnnnnnnnnnnnnnnnnnnnnnnnnnnnnnnnnnnnnnnnnnnnnnnnnnnnnnnnnnnnnnnnnnnnnnnnnnnnnnnnnnnnnnnnnnnnnnnnnnnnnnnnnnnnnnnnnnnnnnnnnnnnnnnnnnnnnnnnnnnnnnnnnnnnnnnnnnnnnnnnnnnnnnnnnnnnnnnnnnnnnnnnnnnnnnnnnnnnnnnnnnnnnnnnnnnnnnnnnnnnnnnnnnnnnnnnnnnnnnnnnnnnnnnnnnnnnnnnnnnnnnnnnnnnnnnnnnnnnnnnnnnnnnnnnnnnnnnnnnnnnnnnnnnnnnnnnnnnnnnnnnnnnnnnnnnnnnnnnnnnnnnnnnnnnnnnnnnnnnnnnnnnnnnnnnnnnnnnnnnnnnnnnnnnnnnnnnnnnnnnnnnnnnnnnnnnnnnnnnnnnnnnnnnnnnnnnnnnnnnnnnnnnnnnnnnnnnnnnnnnacacatcggttatcggttattgccgaaagcgatgcacaccggcgatgccgtcaccgatgccaacgcgctattcagcatcagtttgcccctacacaccggaaaaacactccggctttccagttgctggtgggtgatcacacccgatgcaacgtacaccagctttaaggccatgcccgagaccggcgccattcaggggcagttgcggcaggccgtcatcttgtcatccctaaaaacgggattgcccctcttgatcctcgcgattggcaagagccccatttacgcacgcgacctctttgtgacctacgacccacgcgcaacgcgctattgcagcgatggcagtttgcgcaccgttgattcaactctggagaagtggtggacaccttaatcagcaagcccatccagctgcgcggttatgcgctgcaccgcttggttgcgcaacatcaaaacggtgcgcctgcgctttggcgtgacgagggtgacaccgtgcgaattcgcgcgcgtgacgcctgtccgcccacctacgccacggggcaactgttgggctttgtcacattggcgtgtgtgtcgtttggtagcaaacaccggtacctgcccgtcgccgattggcgtggtcgcaaagcgtggctggaggcacagggcatcaaacacggtttcgaggtggttggggtgcacgcccagggtggcatgcaaaccgtgaccacccatgacggtcgccacttcaccattgatgccacgcaattcacgggcttgctgcgcgtcacccaacctgcgccattcaacgactgtctgctcaacggcatcggcaaagtcggtaaagcctttggcctcaacttactcgtcgttcattaacccaacgcttaaaaacgcttatccggagttcaccaccatgcaagacgttcgcatctatatcgccatcaacacgattcaacccatcaccttcacccatcacggcatcgacgggttgcccaccatggttcgcggcgttgacatggagggtcatcccctgcgcaccgtttacattccagccgcgcagtttcgcggtcggctaaggcatgaggcggcgttggcaaaaatgcgtaccgcacacggccccgttaagttggcggaagcctacatgctggccttggggcaaaacatcgacaccaaagaagacgaggctgatgagaaagtgcgattgggcgagctactcgctttacgggcggccaaccccttcattgatctcttcggaacgtggcgcatggacagccggctttacgtgtcgcacctgatgcctgtcgtcaacgtcaagcccgacacctttcaccacatccgccgcgatctagacaccaacgacgcgttgtttgccgagttacccgaagccgaaatcgacgtcttttacgaaaggcaagacggacagtcgcaagcctctcaagcggagggtctgataaaggtggccacccgcgaactgcgcaaagccaaaaaagaaaacgacctcgccaaatgcgacgagttcgaagccaagatcgaagaactcaaagccctcaagaaggcgcacaaagccggtgacgaatcgggcaataccaaacacttggtggcgatggaggccgtccctgcgggaactcaattgttgtgcaaactcatcataaagcgggccacgccgctcgacctcagcatgctcacgggtgcgcttaacgcgatcagcgaattccccatgatgggtgcccagcgggcccgtggctgcggcgaggtgagtggcaccgcaaccgtctgccacacccggggtgaggtgttggcgcaaatcgccttcggtggttttttgccagctgtactggagtggaccgatgcgggcaccgccttcatgactggctccgaaacggttgcagtcgccgcgtgaaaggcccttaccgcagcctacagcaggcgcaatacgccaagctcatcgagcgcgctgtcagcaaacccggtgcgcccctgttggcgggtgccgcgcccgggctcggcaagacacacggctacgccatcccgttgttgtgcagcggcaaaaaagttgccatcgccatgagcacgcgccaactgatcgatcaattcatggcgagcgatgcactcgccgctgcgcaagctgcacttgaggccgaggggcggcccgctgccaccgttgtcgccttgcaaccgcgccgtcaatttgaaacggcggtggcctaccgcgcgcacaaaactgcggcgctggatgccgacgtcttggtgctcacacacatgggcgtgctcatcgatacccacatcccagcctacgcccagttgcgtcaacgcgctgtcttgttgtttgacgaagccgatcttttggccgatgccgccgacttgctcagcacctatcgcattgaggctgaggccttagcccgcgcaggcgtcgaaaacgccacaccgacaaaggcggttgaaaccatcattaaaaaatccgatgaccccgaggaaaaagcagtcgccacagccatccagcgcgctttggaaaagccggcttggtacaaagtgatcggtaaagatgacaacggcgatttggtgctgacccaccgcatgccggggcgcatgttgcgccccttcatcaatgacatgccgcggtgcattttcaccagtggcaccctcacggtatcggggcgttttgaccactttgtcaaagccatcggcctgaacgcagtggcacccgaaagccagcacattgaccccgtgcaacacggccaactgcgcgtggaggtggccagtgaggccctcaccccagaagcacaagccgaaagcatcatgcacgcggcgacaccggtattggtgctgaccaccagccacgcgaccacggcggcgttgggcgccttgtgccccggtgccacctgccgcgcacccggtgaagccctcatggatgcggtggcgcgatgccctgatgatggcatcttgatcgccgctggcgcttggtctggcctcgatgcgccgcgcctgcggtggcaaaccgtggtcatccccaaaacaccttacggcaaaccactcatccttgacgcccagcaaataagcgcttacgtggacagcaaggttgttgccatcaggcgcaccaaccaagggttacaccgtgggctgcgcaccatcgatgccacttgcaccttgctgttactcgatccggacagccgtcgtgccgatttacgccaagccattccccgtcgtttcttggtggattgggacagcgtggccgagggctcgctggttttgcgcacgcacttcgaccgtgagcgcgacagaagcttgcgtgaaaaaaccctgcgccggcgcgggcagcactgcgaacaccccggctgcacgattacccaagaaaattggctggaggtacaccacctgaacccgattgccaacggcccccgcggcacaggtgccgatgacctgcgggtactttgtaaacatcaccacgtggatgcccaccaagccatgcgagaagcagattttttaaaagtgaaaccaactgaaaagcgcgcagaaacagtcacttagaccacagctggtcaagctatgccgtaaatgcgtagttactggaacggctatacatactcaatcgacgtggtgcgtggtcaagctacgccgtaaaggcgtagctacttttagcagccagt

SEQ ID NO: 238 - DNA, 11747 bp, Artificial Sequence; identical to SEQ ID NO: 237
  Synthetic Oligonucleotide
  misc_feature (1)..(8130): n is a, c, g, or t

SEQ ID NO: 239 - DNA, 11747 bp, Artificial Sequence
  Synthetic Oligonucleotide
  misc_feature (1)..(5806): n is a, c, g, or t
nnnnnnnnnnnnnnnnnnnnnnnnnnnnnnnnnnnnnnnnnnnnnnnnnnnnnnnnnnnnnnnnnnnnnnnnnnnnnnnnnnnnnnnnnnnnnnnnnnnnnnnnnnnnnnnnnnnnnnnnnnnnnnnnnnnnnnnnnnnnnnnnnnnnnnnnnnnnnnnnnnnnnnnnnnnnnnnnnnnnnnnnnnnnnnnnnnnnnnnnnnnnnnnnnnnnnnnnnnnnnnnnnnnnnnnnnnnnnnnnnnnnnnnnnnnnnnnnnnnnnnnnnnnnnnnnnnnnnnnnnnnnnnnnnnnnnnnnnnnnnnnnnnnnnnnnnnnnnnnnnnnnnnnnnnnnnnnnnnnnnnnnnnnnnnnnnnnnnnnnnnnnnnnnnnnnnnnnnnnnnnnnnnnnnnnnnnnnnnnnnnnnnnnnnnnnnnnnnnnnnnnnnnnnnnnnnnnnnnnnnnnnnnnnnnnnnnnnnnnnnnnnnnnnnnnnnnnnnnnnnnnnnnnnnnnnnnnnnnnnnnnnnnnnnnnnnnnnnnnnnnnnnnnnnnnnnnnnnnnnnnnnnnnnnnnnnnnnnnnnnnnnnnnnnnnnnnnnnnnnnnnnnnnnnnnnnnnnnnnnnnnnnnnnnnnnnnnnnnnnnnnnnnnnnnnnnnnnnnnnnnnnnnnnnnnnnnnnnnnnnnnnnnnnnnnnnnnnnnnnnnnnnnnnnnnnnnnnnnnnnnnnnnnnnnnnnnnnnnnnnnnnnnnnnnnnnnnnnnnnnnnnnnnnnnnnnnnnnnnnnnnnnnnnnnnnnnnnnnnnnnnnnnnnnnnnnnnnnnnnnnnnnnnnnnnnnnnnnnnnnnnnnnnnnnnnnnnnnnnnnnnnnnnnnnnnnnnnnnnnnnnnnnnnnnnnnnnnnnnnnnnnnnnnnnnnnnnnnnnnnnnnnnnnnnnnnnnnnnnnnnnnnnnnnnnnnnnnnnnnnnnnnnnnnnnnnnnnnnnnnnnnnnnnnnnnnnnnnnnnnnnnnnnnnnnnnnnnnnnnnnnnnnnnnnnnnnnnnnnnnnnnnnnnnnnnnnnnnnnnnnnnnnnnnnnnnnnnnnnnnnnnnnnnnnnnnnnnnnnnnnnnnnnnnnnnnnnnnnnnnnnnnnnnnnnnnnnnnnnnnnnnnnnnnnnnnnnnnnnnnnnnnnnnnnnnnnnnnnnnnnnnnnnnnnnnnnnnnnnnnnnnnnnnnnnnnnnnnnnnnnnnnnnnnnnnnnnnnnnnnnnnnnnnnnnnnnnnnnnnnnnnnnnnnnnnnnnnnnnnnnnnnnnnnnnnnnnnnnnnnnnnnnnnnnnnnnnnnnnnnnnnnnnnnnnnnnnnnnnnnnnnnnnnnnnnnnnnnnnnnnnnnnnnnnnnnnnnnnnnnnnnnnnnnnnnnnnnnnnnnnnnnnnnnnnnnnnnnnnnnnnnnnnnnnnnnnnnnnnnnnnnnnnnnnnnnnnnnnnnnnnnnnnnnnnnnnnnnnnnnnnnnnnnnnnnnnnnnnnnnnnnnnnnnnnnnnnnnnnnnnnnnnnnnnnnnnnnnnnnnnnnnnnnnnnnnnnnnnnnnnnnnnnnnnnnnnnnnnnnnnnnnnnnnnnnnnnnnnnnnnnnnnnnnnnnnnnnnnnnnnnnnnnnnnnnnnnnnnnnnnnnnnnnnnnnnnnnnnnnnnnnnnnnnnnnnnnnnnnnnnnnnnnnnnnnnnnnnnnnnnnnnnnnnnnnnnnnnnnnnnnnnnnnnnnnnnnnnnnnnnnnnnnnnnnnnnnnnnnnnnnnnnnnnnnnnnnnnnnnnnnnnnnnnnnnnnnnnnnnnnnnnnnnnnnnnnnnnnnnnnnnnnnnnnnnnnnnnnnnnnnnnnnnnnnnnnnnnnnnnnnnnnnnnnnnnnnnnnnnnnnnnnnnnnnnnnnnnnnnnnnnnnnnnnnnnnnnnnnnnnnnnnnnnnnnnnnnnnnnnnnnnnnnnnnnnnnnnnnnnnnnnnnnnnnnnnnnnnnnnnnnnnnnnnnnnnnnnnnnnnnnnnnnnnnnnnnnnnnnnnnnnnnnnnnnnnnnnnnnnnnnnnnnnnnnnnnnnnnnnnnnnnnnnnnnnnnnnnnnnnnnnnnnnnnnnnnnnnnnnnnnnnnnnnnnnnnnnnnnnnnnnnnnnnnnnnnnnnnnnnnnnnnnnnnnnnnnnnnnnnnnnnnnnnnnnnnnnnnnnnnnnnnnnnnnnnnnnnnnnnnnnnnnnnnnnnnnnnnnnnnnnnnnnnnnnnnnnnnnnnnnnnnnnnnnnnnnnnnnnnnnnnnnnnnnnnnnnnnnnnnnnnnnnnnnnnnnnnnnnnnnnnnnnnnnnnnnnnnnnnnnnnnnnnnnnnnnnnnnnnnnnnnnnnnnnnnnnnnnnnnnnnnnnnnnnnnnnnnnnnnnnnnnnnnnnnnnnnnnnnnnnnnnnnnnnnnnnnnnnnnnnnnnnnnnnnnnnnnnnnnnnnnnnnnnnnnnnnnnnnnnnnnnnnnnnnnnnnnnnnnnnnnnnnnnnnnnnnnnnnnnnnnnnnnnnnnnnnnnnnnnnnnnnnnnnnnnnnnnnnnnnnnnnnnnnnnnnnnnnnnnnnnnnnnnnnnnnnnnnnnnnnnnnnnnnnnnnnnnnnnnnnnnnnnnnnnnnnnnnnnnnnnnnnnnnnnnnnnnnnnnnnnnnnnnnnnnnnnnnnnnnnnnnnnnnnnnnnnnnnnnnnnnnnnnnnnnnnnnnnnnnnnnnnnnnnnnnnnnnnnnnnnnnnnnnnnnnnnnnnnnnnnnnnnnnnnnnnnnnnnnnnnnnnnnnnnnnnnnnnnnnnnnnnnnnnnnnnnnnnnnnnnnnnnnnnnnnnnnnnnnnnnnnnnnnnnnnnnnnnnnnnnnnnnnnnnnnnnnnnnnnnnnnnnnnnnnnnnnnnnnnnnnnnnnnnnnnnnnnnnnnnnnnnnnnnnnnnnnnnnnnnnnnnnnnnnnnnnnnnnnnnnnnnnnnnnnnnnnnnnnnnnnnnnnnnnnnnnnnnnnnnnnnnnnnnnnnnnnnnnnnnnnnnnnnnnnnnnnnnnnnnnnnnnnnnnnnnnnnnnnnnnnnnnnnnnnnnnnnnnnnnnnnnnnnnnnnnnnnnnnnnnnnnnnnnnnnnnnnnnnnnnnnnnnnnnnnnnnnnnnnnnnnnnnnnnnnnnnnnnnnnnnnnnnnnnnnnnnnnnnnnnnnnnnnnnnnnnnnnnnnnnnnnnnnnnnnnnnnnnnnnnnnnnnnnnnnnnnnnnnnnnnnnnnnnnnnnnnnnnnnnnnnnnnnnnnnnnnnnnnnnnnnnnnnnnnnnnnnnnnnnnnnnnnnnnnnnnnnnnnnnnnnnnnnnnnnnnnnnnnnnnnnnnnnnnnnnnnnnnnnnnnnnnnnnnnnnnnnnnnnnnnnnnnnnnnnnnnnnnnnnnnnnnnnnnnnnnnnnnnnnnnnnnnnnnnnnnnnnnnnnnnnnnnnnnnnnnnnnnnnnnnnnnnnnnnnnnnnnnnnnnnnnnnnnnnnnnnnnnnnnnnnnnnnnnnnnnnnnnnnnnnnnnnnnnnnnnnnnnnnnnnnnnnnnnnnnnnnnnnnnnnnnnnnnnnnnnnnnnnnnnnnnnnnnnnnnnnnnnnnnnnnnnnnnnnnnnnnnnnnnnnnnnnnnnnnnnnnnnnnnnnnnnnnnnnnnnnnnnnnnnnnnnnnnnnnnnnnnnnnnnnnnnnnnnnnnnnnnnnnnnnnnnnnnnnnnnnnnnnnnnnnnnnnnnnnnnnnnnnnnnnnnnnnnnnnnnnnnnnnnnnnnnnnnnnnnnnnnnnnnnnnnnnnnnnnnnnnnnnnnnnnnnnnnnnnnnnnnnnnnnnnnnnnnnnnnnnnnnnnnnnnnnnnnnnnnnnnnnnnnnnnnnnnnnnnnnnnnnnnnnnnnnnnnnnnnnnnnnnnnnnnnnnnnnnnnnnnnnnnnnnnnnnnnnnnnnnnnnnnnnnnnnnnnnnnnnnnnnnnnnnnnnnnnnnnnnnnnnnnnnnnnnnnnnnnnnnnnnnnnnnnnnnnnnnnnnnnnnnnnnnnnnnnnnnnnnnnnnnnnnnnnnnnnnnnnnnnnnnnnnnnnnnnnnnnnnnnnnnnnnnnnnnnnnnnnnnnnnnnnnnnnnnnnnnnnnnnnnnnnnnnnnnnnnnnnnnnnnnnnnnnnnnnnnnnnnnnnnnnnnnnnnnnnnnnnnnnnnnnnnnnnnnnnnnnnnnnnnnnnnnnnnnnnnnnnnnnnnnnnnnnnnnnnnnnnnnnnnnnnnnnnnnnnnnnnnnnnnnnnnnnnnnnnnnnnnnnnnnnnnnnnnnnnnnnnnnnnnnnnnnnnnnnnnnnnnnnnnnnnnnnnnnnnnnnnnnnnnnnnnnnnnnnnnnnnnnnnnnnnnnnnnnnnnnnnnnnnnnnnnnnnnnnnnnnnnnnnnnnnnnnnnnnnnnnnnnnnnnnnnnnnnnnnnnnnnnnnnnnnnnnnnnnnnnnnnnnnnnnnnnnnnnnnnnnnnnnnnnnnnnnnnnnnnnnnnnnnnnnnnnnnnnnnnnnnnnnnnnnnnnnnnnnnnnnnnnnnnnnnnnnnnnnnnnnnnnnnnnnnnnnnnnnnnnnnnnnnnnnnnnnnnnnnnnnnnnnnnnnnnnnnnnnnnnnnnnnnnnnnnnnnnnnnnnnnnnnnnnnnnnnnnnnnnnnnnnnnnnnnnnnnnnnnnnnnnnnnnnnnnnnnnnnnnnnnnnnnnnnnnnnnnnnnnnnnnnnnnnnnnnnnnnnnnnnnnnnnnnnnnnnnnnnnnnnnnnnnnnnnnnnnnnnnnnnnnnnnnnnnnnnnnnnnnnnnnnnnnnnnnnnnnnnnnnnnnnnnnnnnnnnnnnnnnnnnnnnnnnnnnnnnnnnnnnnnnnnnnnnnnnnnnnnnnnnnnnnnnnnnnnnnnnnnnnnnnnnnnnnnnnnnnnnnnnnnnnnnnnnnnnnnnnnnnnnnnnnnnnnnnnnnnnnnnnnnnnnnnnnnnnnnnnnnnnnnnnnnnnnnnnnnnnnnnnnnnnnnnnnnnnnnnnnnnnnnnnnnnnnnnnnnnnnnnnnnnnnnnnnnnnnnnnnnnnnnnnnnnnnnnnnnnnnnnnnnnnnnnnnnnnnnnnnnnnnnnnnnnnnnnnnnnnnnnnnnnnnnnnnnnnnnnnnnnnnnnnnnnnnnnnnnnnnnnnnnnnnnnnnnnnnnnnnnnnnnnnnnnnnnnnnnnnnnnnnnnnnnnnnnnnnnnnnnnnnnnnnnnnnnnnnnnnnnnnnnnnnnnnnnnnnnnnnnnnnnnnnnnnnnnnnnnnnnnnnnnnnnnnnnnnnnnnnnnnnnnnnnnnnnnnnnnnnnnnnnnnnnnnnnnnnnnnnnnnnnnnnnnnnnnnnnnnnnnnnnnnnnnnnnnnnnnnnnnnnnnnnnnnnnnnnnnnnnnnnnnnnnnnnnnnnnnnnnnnnnnnnnnnnnnnnnnnnnnnnnnnnnnnnnnnnnnnnnnnnnnnnnnnnnnnnnnnnnnnnnnnnnnnnnnnnnnnnnnnnnnnnnnnnnnnnnnnnnnnnnnnnnnnnnnnnnnnnnnnnnnnnnnnnnnnnnnnnnnnnnnnnnnnnnnnnnnnnnnnnnnnnnnnnnnnnnnnnnnnnnnnnnnnnnnnnnnnnnnnnnnnnnnnnnnnnnnnnnnnnnnnnnnnnnnnnnnnnnnnnnnnnnnnnnnnnnnnnnnnnnnnnnnnnnnnnnnnnnnnnnnnnnnnnnnnnnnnnnnnnnnnnnnnnnnnnnnnnnnnnnnnnnnnnnnnnnnnnnnnnnnnnnnnnnnnnnnnnnnnnnnnnnnnnnnnnnnnnnnnnnnnnnnnnnnnnnnnnnnnnnnnnnnnnnnnnnnnnnnnnnnnnnnnnntgcgttgccattttttttgatacgttcaatcgaaagaaaataaccggtgcttgagtttttaacccctgaattttggatcgcggtgggtcaaattatcttgattgatattttgctcggcggcgataacgcggttgtcatcgctttggcctgtcgacagctgcctgaaaaccagcgcatgcagggcatcatgtggggcactgtgggcgcgattggtttgcgggtgttgcttatcgtttttgcgctaacacttctgaccatcccttatctgaaaatcgttggcggtttgttgctggtgtggattggtgtgaagctcatgatccccgatgaggaaggagaccatagcgtcgtcgatgccagtgacaagctctggtcagccgtcaaaacagtcatcttggccgacttggtcatgagcatcgacaacgtcatggccattgctggcgccgcgcagggtgctgccgagcatcaacaagtgccgctggtaatttttggcctgctggtcagcgtgcccatcatcgtatggggcagtcaattggttttgaaaatcatggacagcatgcccattgtcatcaccttgggtgcaatgttgttgggctggattgccggcatcatgatttggaccgacccggtgctggtcgatgtgctgccgtctgagcccctgatgggtttgtctttgcgccattgggcggggtttgtcggtgcttgcttggtgtgggtgattggtcgtgcggtcatcgcaaagcgccctaaacccttaggggcttgacgttatctctgagcgccttagacaccgtgcatcgttggttcaactttggaaacaacccggacactcattcatgcaactttccagcaaccgtaaccttggcttcaccttgattgaattgatggtggtggtggccgtggtgggcatcttggctgcagtggccattccgcaatatcaaaactacacccaacgcgcgcggtgggccgccaacctcggcgccattgccgcgttacagggtacggtcagtgagtgcctcggccaacaagccaacgacatcacgttatgcgacacgtttggcgaacttggggtcaccagtggcctgaataccgacggcgtcatgccgttgccccatggcacggttgccgtgcaagccagcggtgatgccaccgcgattcgggttgttttaacgggcgctgccaatgcgggtaattgcatcatcacagccagcttgacgcccgcagaaggagcccaaatgctgcaatgggccctcacgcgggacaccacacaaactaaatgtaccgctgccaacacgggcgttgacgcagcaggctgattcgggcgtaagatgcggctttaatttttggagcccagcatggcaaaaggtcagcaaaaaacaaacaaggaatccaaaaagcccaagaaggccgccgccgccgcccctgctttgaacagtgcgcaagaacccgtgcgtgccgtggtcaccacatccgtgatgcccaaaggcaaggctaaaaataaaccggccttctaatatttattagctatttattttaaaaattaaacaataaaagagtacttattgactattatgttgtgaagtaatcgacttgccttccgcaagccgttgattcacacatggggcaggctctgcaaacattcactcgacgggcgacgctcaaaaccccggtcatcatgcgggggtacctcacgcttgatgcactgctgatggcggagttggtcactggcgacgtctcgcacttactcaagcgagatgcgcagttgtactacgccagcgccgcctttttggtggacccgcttgaggaaaagcaaaaggcatcatttgttgccagcatgcggcccgagcaccacccggagctccgcgagctcatcgcccccaacacgcacacacccaacgcgccaccgcttttgcacacgcatcggtcgcgtggcaatgtcaacgacgtggcaattggacgcgctcgccgcaaagaagcgggcaacatcctcaaccaatacgtggcccacgccgctgcagccgtcgagtggtatgccaccggccatgccgagcaggtctggcaggttgtgcaagacatcgcatttattggcaaaaagcgatcagcgggctacggcgaaatcgacgcatggcaggtgatccccggccaccttgatggcctcaccgatgacttcggagagcccttgcgccccgtgccggttgagcgatggccaacctccgcgacgcttattccctccgaggccgcatggtgcgccccgtattgggatattcgaaaccgaaccaaatgctacacgccggagccacgatgaacggcgccgacttcttaatgcaacacatcggttatcggttattgccgaaagcgatgcacaccggcgatgccgtcaccgatgccaacgcgctattcagcatcagtttgcccctacacaccggaaaaacactccggctttccagttgctggtgggtgatcacacccgatgcaacgtacaccagctttaaggccatccccgagaccggcgccattcaggggcagttgcggcaggccgtcatcttgtcatccctaaaaacgggattgcccctcttgatcctcgcgattggcaagagccccatgtacgcacgcgacctctttgtgacctacgacccacgcgcaacgcgctattgcagcgatcgcagtttgcgcaccgttgattcaactctggagaagtggtggacaccttaatcagcaagcccatccagctgtgcggctatgcgctgcaccgcttggttgcgcaacatcaaaacggtgcgccagcgctctggcgtgacgagggtgacaccgtgcgaattcgctcgcgtgacgcctgtccgcccacctacgtcacagggcaactgttgggctttgtcacattggcgtgtgtgtcgtttggtagcaaacaccggtacctgccggtcgccgattggcgtggtcgcaaagcgtggctggaggcacagggcatcaaacacggtttcgaggtggttggggtgcacgcccagggtggcatgcaaaccgtgaccacccatgacggtcgccacttcaccattgatgccacgcaattcacgggcttgctgcgcgtcacccagcctgcgccattcaacgactgtctgctcaatggcatcggcaaagtaggtaaagcctttggcctcaacttactcgtcgttcattaacccaacgcttaaaaacgcttatccggagttcaccaccatgcaagacgttcgcatcgatatcgccatcaatacgattcaacccatcaccttcacccatcacggcatcgacgggttgcccaccatggctcgcggcgttgacatggagggtcatcccctgcgcaccgtttacattccagccgcgcagtttcgcggtcggctaaggcatgaggcggcgttggcaaaaatgcgtaccgcacacggccccatcaagttggcggaagcctacatgctggccttggggcaaaacatcgacaccaaagaagacgaggctgatgagaaagtgcggttgggcgagctactcgctttacgggcggccaaccccttcattgatctcttcggaacgtggcgcatggacagccggctttacgtgtcgcacctgatgccggtcgtcaacgtcaagcccgacacctttcaccacatccgccgcgatctagacaccaacgacgcgttgtttgccgagttacccgaagccgagatcgacgtcttttacgaaaggcaagacggacagtcgcaagcctctcaagcggagagtctgattaaggtggccacccgcgaactgcgcaaagccaaaaaagaaaacgacctcgccaaatgcgacgagttcgaagccaagatcgaagaactcaaagccctcaagaaggcgcacaaagccggtgactaatcgggaaacaccaaacacttggtggcgatggaggccgtccctgcgggaattcaattgttgtgcaaactcatcataaagcgggccacgccgctcgacctcagcatgctcacgggtgcgcttaacgcgatcagcgaattccccatgatgggtgcccagcgggcccgtggctgaggcaaggtgagtggcgccgcaaccgtctgccacacccagggtgaggtgttggcgcaaatcgccttcggtggttttttgccagctgcactggagtggaccgatgcgggcaccgcgttcatgactggcctcgaaacggttgccgtcgccgcgtgaaaggcccttaccgcagcccacagcaggcgcaatacgccaagctcatcgagcgcgctgtcagcaaacccggtgcgcccctgttggcgggtgctgcgcccgggctcggtaagacacacggctacgccatcccgttgttgtgcagtggcaaaaaagttgccatcgccatgagcacgcgccaactgatcgatcaatttatagcgagcgatgcactcgccgctgcgcaagccgcactagaggccgaggggcggcccgctgccaccgttgtcgccttgcaaccccgccgtcaatttgaaacggcggtggcctacagcgcgcacaaaacggcggcgcttgatgccgacgtcttggtgctcacacacatgggcgtgctcatcgatacccacatcccagcctacgcccagctgcgtcagcgcgctgtcttgttgtttgacgaagccgatcttttggccgatgccgccgacttgcgcagcacctatcgcattgaggctgaggccttagcccgcgcaggcgtcgaaaacgccacaccgacaaaggcggttgaaaccatcattaaaaaatccgatgaccccgaggaaaaagcagtcgccacagccatccaacgcgctttggcagagccggcttggtacaaagtgatcggtaaagaagacaacggcgatttggtgctgacccaccgcatgccggggcgcatgttgcgcaccctcatcaatgacatgccgcggtgcattttcaccagtggcaccctcacggtatcggggcgttttgaccactttgtcaaagccatcggcctgaccgcagtggcacccgaaagccagcacattgaccccgtgcaacacggccaactgcgcgttgaggtggccagtgaggccctcaccccagaagcacaagccgaacgcatcatgcacgcggcgacaccggtattggtgctgaccaccagccacgcgactacggcggcgttgggctctttgtgccccggtgccatctgccgcgcacccggtgaagccctcatggatgcggtggcgcgatgccctgatgatggcatcttgatcgccgctggcgcctggtctggcctcgatgcgccgcgcctgccgtggcaaaccgtggtcatccccaaaacaccgtacggcaaaccactcatccttgacgcccagcagataagcgcttacgtggacagcaaggttgttgccatcaggcgcaccaaccaagggttacaccgtgggctgcgcaccaccgatgccacctgcaccttgctgttactcgatccggatagccgtcgtgccgatttacgtcaagccattccccgtcgtttcttggtggattgggacagcgtggccgagggctcgttggttttgcgcacgcacttcgcccgtgaacgaaaaaaaggtctgcgtgaaaaaaccctgagccggcgcgggcagcactgcgaacaccccggctgtacggccacccaagagcatttgctggaggtgcaccacctcaacccgattgccaacggcccccgcgacacagttactgatgacctgcgggtgctttgtaaaaatcaccacgcggatgcccaccaagccatgcgaaaagctgattttttaaaagtgaaaacaactgaaaagcgtgcagaggcagacacttaggccacagctggtcaagctacgccgtaaatgcgtagttactggaacttcgcgcgagtgcttagataggcttccatcggtcaagctacgccgtaaatgcgtagttactggaacttgcgtgt

SEQ ID NO: 240 - DNA, 11736 bp, Artificial Sequence
  Synthetic Oligonucleotide
  misc_feature (1)..(6987): n is a, c, g, or t
nnnnnnnnnnnnnnnnnnnnnnnnnnnnnnnnnnnnnnnnnnnnnnnnnnnnnnnnnnnnnnnnnnnnnnnnnnnnnnnnnnnnnnnnnnnnnnnnnnnnnnnnnnnnnnnnnnnnnnnnnnnnnnnnnnnnnnnnnnnnnnnnnnnnnnnnnnnnnnnnnnnnnnnnnnnnnnnnnnnnnnnnnnnnnnnnnnnnnnnnnnnnnnnnnnnnnnnnnnnnnnnnnnnnnnnnnnnnnnnnnnnnnnnnnnnnnnnnnnnnnnnnnnnnnnnnnnnnnnnnnnnnnnnnnnnnnnnnnnnnnnnnnnnnnnnnnnnnnnnnnnnnnnnnnnnnnnnnnnnnnnnnnnnnnnnnnnnnnnnnnnnnnnnnnnnnnnnnnnnnnnnnnnnnnnnnnnnnnnnnnnnnnnnnnnnnnnnnnnnnnnnnnnnnnnnnnnnnnnnnnnnnnnnnnnnnnnnnnnnnnnnnnnnnnnnnnnnnnnnnnnnnnnnnnnnnnnnnnnnnnnnnnnnnnnnnnnnnnnnnnnnnnnnnnnnnnnnnnnnnnnnnnnnnnnnnnnnnnnnnnnnnnnnnnnnnnnnnnnnnnnnnnnnnnnnnnnnnnnnnnnnnnnnnnnnnnnnnnnnnnnnnnnnnnnnnnnnnnnnnnnnnnnnnnnnnnnnnnnnnnnnnnnnnnnnnnnnnnnnnnnnnnnnnnnnnnnnnnnnnnnnnnnnnnnnnnnnnnnnnnnnnnnnnnnnnnnnnnnnnnnnnnnnnnnnnnnnnnnnnnnnnnnnnnnnnnnnnnnnnnnnnnnnnnnnnnnnnnnnnnnnnnnnnnnnnnnnnnnnnnnnnnnnnnnnnnnnnnnnnnnnnnnnnnnnnnnnnnnnnnnnnnnnnnnnnnnnnnnnnnnnnnnnnnnnnnnnnnnnnnnnnnnnnnnnnnnnnnnnnnnnnnnnnnnnnnnnnnnnnnnnnnnnnnnnnnnnnnnnnnnnnnnnnnnnnnnnnnnnnnnnnnnnnnnnnnnnnnnnnnnnnnnnnnnnnnnnnnnnnnnnnnnnnnnnnnnnnnnnnnnnnnnnnnnnnnnnnnnnnnnnnnnnnnnnnnnnnnnnnnnnnnnnnnnnnnnnnnnnnnnnnnnnnnnnnnnnnnnnnnnnnnnnnnnnnnnnnnnnnnnnnnnnnnnnnnnnnnnnnnnnnnnnnnnnnnnnnnnnnnnnnnnnnnnnnnnnnnnnnnnnnnnnnnnnnnnnnnnnnnnnnnnnnnnnnnnnnnnnnnnnnnnnnnnnnnnnnnnnnnnnnnnnnnnnnnnnnnnnnnnnnnnnnnnnnnnnnnnnnnnnnnnnnnnnnnnnnnnnnnnnnnnnnnnnnnnnnnnnnnnnnnnnnnnnnnnnnnnnnnnnnnnnnnnnnnnnnnnnnnnnnnnnnnnnnnnnnnnnnnnnnnnnnnnnnnnnnnnnnnnnnnnnnnnnnnnnnnnnnnnnnnnnnnnnnnnnnnnnnnnnnnnnnnnnnnnnnnnnnnnnnnnnnnnnnnnnnnnnnnnnnnnnnnnnnnnnnnnnnnnnnnnnnnnnnnnnnnnnnnnnnnnnnnnnnnnnnnnnnnnnnnnnnnnnnnnnnnnnnnnnnnnnnnnnnnnnnnnnnnnnnnnnnnnnnnnnnnnnnnnnnnnnnnnnnnnnnnnnnnnnnnnnnnnnnnnnnnnnnnnnnnnnnnnnnnnnnnnnnnnnnnnnnnnnnnnnnnnnnnnnnnnnnnnnnnnnnnnnnnnnnnnnnnnnnnnnnnnnnnnnnnnnnnnnnnnnnnnnnnnnnnnnnnnnnnnnnnnnnnnnnnnnnnnnnnnnnnnnnnnnnnnnnnnnnnnnnnnnnnnnnnnnnnnnnnnnnnnnnnnnnnnnnnnnnnnnnnnnnnnnnnnnnnnnnnnnnnnnnnnnnnnnnnnnnnnnnnnnnnnnnnnnnnnnnnnnnnnnnnnnnnnnnnnnnnnnnnnnnnnnnnnnnnnnnnnnnnnnnnnnnnnnnnnnnnnnnnnnnnnnnnnnnnnnnnnnnnnnnnnnnnnnnnnnnnnnnnnnnnnnnnnnnnnnnnnnnnnnnnnnnnnnnnnnnnnnnnnnnnnnnnnnnnnnnnnnnnnnnnnnnnnnnnnnnnnnnnnnnnnnnnnnnnnnnnnnnnnnnnnnnnnnnnnnnnnnnnnnnnnnnnnnnnnnnnnnnnnnnnnnnnnnnnnnnnnnnnnnnnnnnnnnnnnnnnnnnnnnnnnnnnnnnnnnnnnnnnnnnnnnnnnnnnnnnnnnnnnnnnnnnnnnnnnnnnnnnnnnnnnnnnnnnnnnnnnnnnnnnnnnnnnnnnnnnnnnnnnnnnnnnnnnnnnnnnnnnnnnnnnnnnnnnnnnnnnnnnnnnnnnnnnnnnnnnnnnnnnnnnnnnnnnnnnnnnnnnnnnnnnnnnnnnnnnnnnnnnnnnnnnnnnnnnnnnnnnnnnnnnnnnnnnnnnnnnnnnnnnnnnnnnnnnnnnnnnnnnnnnnnnnnnnnnnnnnnnnnnnnnnnnnnnnnnnnnnnnnnnnnnnnnnnnnnnnnnnnnnnnnnnnnnnnnnnnnnnnnnnnnnnnnnnnnnnnnnnnnnnnnnnnnnnnnnnnnnnnnnnnnnnnnnnnnnnnnnnnnnnnnnnnnnnnnnnnnnnnnnnnnnnnnnnnnnnnnnnnnnnnnnnnnnnnnnnnnnnnnnnnnnnnnnnnnnnnnnnnnnnnnnnnnnnnnnnnnnnnnnnnnnnnnnnnnnnnnnnnnnnnnnnnnnnnnnnnnnnnnnnnnnnnnnnnnnnnnnnnnnnnnnnnnnnnnnnnnnnnnnnnnnnnnnnnnnnnnnnnnnnnnnnnnnnnnnnnnnnnnnnnnnnnnnnnnnnnnnnnnnnnnnnnnnnnnnnnnnnnnnnnnnnnnnnnnnnnnnnnnnnnnnnnnnnnnnnnnnnnnnnnnnnnnnnnnnnnnnnnnnnnnnnnnnnnnnnnnnnnnnnnnnnnnnnnnnnnnnnnnnnnnnnnnnnnnnnnnnnnnnnnnnnnnnnnnnnnnnnnnnnnnnnnnnnnnnnnnnnnnnnnnnnnnnnnnnnnnnnnnnnnnnnnnnnnnnnnnnnnnnnnnnnnnnnnnnnnnnnnnnnnnnnnnnnnnnnnnnnnnnnnnnnnnnnnnnnnnnnnnnnnnnnnnnnnnnnnnnnnnnnnnnnnnnnnnnnnnnnnnnnnnnnnnnnnnnnnnnnnnnnnnnnnnnnnnnnnnnnnnnnnnnnnnnnnnnnnnnnnnnnnnnnnnnnnnnnnnnnnnnnnnnnnnnnnnnnnnnnnnnnnnnnnnnnnnnnnnnnnnnnnnnnnnnnnnnnnnnnnnnnnnnnnnnnnnnnnnnnnnnnnnnnnnnnnnnnnnnnnnnnnnnnnnnnnnnnnnnnnnnnnnnnnnnnnnnnnnnnnnnnnnnnnnnnnnnnnnnnnnnnnnnnnnnnnnnnnnnnnnnnnnnnnnnnnnnnnnnnnnnnnnnnnnnnnnnnnnnnnnnnnnnnnnnnnnnnnnnnnnnnnnnnnnnnnnnnnnnnnnnnnnnnnnnnnnnnnnnnnnnnnnnnnnnnnnnnnnnnnnnnnnnnnnnnnnnnnnnnnnnnnnnnnnnnnnnnnnnnnnnnnnnnnnnnnnnnnnnnnnnnnnnnnnnnnnnnnnnnnnnnnnnnnnnnnnnnnnnnnnnnnnnnnnnnnnnnnnnnnnnnnnnnnnnnnnnnnnnnnnnnnnnnnnnnnnnnnnnnnnnnnnnnnnnnnnnnnnnnnnnnnnnnnnnnnnnnnnnnnnnnnnnnnnnnnnnnnnnnnnnnnnnnnnnnnnnnnnnnnnnnnnnnnnnnnnnnnnnnnnnnnnnnnnnnnnnnnnnnnnnnnnnnnnnnnnnnnnnnnnnnnnnnnnnnnnnnnnnnnnnnnnnnnnnnnnnnnnnnnnnnnnnnnnnnnnnnnnnnnnnnnnnnnnnnnnnnnnnnnnnnnnnnnnnnnnnnnnnnnnnnnnnnnnnnnnnnnnnnnnnnnnnnnnnnnnnnnnnnnnnnnnnnnnnnnnnnnnnnnnnnnnnnnnnnnnnnnnnnnnnnnnnnnnnnnnnnnnnnnnnnnnnnnnnnnnnnnnnnnnnnnnnnnnnnnnnnnnnnnnnnnnnnnnnnnnnnnnnnnnnnnnnnnnnnnnnnnnnnnnnnnnnnnnnnnnnnnnnnnnnnnnnnnnnnnnnnnnnnnnnnnnnnnnnnnnnnnnnnnnnnnnnnnnnnnnnnnnnnnnnnnnnnnnnnnnnnnnnnnnnnnnnnnnnnnnnnnnnnnnnnnnnnnnnnnnnnnnnnnnnnnnnnnnnnnnnnnnnnnnnnnnnnnnnnnnnnnnnnnnnnnnnnnnnnnnnnnnnnnnnnnnnnnnnnnnnnnnnnnnnnnnnnnnnnnnnnnnnnnnnnnnnnnnnnnnnnnnnnnnnnnnnnnnnnnnnnnnnnnnnnnnnnnnnnnnnnnnnnnnnnnnnnnnnnnnnnnnnnnnnnnnnnnnnnnnnnnnnnnnnnnnnnnnnnnnnnnnnnnnnnnnnnnnnnnnnnnnnnnnnnnnnnnnnnnnnnnnnnnnnnnnnnnnnnnnnnnnnnnnnnnnnnnnnnnnnnnnnnnnnnnnnnnnnnnnnnnnnnnnnnnnnnnnnnnnnnnnnnnnnnnnnnnnnnnnnnnnnnnnnnnnnnnnnnnnnnnnnnnnnnnnnnnnnnnnnnnnnnnnnnnnnnnnnnnnnnnnnnnnnnnnnnnnnnnnnnnnnnnnnnnnnnnnnnnnnnnnnnnnnnnnnnnnnnnnnnnnnnnnnnnnnnnnnnnnnnnnnnnnnnnnnnnnnnnnnnnnnnnnnnnnnnnnnnnnnnnnnnnnnnnnnnnnnnnnnnnnnnnnnnnnnnnnnnnnnnnnnnnnnnnnnnnnnnnnnnnnnnnnnnnnnnnnnnnnnnnnnnnnnnnnnnnnnnnnnnnnnnnnnnnnnnnnnnnnnnnnnnnnnnnnnnnnnnnnnnnnnnnnnnnnnnnnnnnnnnnnnnnnnnnnnnnnnnnnnnnnnnnnnnnnnnnnnnnnnnnnnnnnnnnnnnnnnnnnnnnnnnnnnnnnnnnnnnnnnnnnnnnnnnnnnnnnnnnnnnnnnnnnnnnnnnnnnnnnnnnnnnnnnnnnnnnnnnnnnnnnnnnnnnnnnnnnnnnnnnnnnnnnnnnnnnnnnnnnnnnnnnnnnnnnnnnnnnnnnnnnnnnnnnnnnnnnnnnnnnnnnnnnnnnnnnnnnnnnnnnnnnnnnnnnnnnnnnnnnnnnnnnnnnnnnnnnnnnnnnnnnnnnnnnnnnnnnnnnnnnnnnnnnnnnnnnnnnnnnnnnnnnnnnnnnnnnnnnnnnnnnnnnnnnnnnnnnnnnnnnnnnnnnnnnnnnnnnnnnnnnnnnnnnnnnnnnnnnnnnnnnnnnnnnnnnnnnnnnnnnnnnnnnnnnnnnnnnnnnnnnnnnnnnnnnnnnnnnnnnnnnnnnnnnnnnnnnnnnnnnnnnnnnnnnnnnnnnnnnnnnnnnnnnnnnnnnnnnnnnnnnnnnnnnnnnnnnnnnnnnnnnnnnnnnnnnnnnnnnnnnnnnnnnnnnnnnnnnnnnnnnnnnnnnnnnnnnnnnnnnnnnnnnnnnnnnnnnnnnnnnnnnnnnnnnnnnnnnnnnnnnnnnnnnnnnnnnnnnnnnnnnnnnnnnnnnnnnnnnnnnnnnnnnnnnnnnnnnnnnnnnnnnnnnnnnnnnnnnnnnnnnnnnnnnnnnnnnnnnnnnnnnnnnnnnnnnnnnnnnnnnnnnnnnnnnnnnnnnnnnnnnnnnnnnnnnnnnnnnnnnnnnnnnnnnnnnnnnnnnnnnnnnnnnnnnnnnnnnnnnnnnnnnnnnnnnnnnnnnnnnnnnnnnnnnnnnnnnnnnnnnnnnnnnnnnnnnnnnnnnnnnnnnnnnnnnnnnnnnnnnnnnnnnnnnnnnnnnnnnnnnnnnnnnnnnnnnnnnnnnnnnnnnnnnnnnnnnnnnnnnnnnnnnnnnnnnnnnnnnnnnnnnnnnnnnnnnnnnnnnnnnnnnnnnnnnnnnnnnnnnnnnnnnnnnnnnnnnnnnnnnnnnnnnnnnnnnnnnnnnnnnnnnnnnnnnnnnnnnnnnnnnnnnnnnnnnnnnnnnnnnnnnnnnnnnnnnnnnnnnnnnnnnnnnnnnnnnnnnnnnnnnnnnnnnnnnnnnnnnnnnnnnnnnnnnnnnnnnnnnnnnnnnnnnnnnnnnnnnnnnnnnnnnnnnnnnnnnnnnnnnnnnnnnnnnnnnnnnnnnnnnnnnnnnnnnnnnnnnnnnnnnnnnnnnnnnnnnnnnnnnnnnnnnnnnnnnnnnnnnnnnnnnnnnnnnnnnnnnnnnnnnnnnnnnnnnnnnnnnnnnnnnnnnnnnnnnnnnnnnnnnnnnnnnnnnnnnnnnnnnnnnnnnnnnnnnnnnnnnnnnnnnnnnnnnnnnnnnnnnnnnnnnnnnnnnnnnnnnnnnnnnnnnnnnnnnnnnnnnnnnnnnnnnnnnnnnnnnnnnnnnnnnnnnnnnnnnnnnnnnnnnnnnnnnnnnnnnnnnnnnnnnnnnnnnnnnnnnnnnnnnnnnnnnnnnnnnnnnnnnnnnnnnnnnnnnnnnnnnnnnnnnnnnnnnnnnnnnnnnnnnnnnnnnnnnnnnnnnnnnnnnnnnnnnnnnnnnnnnnnnnnnnnnnnnnnnnnnnnnnnnnnnnnnnnnnnnnnnnnnnnnnnnnnnnnnnnnnnnnnnnnnnnnnnnnnnnnnnnnnnnnnnnnnnnnnnnnnnnnnnnnnnnnnnnnnnnnnnnnnnnnnnnnnnnnnnnnnnnnnnnnnnnnnnnnnnnnnnnnnnnnnnnnnnnnnnnnnnnnnnnnnnnnnnnnnnnnnnnnnnnnnnnnnnnnnnnnnnnnnnnnnnnnnnnnnnnnnnnnnnnnnnnnnnnnnnnnnnnnnnnnnnnnnnnnnnnnnnnnnnnnnnnnnnnnnnnnnnnnnnnnnnnnnnnnnnnnnnnnnnnnnnnnnnnnnnnnnnnnnnnnnnnnnnnnnnnnnnnnnnnnnnnnnnnnnnntgaagttgatactgattcagtgtggctttttttgattttgggaaacagagattgggtgagcttggttgtgttgatgatgggaggactggcgcttatacttttgacatcgatagatatttcgacttcgaaaggatgcaaaatgactggagctcaatttcaagtcatgatcgccatcggttttttatgggcgatcgccatcgctgttttgtactttgaggccaaagaaaaaagcaaaaccgaacataaagacaagggactttgaatcccctcaacttgttcatcaaaaagccagacttggtctggcttttttcatgctcacttcaacagagaccatgcaaagtgggtggtttgtttaccaatatccccacgccatccaaaccatatttaattattaaaatttattcataagatcacaatttttttttaccattatatttagtacttatagattctattgattcgacatcatctttcagagcgtcgtccattgaaaggcaggccaattgacaccatttgtacttcgtgcccacttgagcacaccattgatacggcgtggacacgtcaccttggacgcgctgttgatgtcctgtctgaccactggtgatgtatcccatttgttgttgtgcaaagatgatttgtactttgcaagttcaggttttgcagtggatgcaaacgccacccaacgcgtttcattcgttgccagtttgcgacctgagcattcaccgcaatggttggatgtacttcattccaacacaaaaaacggcgatttgaaaattggactgtcacggcagcgggacggcggcaacatcatcaatgcttacacggccacagttgcgagcgccattgagtggtacgccacaggcgatatgcaggcagtgctggccgtggtgaagtccatcccattcataggcaagcgcagaacatcaggatttgggcaagtcaagcaatgggaggtggcctcgggcgaattagatggtttggtgggttttgcagttgagccactgcggccagtgcctacagaacgctggtctgagggtggcgactggactcctgttgaagctgcttggaaagcgccctactgggatgtgcgaaaccgcacctgctgttttgttccggaggtgtgaggtgaatggccccgaatttttcatgcgttatgcaggctatcgcctgctacctgaggataaaaaaactgacgatgcggttgctgatgccgacacattgcttggcatgtcgctgcctatgcatacagggcaatctttgcgactgtcctcatgttggatggttgtgacaccgcaatgggttgccaccagcttcaaggctttagcccttgcgggatttcgccaagaaaccgaacgcaaaacagccatcgatgaggcactgaaaccaggcggaccgtgcatgcttttggcactggacaagcgctccatgacagcccgcgatttgttcgtcacctatgacgcacgtgcggcccgaatgtgcagcccaggttttgtgaagacctatgacgccaccaaggagaaatcatggacatcttgatcgacaagccagctcgcgtgaagggctatgccttgcaccgcatggtggcgcagttccgtaatggcaaacctgcattgtgggcagatgaaggccagcaactccgcatccgacccgaagaggccacaccacccgtgtatgccgcaggtcaaatgctggccttcaccaccacggcctgtgtcgccttcagtagcggacacaagcataaatacctgccgttgtctgattggcgtggacgccgcacatggctggaacaacaagcgcacaaacatggctttgaaattgtgggtgtccacgtgtcgggcggcatgcaagaggtgctcacccatgatggacgtcgcttcaaacttgatgccaccgaattcaccggcctgttgaaagtcatcgaaccccaagcctttgggctttgccttgtcaaaggcattggcaaagtaggcaaagcttttggcttgaatctcttgatcgtgcaataactcaccaaggaaaaaccatgacctcatctcataacctgattgcagacattgagctgctgaccttgcaacctttgaccttcacacaccatggcaccgagggcttgcccttgctgacgcgcggcattgacgatgaaggacgtcaccaacgaacggtctaccttcctgcagctcaactgcgtggcagggtgcggcatgaatcggccatggccgagttacgcaagaaacccgaaaaagccaagctcgaagacgcctacatgctggctttggggcaagacctgcgacccagcgaagacgatgagcccgaggatattcgcctcagcgaacaaatcaagtttcgacagaaaaacccgtttctcgacatttttggcacctggaaagttgccagccgtttgtatgtttcgcacctcttgcctgctgtgaatgtattacccgacaaagtcagccacattcgccgcgaccttgacaccaacgaagacatgatggctttgctggatgacgaggagcaaaaccgcttgtacgaccggcaagacaagcaaggcctggcttcaaaggcagaaagcttaatcaaactaaccaaccgggaattacttgccgctcgcaaagccaaagaccagaccaagttggcggatctcaatgccaagttggaagaactcaaagcgcttaagaaatcacagaagggggatgaccaatccgacaacaccaagcacttgcttgaattacaagtcattcccgcaggcatcacactcaccggcaaactcatcgttctacatgccacagctttcgacttgaacactttggtcgaggccttcaacggcttaagtcgcaacccctatatgggtgcacaacgcgcccggggctgtggcgaagtgcaaggtcaagtccgctttcaaaatgacttgggtgaggtgttggttgtggtgaagtttggtggtctgcaagctgccaaggtggcgtggacagatgctgggcaacagtggttgctgccacagggcgaactgacaagcgcatgatttatcgaagcccagaacaacagcgctatgccaagttgatcgagggtgctcttcgcccaggcccgcccttgctggcgggggcctcagcaggtttgggcaaaacccatggttacagcatcccactggtgcgctcgggcaagcggattgccatcgccatgagcacacgccagttgatgcagcaatacctcgacagccatgccttggctacagccttgcaagggcacacatgcacggtgggggaactgcaatcccgtcaacactttgaaactgacaaggcctatcaagcgcaccgatccgaagccttgcaagcacaggtgctgttggtcacccatgccgccgccttgattgacagtttgcaaccgggctatgcccaactgcgcgagcgtgatgtggtgttgttcgatgaggccgatttattggccgacgccgcagaccttcgcagcacctttgccatcagcgcggaaacactcaaagcctgccaagctcaacatttgacgcctgaacaagcagcccacaaggtgcgtcaactcaccacatcaactgaagaccgctgtgcagcaagcgccatcttgtatgccctggccaatcctgcgccctacaaaatggtgggtcacaatgacgcaggtgacttggtgctgcgtcaccgcatgcctgggcgcatgctcaagcctttggtgaaagaggcgccacgctgtattttcaccagtggcaccctgcaagtgcacggcagctttgaccattttgtgcgggccatggggctcacggccatggcgcccgaaagctgccacatcgaacccccgcagcatggccacttgagagttcaagccacggctgatgccttgtctttggaacagatcgcccttcgaatagccgccgctcaaaaccccaccttggtgctcaccagcagccaccgttcgagccaagaactcggggccttgttgccacacgctgtggtgcgtgaagcagatgaacctttggcagatgcggtgcaacgctgccccaccgatggggtgctgatagcagcgggtgcgtggtcgggcttggacgaacctcggctgcgttggcgcacggtggtgattcctcaaaccccatacggtcagcctgttcaggtgaatggaatttcggtgaactacttcatcgacagccaagtggtggccttgcggcgcaccaaccaaggtttgcaccggggtttgcgcacacccgatgcgcagtgcactctgctgttgctggacccgcgaagtagtcgattgactctgcggtcggccatcccagccaggttctcggtggattgggatggctttgaagaaggctcgttggtgttacaaacccatttcaaacgcgagcgcaatcaacaactgaaaaatgcagccttgaagcactacggcaaccagtgcatgtttgaaggctgtgaggtgaccaaagcccattggctggaagtccaccacaccctgcccatcagcgagggcgagcgccgaaccacgctagaagatgtgcaggttttatgcagcaaccaccacaaagaagcccatcatttgctgcgcatggctgctttttctgatgaaaaatcaactgaaatttcaacggagtcaacaacttaaaacgcttcaggtcaagctgccatgtgaatgtgcagttactagaacttagctgtgttggagccgcctgtagtgttgggtcaagctgccatgtgaatgtgcagttactagaaccctcacgggtagcaagggcgcgct

SEQ ID NO: 241 - DNA, 11717 bp, Artificial Sequence
  Synthetic Oligonucleotide
  misc_feature (1)..(8305): n is a, c, g, or t
nnnnnnnnnnnnnnnnnnnnnnnnnnnnnnnnnnnnnnnnnnnnnnnnnnnnnnnnnnnnnnnnnnnnnnnnnnnnnnnnnnnnnnnnnnnnnnnnnnnnnnnnnnnnnnnnnnnnnnnnnnnnnnnnnnnnnnnnnnnnnnnnnnnnnnnnnnnnnnnnnnnnnnnnnnnnnnnnnnnnnnnnnnnnnnnnnnnnnnnnnnnnnnnnnnnnnnnnnnnnnnnnnnnnnnnnnnnnnnnnnnnnnnnnnnnnnnnnnnnnnnnnnnnnnnnnnnnnnnnnnnnnnnnnnnnnnnnnnnnnnnnnnnnnnnnnnnnnnnnnnnnnnnnnnnnnnnnnnnnnnnnnnnnnnnnnnnnnnnnnnnnnnnnnnnnnnnnnnnnnnnnnnnnnnnnnnnnnnnnnnnnnnnnnnnnnnnnnnnnnnnnnnnnnnnnnnnnnnnnnnnnnnnnnnnnnnnnnnnnnnnnnnnnnnnnnnnnnnnnnnnnnnnnnnnnnnnnnnnnnnnnnnnnnnnnnnnnnnnnnnnnnnnnnnnnnnnnnnnnnnnnnnnnnnnnnnnnnnnnnnnnnnnnnnnnnnnnnnnnnnnnnnnnnnnnnnnnnnnnnnnnnnnnnnnnnnnnnnnnnnnnnnnnnnnnnnnnnnnnnnnnnnnnnnnnnnnnnnnnnnnnnnnnnnnnnnnnnnnnnnnnnnnnnnnnnnnnnnnnnnnnnnnnnnnnnnnnnnnnnnnnnnnnnnnnnnnnnnnnnnnnnnnnnnnnnnnnnnnnnnnnnnnnnnnnnnnnnnnnnnnnnnnnnnnnnnnnnnnnnnnnnnnnnnnnnnnnnnnnnnnnnnnnnnnnnnnnnnnnnnnnnnnnnnnnnnnnnnnnnnnnnnnnnnnnnnnnnnnnnnnnnnnnnnnnnnnnnnnnnnnnnnnnnnnnnnnnnnnnnnnnnnnnnnnnnnnnnnnnnnnnnnnnnnnnnnnnnnnnnnnnnnnnnnnnnnnnnnnnnnnnnnnnnnnnnnnnnnnnnnnnnnnnnnnnnnnnnnnnnnnnnnnnnnnnnnnnnnnnnnnnnnnnnnnnnnnnnnnnnnnnnnnnnnnnnnnnnnnnnnnnnnnnnnnnnnnnnnnnnnnnnnnnnnnnnnnnnnnnnnnnnnnnnnnnnnnnnnnnnnnnnnnnnnnnnnnnnnnnnnnnnnnnnnnnnnnnnnnnnnnnnnnnnnnnnnnnnnnnnnnnnnnnnnnnnnnnnnnnnnnnnnnnnnnnnnnnnnnnnnnnnnnnnnnnnnnnnnnnnnnnnnnnnnnnnnnnnnnnnnnnnnnnnnnnnnnnnnnnnnnnnnnnnnnnnnnnnnnnnnnnnnnnnnnnnnnnnnnnnnnnnnnnnnnnnnnnnnnnnnnnnnnnnnnnnnnnnnnnnnnnnnnnnnnnnnnnnnnnnnnnnnnnnnnnnnnnnnnnnnnnnnnnnnnnnnnnnnnnnnnnnnnnnnnnnnnnnnnnnnnnnnnnnnnnnnnnnnnnnnnnnnnnnnnnnnnnnnnnnnnnnnnnnnnnnnnnnnnnnnnnnnnnnnnnnnnnnnnnnnnnnnnnnnnnnnnnnnnnnnnnnnnnnnnnnnnnnnnnnnnnnnnnnnnnnnnnnnnnnnnnnnnnnnnnnnnnnnnnnnnnnnnnnnnnnnnnnnnnnnnnnnnnnnnnnnnnnnnnnnnnnnnnnnnnnnnnnnnnnnnnnnnnnnnnnnnnnnnnnnnnnnnnnnnnnnnnnnnnnnnnnnnnnnnnnnnnnnnnnnnnnnnnnnnnnnnnnnnnnnnnnnnnnnnnnnnnnnnnnnnnnnnnnnnnnnnnnnnnnnnnnnnnnnnnnnnnnnnnnnnnnnnnnnnnnnnnnnnnnnnnnnnnnnnnnnnnnnnnnnnnnnnnnnnnnnnnnnnnnnnnnnnnnnnnnnnnnnnnnnnnnnnnnnnnnnnnnnnnnnnnnnnnnnnnnnnnnnnnnnnnnnnnnnnnnnnnnnnnnnnnnnnnnnnnnnnnnnnnnnnnnnnnnnnnnnnnnnnnnnnnnnnnnnnnnnnnnnnnnnnnnnnnnnnnnnnnnnnnnnnnnnnnnnnnnnnnnnnnnnnnnnnnnnnnnnnnnnnnnnnnnnnnnnnnnnnnnnnnnnnnnnnnnnnnnnnnnnnnnnnnnnnnnnnnnnnnnnnnnnnnnnnnnnnnnnnnnnnnnnnnnnnnnnnnnnnnnnnnnnnnnnnnnnnnnnnnnnnnnnnnnnnnnnnnnnnnnnnnnnnnnnnnnnnnnnnnnnnnnnnnnnnnnnnnnnnnnnnnnnnnnnnnnnnnnnnnnnnnnnnnnnnnnnnnnnnnnnnnnnnnnnnnnnnnnnnnnnnnnnnnnnnnnnnnnnnnnnnnnnnnnnnnnnnnnnnnnnnnnnnnnnnnnnnnnnnnnnnnnnnnnnnnnnnnnnnnnnnnnnnnnnnnnnnnnnnnnnnnnnnnnnnnnnnnnnnnnnnnnnnnnnnnnnnnnnnnnnnnnnnnnnnnnnnnnnnnnnnnnnnnnnnnnnnnnnnnnnnnnnnnnnnnnnnnnnnnnnnnnnnnnnnnnnnnnnnnnnnnnnnnnnnnnnnnnnnnnnnnnnnnnnnnnnnnnnnnnnnnnnnnnnnnnnnnnnnnnnnnnnnnnnnnnnnnnnnnnnnnnnnnnnnnnnnnnnnnnnnnnnnnnnnnnnnnnnnnnnnnnnnnnnnnnnnnnnnnnnnnnnnnnnnnnnnnnnnnnnnnnnnnnnnnnnnnnnnnnnnnnnnnnnnnnnnnnnnnnnnnnnnnnnnnnnnnnnnnnnnnnnnnnnnnnnnnnnnnnnnnnnnnnnnnnnnnnnnnnnnnnnnnnnnnnnnnnnnnnnnnnnnnnnnnnnnnnnnnnnnnnnnnnnnnnnnnnnnnnnnnnnnnnnnnnnnnnnnnnnnnnnnnnnnnnnnnnnnnnnnnnnnnnnnnnnnnnnnnnnnnnnnnnnnnnnnnnnnnnnnnnnnnnnnnnnnnnnnnnnnnnnnnnnnnnnnnnnnnnnnnnnnnnnnnnnnnnnnnnnnnnnnnnnnnnnnnnnnnnnnnnnnnnnnnnnnnnnnnnnnnnnnnnnnnnnnnnnnnnnnnnnnnnnnnnnnnnnnnnnnnnnnnnnnnnnnnnnnnnnnnnnnnnnnnnnnnnnnnnnnnnnnnnnnnnnnnnnnnnnnnnnnnnnnnnnnnnnnnnnnnnnnnnnnnnnnnnnnnnnnnnnnnnnnnnnnnnnnnnnnnnnnnnnnnnnnnnnnnnnnnnnnnnnnnnnnnnnnnnnnnnnnnnnnnnnnnnnnnnnnnnnnnnnnnnnnnnnnnnnnnnnnnnnnnnnnnnnnnnnnnnnnnnnnnnnnnnnnnnnnnnnnnnnnnnnnnnnnnnnnnnnnnnnnnnnnnnnnnnnnnnnnnnnnnnnnnnnnnnnnnnnnnnnnnnnnnnnnnnnnnnnnnnnnnnnnnnnnnnnnnnnnnnnnnnnnnnnnnnnnnnnnnnnnnnnnnnnnnnnnnnnnnnnnnnnnnnnnnnnnnnnnnnnnnnnnnnnnnnnnnnnnnnnnnnnnnnnnnnnnnnnnnnnnnnnnnnnnnnnnnnnnnnnnnnnnnnnnnnnnnnnnnnnnnnnnnnnnnnnnnnnnnnnnnnnnnnnnnnnnnnnnnnnnnnnnnnnnnnnnnnnnnnnnnnnnnnnnnnnnnnnnnnnnnnnnnnnnnnnnnnnnnnnnnnnnnnnnnnnnnnnnnnnnnnnnnnnnnnnnnnnnnnnnnnnnnnnnnnnnnnnnnnnnnnnnnnnnnnnnnnnnnnnnnnnnnnnnnnnnnnnnnnnnnnnnnnnnnnnnnnnnnnnnnnnnnnnnnnnnnnnnnnnnnnnnnnnnnnnnnnnnnnnnnnnnnnnnnnnnnnnnnnnnnnnnnnnnnnnnnnnnnnnnnnnnnnnnnnnnnnnnnnnnnnnnnnnnnnnnnnnnnnnnnnnnnnnnnnnnnnnnnnnnnnnnnnnnnnnnnnnnnnnnnnnnnnnnnnnnnnnnnnnnnnnnnnnnnnnnnnnnnnnnnnnnnnnnnnnnnnnnnnnnnnnnnnnnnnnnnnnnnnnnnnnnnnnnnnnnnnnnnnnnnnnnnnnnnnnnnnnnnnnnnnnnnnnnnnnnnnnnnnnnnnnnnnnnnnnnnnnnnnnnnnnnnnnnnnnnnnnnnnnnnnnnnnnnnnnnnnnnnnnnnnnnnnnnnnnnnnnnnnnnnnnnnnnnnnnnnnnnnnnnnnnnnnnnnnnnnnnnnnnnnnnnnnnnnnnnnnnnnnnnnnnnnnnnnnnnnnnnnnnnnnnnnnnnnnnnnnnnnnnnnnnnnnnnnnnnnnnnnnnnnnnnnnnnnnnnnnnnnnnnnnnnnnnnnnnnnnnnnnnnnnnnnnnnnnnnnnnnnnnnnnnnnnnnnnnnnnnnnnnnnnnnnnnnnnnnnnnnnnnnnnnnnnnnnnnnnnnnnnnnnnnnnnnnnnnnnnnnnnnnnnnnnnnnnnnnnnnnnnnnnnnnnnnnnnnnnnnnnnnnnnnnnnnnnnnnnnnnnnnnnnnnnnnnnnnnnnnnnnnnnnnnnnnnnnnnnnnnnnnnnnnnnnnnnnnnnnnnnnnnnnnnnnnnnnnnnnnnnnnnnnnnnnnnnnnnnnnnnnnnnnnnnnnnnnnnnnnnnnnnnnnnnnnnnnnnnnnnnnnnnnnnnnnnnnnnnnnnnnnnnnnnnnnnnnnnnnnnnnnnnnnnnnnnnnnnnnnnnnnnnnnnnnnnnnnnnnnnnnnnnnnnnnnnnnnnnnnnnnnnnnnnnnnnnnnnnnnnnnnnnnnnnnnnnnnnnnnnnnnnnnnnnnnnnnnnnnnnnnnnnnnnnnnnnnnnnnnnnnnnnnnnnnnnnnnnnnnnnnnnnnnnnnnnnnnnnnnnnnnnnnnnnnnnnnnnnnnnnnnnnnnnnnnnnnnnnnnnnnnnnnnnnnnnnnnnnnnnnnnnnnnnnnnnnnnnnnnnnnnnnnnnnnnnnnnnnnnnnnnnnnnnnnnnnnnnnnnnnnnnnnnnnnnnnnnnnnnnnnnnnnnnnnnnnnnnnnnnnnnnnnnnnnnnnnnnnnnnnnnnnnnnnnnnnnnnnnnnnnnnnnnnnnnnnnnnnnnnnnnnnnnnnnnnnnnnnnnnnnnnnnnnnnnnnnnnnnnnnnnnnnnnnnnnnnnnnnnnnnnnnnnnnnnnnnnnnnnnnnnnnnnnnnnnnnnnnnnnnnnnnnnnnnnnnnnnnnnnnnnnnnnnnnnnnnnnnnnnnnnnnnnnnnnnnnnnnnnnnnnnnnnnnnnnnnnnnnnnnnnnnnnnnnnnnnnnnnnnnnnnnnnnnnnnnnnnnnnnnnnnnnnnnnnnnnnnnnnnnnnnnnnnnnnnnnnnnnnnnnnnnnnnnnnnnnnnnnnnnnnnnnnnnnnnnnnnnnnnnnnnnnnnnnnnnnnnnnnnnnnnnnnnnnnnnnnnnnnnnnnnnnnnnnnnnnnnnnnnnnnnnnnnnnnnnnnnnnnnnnnnnnnnnnnnnnnnnnnnnnnnnnnnnnnnnnnnnnnnnnnnnnnnnnnnnnnnnnnnnnnnnnnnnnnnnnnnnnnnnnnnnnnnnnnnnnnnnnnnnnnnnnnnnnnnnnnnnnnnnnnnnnnnnnnnnnnnnnnnnnnnnnnnnnnnnnnnnnnnnnnnnnnnnnnnnnnnnnnnnnnnnnnnnnnnnnnnnnnnnnnnnnnnnnnnnnnnnnnnnnnnnnnnnnnnnnnnnnnnnnnnnnnnnnnnnnnnnnnnnnnnnnnnnnnnnnnnnnnnnnnnnnnnnnnnnnnnnnnnnnnnnnnnnnnnnnnnnnnnnnnnnnnnnnnnnnnnnnnnnnnnnnnnnnnnnnnnnnnnnnnnnnnnnnnnnnnnnnnnnnnnnnnnnnnnnnnnnnnnnnnnnnnnnnnnnnnnnnnnnnnnnnnnnnnnnnnnnnnnnnnnnnnnnnnnnnnnnnnnnnnnnnnnnnnnnnnnnnnnnnnnnnnnnnnnnnnnnnnnnnnnnnnnnnnnnnnnnnnnnnnnnnnnnnnnnnnnnnnnnnnnnnnnnnnnnnnnnnnnnnnnnnnnnnnnnnnnnnnnnnnnnnnnnnnnnnnnnnnnnnnnnnnnnnnnnnnnnnnnnnnnnnnnnnnnnnnnnnnnnnnnnnnnnnnnnnnnnnnnnnnnnnnnnnnnnnnnnnnnnnnnnnnnnnnnnnnnnnnnnnnnnnnnnnnnnnnnnnnnnnnnnnnnnnnnnnnnnnnnnnnnnnnnnnnnnnnnnnnnnnnnnnnnnnnnnnnnnnnnnnnnnnnnnnnnnnnnnnnnnnnnnnnnnnnnnnnnnnnnnnnnnnnnnnnnnnnnnnnnnnnnnnnnnnnnnnnnnnnnnnnnnnnnnnnnnnnnnnnnnnnnnnnnnnnnnnnnnnnnnnnnnnnnnnnnnnnnnnnnnnnnnnnnnnnnnnnnnnnnnnnnnnnnnnnnnnnnnnnnnnnnnnnnnnnnnnnnnnnnnnnnnnnnnnnnnnnnnnnnnnnnnnnnnnnnnnnnnnnnnnnnnnnnnnnnnnnnnnnnnnnnnnnnnnnnnnnnnnnnnnnnnnnnnnnnnnnnnnnnnnnnnnnnnnnnnnnnnnnnnnnnnnnnnnnnnnnnnnnnnnnnnnnnnnnnnnnnnnnnnnnnnnnnnnnnnnnnnnnnnnnnnnnnnnnnnnnnnnnnnnnnnnnnnnnnnnnnnnnnnnnnnnnnnnnnnnnnnnnnnnnnnnnnnnnnnnnnnnnnnnnnnnnnnnnnnnnnnnnnnnnnnnnnnnnnnnnnnnnnnnnnnnnnnnnnnnnnnnnnnnnnnnnnnnnnnnnnnnnnnnnnnnnnnnnnnnnnnnnnnnnnnnnnnnnnnnnnnnnnnnnnnnnnnnnnnnnnnnnnnnnnnnnnnnnnnnnnnnnnnnnnnnnnnnnnnnnnnnnnnnnnnnnnnnnnnnnnnnnnnnnnnnnnnnnnnnnnnnnnnnnnnnnnnnnnnnnnnnnnnnnnnnnnnnnnnnnnnnnnnnnnnnnnnnnnnnnnnnnnnnnnnnnnnnnnnnnnnnnnnnnnnnnnnnnnnnnnnnnnnnnnnnnnnnnnnnnnnnnnnnnnnnnnnnnnnnnnnnnnnnnnnnnnnnnnnnnnnnnnnnnnnnnnnnnnnnnnnnnnnnnnnnnnnnnnnnnnnnnnnnnnnnnnnnnnnnnnnnnnnnnnnnnnnnnnnnnnnnnnnnnnnnnnnnnnnnnnnnnnnnnnnnnnnnnnnnnnnnnnnnnnnnnnnnnnnnnnnnnnnnnnnnnnnnnnnnnnnnnnnnnnnnnnnnnnnnnnnnnnnnnnnnnnnnnnnnnnnnnnnnnnnnnnnnnnnnnnnnnnnnnnnnnnnnnnnnnnnnnnnnnnnnnnnnnnnnnnnnnnnnnnnnnnnnnnnnnnnnnnnnnnnnnnnnnnnnnnnnnnnnnnnnnnnnnnnnnnnnnnnnnnnnnnnnnnnnnnnnnnnnnnnnnnnnnnnnnnnnnnnnnnnnnnnnnnnnnnnnnnnnnnnnnnnnnnnnnnnnnnnnnnnnnnnnnnnnnnnnnnnnnnnnnnnnnnnnnnnnnnnnnnnnnnnnnnnnnnnnnnnnnnnnnnnnnnnnnnnnnnnnnnnnnnnnnnnnnnnnnnnnnnnnnnnnnnnnnnnnnnnnnnnnnnnnnnnnnnnnnnnnnnnnnnnnnnnnnnnnnnnnnnnnnnnnnnnnnnnnnnnnnnnnnnnnnnnnnnnnnnnnnnnnnnnnnnnnnnnnnnnnnnnnnnnnnnnnnnnnnnnnnnnnnnnnnnnnnnnnnnnnnnnnnnnnnnnnnnnnnnnnnnnnnnnnnnnnnnnnnnnnnnnnnnnnnnnnnnnnnnnnnnnnnnnnnnnnnnnnnnnnnnnnnnnnnnnnnnnnnnnnnnnnnnnnnnnnnnnnnnnnnnnnnnnnnnnnnnnnnnnnnnnnnnnnnnnnnnnnnnnnnnnnnnnnnnnnnnnnnnnnnnnnnnnnnnnnnnnnnnnnnnnnnnnnnnnnnnnnnnnnnnnnnnnnnnnnnnnnnnnnnnnnnnnnnnnnnnnnnnnnnnnnnnnnnnnnnnnnnnnnnnnnnnnnnnnnnnnnnnnnnnnnnnnnnnnnnnnnnnnnnnnnnnnnnnnnnnnnnnnnnnnnnnnnnnnnnnnnnnnnnnnnnnnnnnnnnnnnnnnnnnnnnnnnnnnnnnnnnnnnnnnnnnnnnnnnnnnnnnnnnnnnnnnnnnnnnnnnnnnnnnnnnnnnnnnnnnnnnnnnnnnnnnnnnnnnnnnnnnnnnnnnnnnnnnnnnnnnnnnnnnnnnnnnnnnnnnnnnnnnnnnnnnnnnnnnnnnnnnnnnnnnnnnnnnnnnnnnnnnnnnnnnnnnnnnnnnnnnnnnnggccatgcccgacaccggtgtcattgaggggcaggtacggcaggcggtcattttgtcagccctgaaggcgggattgcccctcttgatcctcgcgattggcaagagccccatgtatgcgcgcgatctctttgtgacctatgacccacgcgcaacgcgctattgcagcgatggcggtttgcgtaccgttgattcaaccctggagaaatggtggacaccttaatcagcaagcccatccagctgcgcggttatgcgctgcaccgcttggttgcgcaacatcaaaacggtgcgcctgcgctttggcgtgacgagggtgacaccgtgcgaattcgcgcgcgtgacgcctgtccgcccacctacgccacggggcaactgttgggctttgtcacattggcgtgtgtgtcgtttggtagcaaacaccggtacctgccggtcgccgattggcgtggtcgcaaagcgtggctggaggcacagggcatcaaacacggttgcgaggtggttggggtgcacgcccagggtggcatgcaaaccgtgaccacccatgacggtcgccacttcaccattgatgccacgcaattcacgggcttgctgcgcgtcacccaacctgcgccattcaacgactgtctgctcaacggcatcggcaaagtcggtaaagcctttggcctcaacttactcgtcgttcattaacccaacgcttatccggagttcaccaccatgcaagacgttcgcatcgatatcgccatcaacacgattcagcccatcaccttcacccatcacggcatcgacgggttgcccaccatggttcgcggcgttgacatggagggtcatcccctgcgcaccgtttacattccagccgcgcagtttcgcggtcggctaaggcatgaggcggcgttggcaaaaatgcgtaccgcacaccgccccgtcaagttggcggaagcctacatgctggccttggggcaaaacatcgacaccaaagaagacgaggctgatgagaaagtgcggttgggcgagctactcgctttacgggcggccaaccccttcattgatctcttcggaacgtggcgcatgggcagccggctttacgtgtcgcacctgatgcctgtcgtcaacgtcaagcccgacacctttcaccacatccgccgcgatctagacaccaacgacgcgttgtttgccgagttacccgacgccgaaatcgacgccttttacgaaaggcaagacggacagtcgcaagcctctcaagcggagagtctgattaaggtggccacccgcgaactggggaaagccaaaaaagaaaacgaccttgccaaatgcgacgagttcgaagccaagatcgaagaactcaaagccctcaagaaggcgcacaaagccggtgacgaatcgggcaataccaaacacttggtggcgatggaggccgtccctgcgggaactcaattgttgtgcaaactcatcataaagcgggccacgccgctcgacctcagcatgctcacgggtgcgcttaacgcgatcagcgaattccccatgatgggtgcccagcgggcccgtggttgcggcgaggtgagtggcacggcaaccgtctgtcacacccaaggtgaggtgttggcgcaaatcgccttcggtggttttttgccagctgtactggagtggaccgatgcgggcaccgcctttatgactggctccgaaacggttgccgtcgccgcgtgaaaggcccttaccgcagcccacagcaggcgcaatacgccaagctcatcgagcgcgctgtcagcaaacccggtgcgcccctgttggcgggtgccgcgcccgggctcggcaagacacacggctacgccatcccgttgttgtgcagcggcaaaaaagttgccatcgccatgagcacgcgccaactgatcgatcaattcatggcgagcgatgcactcgccgctgcgcaagctgcacttgaggccgaggggcggcccgctgccaccgttgtcgccttgcaaccgcgccgtcaatttgaaacggcggtggcctaccgcgcgcacaaaactgcggcgcttgatgccgacgtcttggtgctcacacacatgggcgtgctcatcgatacccacatcccggcctacgcccagctgcgtcagcgcgctgtcttgttgtttgacgaagccgatcttttggccgatgccgccgacttgcgcagcacctatcgcattgaggctgaggccttagcccgcgcaggcgttgaaaacgccacaccgccaaaggcggttgacaccatcattaaaaaatccgatgaccccgaggaaaaagcagtcgccaccgccatccagcgcgctttggcaaagccggcttggtacaaagtgatcggtaaagaagacaacggcgatttggtgctgacccaccgcatgccggggcgcatgttgcgcaccctcatcaatgacatgccgcggtgcattttcaccagtggcaccctcacggtatcggggcgttttgaccactttgtcaaagccatcggcctgaacgcagtggcacccgaaagccagcacattgaccccgtgcaacacggccaactgcgcgttgaggtggccagtgaggccctcaccccagaagcacaagccgaacgcatcatgcacgcggcgacaccggtattggtgctgaccaccagccacgcgaccacggcggcgttgggcgccttgtgccccggtgccacctgccgcgcacccggtgaagccctcatggatgcggtggcgcgatgccctgatgatggcatcttgatcgccgctggcgcctggtctggcctcgatgcgccgcgcctgcggtggcaaaccgtggtcatccccaaaacaccgtacggcaaaccactcatccttgacgcccagcagataagcgcttacgtggacagcaaggttgttgccatcaggcgcaccaaccaagggttacaccgtgggctgcgcaccaccgatgccacctgcaccttgctgttactcgatccggatagccgtcgtgccgatttacgtcaagccattccccgtcgtttcttggtggattgggacagcgtggccgagggctcgttggttttgcgcacgcacttcgcccgtgaacgaaaaaaaggtctgcgtgaaaaaaccctgagccggcgcgggcagcactgcgaacaccccggctgtacggccacccaagagcatttgctggaggtgcatcacctcaacccgattgccaacggcccccgcgacacagttattgatgacctgcgggtgctttgtaaaaatcaccacgcggatgcccaccaagccatgcgaaaagctgatcttttaaaagtgaaaacaactgaaaagcgtgcagaaacagacacttaggccacagctggtcaagctacgccgtaaatgcgtagttactggaaccacggtccagtctgtagctggcaaaccggcggtcaagctacgcc

SEQ ID NO: 242 - DNA, 11717 bp, Artificial Sequence; identical to SEQ ID NO: 241
  Synthetic Oligonucleotide
  misc_feature (1)..(8305): n is a, c, g, or t

SEQ ID NO: 243 - DNA, 11716 bp, Artificial Sequence
  Synthetic Oligonucleotide
  misc_feature (1)..(6297): n is a, c, g, or t
nnnnnnnnnnnnnnnnnnnnnnnnnnnnnnnnnnnnnnnnnnnnnnnnnnnnnnnnnnnnnnnnnnnnnnnnnnnnnnnnnnnnnnnnnnnnnnnnnnnnnnnnnnnnnnnnnnnnnnnnnnnnnnnnnnnnnnnnnnnnnnnnnnnnnnnnnnnnnnnnnnnnnnnnnnnnnnnnnnnnnnnnnnnnnnnnnnnnnnnnnnnnnnnnnnnnnnnnnnnnnnnnnnnnnnnnnnnnnnnnnnnnnnnnnnnnnnnnnnnnnnnnnnnnnnnnnnnnnnnnnnnnnnnnnnnnnnnnnnnnnnnnnnnnnnnnnnnnnnnnnnnnnnnnnnnnnnnnnnnnnnnnnnnnnnnnnnnnnnnnnnnnnnnnnnnnnnnnnnnnnnnnnnnnnnnnnnnnnnnnnnnnnnnnnnnnnnnnnnnnnnnnnnnnnnnnnnnnnnnnnnnnnnnnnnnnnnnnnnnnnnnnnnnnnnnnnnnnnnnnnnnnnnnnnnnnnnnnnnnnnnnnnnnnnnnnnnnnnnnnnnnnnnnnnnnnnnnnnnnnnnnnnnnnnnnnnnnnnnnnnnnnnnnnnnnnnnnnnnnnnnnnnnnnnnnnnnnnnnnnnnnnnnnnnnnnnnnnnnnnnnnnnnnnnnnnnnnnnnnnnnnnnnnnnnnnnnnnnnnnnnnnnnnnnnnnnnnnnnnnnnnnnnnnnnnnnnnnnnnnnnnnnnnnnnnnnnnnnnnnnnnnnnnnnnnnnnnnnnnnnnnnnnnnnnnnnnnnnnnnnnnnnnnnnnnnnnnnnnnnnnnnnnnnnnnnnnnnnnnnnnnnnnnnnnnnnnnnnnnnnnnnnnnnnnnnnnnnnnnnnnnnnnnnnnnnnnnnnnnnnnnnnnnnnnnnnnnnnnnnnnnnnnnnnnnnnnnnnnnnnnnnnnnnnnnnnnnnnnnnnnnnnnnnnnnnnnnnnnnnnnnnnnnnnnnnnnnnnnnnnnnnnnnnnnnnnnnnnnnnnnnnnnnnnnnnnnnnnnnnnnnnnnnnnnnnnnnnnnnnnnnnnnnnnnnnnnnnnnnnnnnnnnnnnnnnnnnnnnnnnnnnnnnnnnnnnnnnnnnnnnnnnnnnnnnnnnnnnnnnnnnnnnnnnnnnnnnnnnnnnnnnnnnnnnnnnnnnnnnnnnnnnnnnnnnnnnnnnnnnnnnnnnnnnnnnnnnnnnnnnnnnnnnnnnnnnnnnnnnnnnnnnnnnnnnnnnnnnnnnnnnnnnnnnnnnnnnnnnnnnnnnnnnnnnnnnnnnnnnnnnnnnnnnnnnnnnnnnnnnnnnnnnnnnnnnnnnnnnnnnnnnnnnnnnnnnnnnnnnnnnnnnnnnnnnnnnnnnnnnnnnnnnnnnnnnnnnnnnnnnnnnnnnnnnnnnnnnnnnnnnnnnnnnnnnnnnnnnnnnnnnnnnnnnnnnnnnnnnnnnnnnnnnnnnnnnnnnnnnnnnnnnnnnnnnnnnnnnnnnnnnnnnnnnnnnnnnnnnnnnnnnnnnnnnnnnnnnnnnnnnnnnnnnnnnnnnnnnnnnnnnnnnnnnnnnnnnnnnnnnnnnnnnnnnnnnnnnnnnnnnnnnnnnnnnnnnnnnnnnnnnnnnnnnnnnnnnnnnnnnnnnnnnnnnnnnnnnnnnnnnnnnnnnnnnnnnnnnnnnnnnnnnnnnnnnnnnnnnnnnnnnnnnnnnnnnnnnnnnnnnnnnnnnnnnnnnnnnnnnnnnnnnnnnnnnnnnnnnnnnnnnnnnnnnnnnnnnnnnnnnnnnnnnnnnnnnnnnnnnnnnnnnnnnnnnnnnnnnnnnnnnnnnnnnnnnnnnnnnnnnnnnnnnnnnnnnnnnnnnnnnnnnnnnnnnnnnnnnnnnnnnnnnnnnnnnnnnnnnnnnnnnnnnnnnnnnnnnnnnnnnnnnnnnnnnnnnnnnnnnnnnnnnnnnnnnnnnnnnnnnnnnnnnnnnnnnnnnnnnnnnnnnnnnnnnnnnnnnnnnnnnnnnnnnnnnnnnnnnnnnnnnnnnnnnnnnnnnnnnnnnnnnnnnnnnnnnnnnnnnnnnnnnnnnnnnnnnnnnnnnnnnnnnnnnnnnnnnnnnnnnnnnnnnnnnnnnnnnnnnnnnnnnnnnnnnnnnnnnnnnnnnnnnnnnnnnnnnnnnnnnnnnnnnnnnnnnnnnnnnnnnnnnnnnnnnnnnnnnnnnnnnnnnnnnnnnnnnnnnnnnnnnnnnnnnnnnnnnnnnnnnnnnnnnnnnnnnnnnnnnnnnnnnnnnnnnnnnnnnnnnnnnnnnnnnnnnnnnnnnnnnnnnnnnnnnnnnnnnnnnnnnnnnnnnnnnnnnnnnnnnnnnnnnnnnnnnnnnnnnnnnnnnnnnnnnnnnnnnnnnnnnnnnnnnnnnnnnnnnnnnnnnnnnnnnnnnnnnnnnnnnnnnnnnnnnnnnnnnnnnnnnnnnnnnnnnnnnnnnnnnnnnnnnnnnnnnnnnnnnnnnnnnnnnnnnnnnnnnnnnnnnnnnnnnnnnnnnnnnnnnnnnnnnnnnnnnnnnnnnnnnnnnnnnnnnnnnnnnnnnnnnnnnnnnnnnnnnnnnnnnnnnnnnnnnnnnnnnnnnnnnnnnnnnnnnnnnnnnnnnnnnnnnnnnnnnnnnnnnnnnnnnnnnnnnnnnnnnnnnnnnnnnnnnnnnnnnnnnnnnnnnnnnnnnnnnnnnnnnnnnnnnnnnnnnnnnnnnnnnnnnnnnnnnnnnnnnnnnnnnnnnnnnnnnnnnnnnnnnnnnnnnnnnnnnnnnnnnnnnnnnnnnnnnnnnnnnnnnnnnnnnnnnnnnnnnnnnnnnnnnnnnnnnnnnnnnnnnnnnnnnnnnnnnnnnnnnnnnnnnnnnnnnnnnnnnnnnnnnnnnnnnnnnnnnnnnnnnnnnnnnnnnnnnnnnnnnnnnnnnnnnnnnnnnnnnnnnnnnnnnnnnnnnnnnnnnnnnnnnnnnnnnnnnnnnnnnnnnnnnnnnnnnnnnnnnnnnnnnnnnnnnnnnnnnnnnnnnnnnnnnnnnnnnnnnnnnnnnnnnnnnnnnnnnnnnnnnnnnnnnnnnnnnnnnnnnnnnnnnnnnnnnnnnnnnnnnnnnnnnnnnnnnnnnnnnnnnnnnnnnnnnnnnnnnnnnnnnnnnnnnnnnnnnnnnnnnnnnnnnnnnnnnnnnnnnnnnnnnnnnnnnnnnnnnnnnnnnnnnnnnnnnnnnnnnnnnnnnnnnnnnnnnnnnnnnnnnnnnnnnnnnnnnnnnnnnnnnnnnnnnnnnnnnnnnnnnnnnnnnnnnnnnnnnnnnnnnnnnnnnnnnnnnnnnnnnnnnnnnnnnnnnnnnnnnnnnnnnnnnnnnnnnnnnnnnnnnnnnnnnnnnnnnnnnnnnnnnnnnnnnnnnnnnnnnnnnnnnnnnnnnnnnnnnnnnnnnnnnnnnnnnnnnnnnnnnnnnnnnnnnnnnnnnnnnnnnnnnnnnnnnnnnnnnnnnnnnnnnnnnnnnnnnnnnnnnnnnnnnnnnnnnnnnnnnnnnnnnnnnnnnnnnnnnnnnnnnnnnnnnnnnnnnnnnnnnnnnnnnnnnnnnnnnnnnnnnnnnnnnnnnnnnnnnnnnnnnnnnnnnnnnnnnnnnnnnnnnnnnnnnnnnnnnnnnnnnnnnnnnnnnnnnnnnnnnnnnnnnnnnnnnnnnnnnnnnnnnnnnnnnnnnnnnnnnnnnnnnnnnnnnnnnnnnnnnnnnnnnnnnnnnnnnnnnnnnnnnnnnnnnnnnnnnnnnnnnnnnnnnnnnnnnnnnnnnnnnnnnnnnnnnnnnnnnnnnnnnnnnnnnnnnnnnnnnnnnnnnnnnnnnnnnnnnnnnnnnnnnnnnnnnnnnnnnnnnnnnnnnnnnnnnnnnnnnnnnnnnnnnnnnnnnnnnnnnnnnnnnnnnnnnnnnnnnnnnnnnnnnnnnnnnnnnnnnnnnnnnnnnnnnnnnnnnnnnnnnnnnnnnnnnnnnnnnnnnnnnnnnnnnnnnnnnnnnnnnnnnnnnnnnnnnnnnnnnnnnnnnnnnnnnnnnnnnnnnnnnnnnnnnnnnnnnnnnnnnnnnnnnnnnnnnnnnnnnnnnnnnnnnnnnnnnnnnnnnnnnnnnnnnnnnnnnnnnnnnnnnnnnnnnnnnnnnnnnnnnnnnnnnnnnnnnnnnnnnnnnnnnnnnnnnnnnnnnnnnnnnnnnnnnnnnnnnnnnnnnnnnnnnnnnnnnnnnnnnnnnnnnnnnnnnnnnnnnnnnnnnnnnnnnnnnnnnnnnnnnnnnnnnnnnnnnnnnnnnnnnnnnnnnnnnnnnnnnnnnnnnnnnnnnnnnnnnnnnnnnnnnnnnnnnnnnnnnnnnnnnnnnnnnnnnnnnnnnnnnnnnnnnnnnnnnnnnnnnnnnnnnnnnnnnnnnnnnnnnnnnnnnnnnnnnnnnnnnnnnnnnnnnnnnnnnnnnnnnnnnnnnnnnnnnnnnnnnnnnnnnnnnnnnnnnnnnnnnnnnnnnnnnnnnnnnnnnnnnnnnnnnnnnnnnnnnnnnnnnnnnnnnnnnnnnnnnnnnnnnnnnnnnnnnnnnnnnnnnnnnnnnnnnnnnnnnnnnnnnnnnnnnnnnnnnnnnnnnnnnnnnnnnnnnnnnnnnnnnnnnnnnnnnnnnnnnnnnnnnnnnnnnnnnnnnnnnnnnnnnnnnnnnnnnnnnnnnnnnnnnnnnnnnnnnnnnnnnnnnnnnnnnnnnnnnnnnnnnnnnnnnnnnnnnnnnnnnnnnnnnnnnnnnnnnnnnnnnnnnnnnnnnnnnnnnnnnnnnnnnnnnnnnnnnnnnnnnnnnnnnnnnnnnnnnnnnnnnnnnnnnnnnnnnnnnnnnnnnnnnnnnnnnnnnnnnnnnnnnnnnnnnnnnnnnnnnnnnnnnnnnnnnnnnnnnnnnnnnnnnnnnnnnnnnnnnnnnnnnnnnnnnnnnnnnnnnnnnnnnnnnnnnnnnnnnnnnnnnnnnnnnnnnnnnnnnnnnnnnnnnnnnnnnnnnnnnnnnnnnnnnnnnnnnnnnnnnnnnnnnnnnnnnnnnnnnnnnnnnnnnnnnnnnnnnnnnnnnnnnnnnnnnnnnnnnnnnnnnnnnnnnnnnnnnnnnnnnnnnnnnnnnnnnnnnnnnnnnnnnnnnnnnnnnnnnnnnnnnnnnnnnnnnnnnnnnnnnnnnnnnnnnnnnnnnnnnnnnnnnnnnnnnnnnnnnnnnnnnnnnnnnnnnnnnnnnnnnnnnnnnnnnnnnnnnnnnnnnnnnnnnnnnnnnnnnnnnnnnnnnnnnnnnnnnnnnnnnnnnnnnnnnnnnnnnnnnnnnnnnnnnnnnnnnnnnnnnnnnnnnnnnnnnnnnnnnnnnnnnnnnnnnnnnnnnnnnnnnnnnnnnnnnnnnnnnnnnnnnnnnnnnnnnnnnnnnnnnnnnnnnnnnnnnnnnnnnnnnnnnnnnnnnnnnnnnnnnnnnnnnnnnnnnnnnnnnnnnnnnnnnnnnnnnnnnnnnnnnnnnnnnnnnnnnnnnnnnnnnnnnnnnnnnnnnnnnnnnnnnnnnnnnnnnnnnnnnnnnnnnnnnnnnnnnnnnnnnnnnnnnnnnnnnnnnnnnnnnnnnnnnnnnnnnnnnnnnnnnnnnnnnnnnnnnnnnnnnnnnnnnnnnnnnnnnnnnnnnnnnnnnnnnnnnnnnnnnnnnnnnnnnnnnnnnnnnnnnnnnnnnnnnnnnnnnnnnnnnnnnnnnnnnnnnnnnnnnnnnnnnnnnnnnnnnnnnnnnnnnnnnnnnnnnnnnnnnnnnnnnnnnnnnnnnnnnnnnnnnnnnnnnnnnnnnnnnnnnnnnnnnnnnnnnnnnnnnnnnnnnnnnnnnnnnnnnnnnnnnnnnnnnnnnnnnnnnnnnnnnnnnnnnnnnnnnnnnnnnnnnnnnnnnnnnnnnnnnnnnnnnnnnnnnnnnnnnnnnnnnnnnnnnnnnnnnnnnnnnnnnnnnnnnnnnnnnnnnnnnnnnnnnnnnnnnnnnnnnnnnnnnnnnnnnnnnnnnnnnnnnnnnnnnnnnnnnnnnnnnnnnnnnnnnnnnnnnnnnnnnnnnnnnnnnnnnnnnnnnnnnnnnnnnnnnnnnnnnnnnnnnnnnnnnnnnnnnnnnnnnnnnnnnnnnnnnnnnnnnnnnnnnnnnnnnnnnnnnnnnnnnnnnnnnnnnnnnnnnnnnnnnnnnnnnnnnnnnnnnnnnnnnnnnnnnnnnnnnnnnnnnnnnnnnnnnnnnnnnnnnnnnnnnnnnnnnnnnnnnnnnnnnnnnnnnnnnnnnnnnnnnnnnnnnnnnnnnnnnnnnnnnnnnnnnnnnnnnnnnnnnnnnnnnnnnnnnnnnnnnnnnnnnnnnnnnnnnnnnnnnnnnnccattgcctgatcttcaccgcgcaatacaacaagcgcgcggcgcgtttcctgaaacggcatcccgaactcgaaaagcagtacctcaaaacactgcaactgctggaactcaatccccatcacccatccctgcgcctgcatcctttgagtggcaaactgcaagccctgcattccgtctcgatcaacctctcctaccgcattacgctggagctgctgatccaggacgagcagatcatcccggtaaacgtgggcgaccacgacgcggtgtattgaggatcgttgcaacgcgtttccggcgagcaataccatttcgccacgctgaccggcaatccgccttttccgtcaatgcccaacgcatagcagagtaaaatcctcacggacaaccagaaaacggagggcgaatggacaagctaaaaataaccgcgcatcttctcgcgccgctcgttaccggcggcggctacatgacgctcgacggcctgctggcggcacttctgttcgaccggcttcatgacgtcgacgctgcccatgcggcaattcctgtccgtcagaccgctggcctgctgcacgccagcgcggcaatcatggagccgattcgcgagcgggtctccttcatcgccgcgcttcggcccacgcacagcatcgaccccgaccacgttcagaagaacaagcacgggcagttgcaccgcaagttcgacacctcgttgaccaatgtcatgaacagctacgccatgctgaccgccccgaccgtcacctggtacgccgaaggcgacgccgaccgcatcggccagttgcttgcaccggtgcaattcatcggcaaacggcgcgccgccgggtttggtcgcgttgcgcaatggcagatcgaaccggacgacctcgacggcatcgaaggcaccttcggcgagccgctgcgcccagtgccggtcgacatgttcaagggcgacaaaacccaccccatcgtcgacgccgcctggcgcccggcctactggaacccgatacacagaacggcgtgttacgcgccaacctgaggaacaacggtgctcgctttcttcaacgacaatttcggccgccatctggtcgaacaaaccgacgatccggtcgccgatgcccggcgcgccctgtcatcggggcaccggatgaaaaagggtggcggcccgcagcgcatcgcatccggctgggccatcattcgccccgcaaaatccaccatgcaatttgaactcgcggcggatggcatcgaatacagcaagcagacacgctacgaagcatttctggccgaactggaaaactgggatggcacgccgcgcatgttcatcgaattcgccaaacgccccgttccggtcggcaatctgttccgcaccttcgatctgcgccaagtgcgcatctgctcgcccagtggcgtcgagacattcgatttcaccaaggcgccggaaaaagacgggtgcaagacacacaaggttctatggaaactcaaaaagggggaaaagtgacggacttcgtactccaaaagccaccgaccgtccgtggctacgccctgcaccgcatggctgccggactggccggtggcgacccggtactgtttgccgattgcggcgaccacttgcggttgcgtaccgacaaaccactggcggtggatcggcagccgctgcgcagcgtcagccccggcgacatcgtcggtttcgagctgcgcgcctgtgtcggcaagaagatcaagggcaaacatcgctactttccgaccgccgactggcgcagccggcaccaatggctggcgcggcagggcgagctgcacggattcaccatcgttaccgtgcattgcaccgccgcgatgctggccatcaaggcgggcgaacgacaattcaccgtcgaccagaccgatttcaccggcgttctcaaagtcaccgacgttgaacgcttcaaccaagccgtcgccaatggcatcggcaacaaggccagggctttcggctttggcatgctgctcatttaacgaggtacgccgccgtgaaaaccatcgtcatcaacgcccgcatcgccaccgttgccccgctctccatcaccctgccggtggccgaaggccagcttggcaacaagttcaacaacttccccatcgtcacccgtggccttgacgacgatggcaacaagttgcagaccggctacctgccggccaccacgctgcgcggatttctccgtcgcgccatcgtcaccgaccagatgatgcaggcagcggcggcaggcaaacactacaccctgcaaaaagcctatgccgacctgatcgggcaggatgcggcatcggaatcgaaagacgacatcgacctgctgaaactgcgccagacccgcgaggaaaatgccgtgcttgacctcttcggttccgggctgggcatcaagtcgcgcctgctggtgtcgcacttcatgccgacccacaacgtcctgcccgaagtcatgaccggcgtccgcaaagacctggaagacaccgacgacgtactggacatgctctcgccggccgaccgcgacctttatctcggccgcgccgaagccaacagccggcgcgccgccgcccagaccgtggtcaaaggcctggaaggcaagattcgccgggcacgaaaggccggcgaggaagttggcgaactggagcaagccctgacggaagcacaggcggtggtcgcccgccacgaatccgagatgggcgacatgaccaattcgtcgcgcaccctgaccaattacttcgccctgcctgccgggatcgaactgagcgggcgcctggtcatcgaaaacgcccgcgagcgcgacctgccgatgctggaactggcgctggacgcgctgtcgaagcggccgatactcggcgcgcaaagcgcccgtggttgcggcgaaatcgaaggcatgttcgatgttgcggtcgacggcgttttaacccggaaaatcaaaatcggcggctggcaagcggcgacggttacggacttttcagcggcggcaatggcaaaaactgctgtctgagcagtgggttgcggatagtgagatcaagctacctcgctgttgggtggttactggaactcagcccagcgaaggccttgcgcatctcgggatcaagctacctcgctgttgggtggttactggaacccgcgcgcagatcgacctgaccccaatgtcgatcaagctacctcgctgttgggtggttactggaacttctcggatcgggcaatgattcgatggacggatcaagctacctcgctgttgggtggttactggaactagttctcgacgatgcgctgcgcattggttgatcaagctacctcgctgttgggtggttactggaactgcaccaccatcctcgacttctacaaggtggatcaagccacctcgctgttgtgtggttactggaactaggcgcgcatataggtattgaccagctccgatcaagccaccccgctgttgggtggttactggaacagtcgaccgcgacaggtgtcgtaacggcgaagtcaagccacccggagggtgggtggttcctggaacttgcaatagccgaagccttccagcacggcggaccaagccaccccgttgttgggtggttactggaacaaaaatgcctcaaaatagccgtcagccgccaatcaagccacctgctgttgggtggttactagaacgagtatcacgagaatttcatcgatagcgaagatcaagccaccccgccgtggctactacaaaaagcaaatgtcatgtttcgctcaaccgagcaatcgacttacgcagccattgtcgccaaacacctggctatcgccgatgcgccgctgttactggaaggcgggacgggcatcggcaagacgcgggcgtatctttcggcgctcttccaatccggacggcgggttgccgttgtcctgccgacgcaccagttgatcgatcaattgctggattccggcgatctggcggcaacgcgcgacgcggctacggtggccgcgttccggcccgcgcggatgttcgagcggcgcgccgactatgaagcaggcaaacgcgccgccgacgccgcacaagtcatgttgtgcacggcggccagtgtcatcatcgaccatcgtctggatggcgaatacaacggctcgacgacccgcgactacctgttgttcgacgaggcggatcagctcccggacatggctgccctgcaaagcgatttcgccatcaccagcgccgaactggccgagttgggcattcgcgtaacgaatgttgccgatgcgctgaatgcgatcctggcgaagaagccacgcagcgtggcaccggaaacccgggcggcggcgcgcgtcattctcgacgccatcgtggaaccggcctggtatcagtccgccggcttgaacgacgatggcgacatcgtactgacgcacaagctgcccggccgcctgttgaagaagatcagcaaccggggcaacgtggcttttgtctcggcgaccctgaccgtcggcggtcgcttcaaggatttcatgaacagcatggccatcgaagcatgcagccacctgtcctgcgccatcgaaccggaacggcacggcgcgctcgatttccacatgatcccgctggcggtcgatacaccggaatggctggcggccatcgtccagacggcgcaggaggcggccaagccggtgctgatcgcaaccccgtcgcacgagctttcgtacctgcttggccaacggctgccggacgccattgtcaggacggccgatgaaaccgccacgcaagccgccatacgtgtgcccgccgggggcatcctgattgcggctggcgcctgggcggggctcgataccgcgctgcgctggcgctcaatcattgtaccaagagtaccgttcggacagccgcaggtgatcgatggcgaggtaacgaccagctatttcgatgcacgcaacacggcgacccgccgcttgcgtcaggtcatcgggcgcggcctgcgcacgcccgatgcggtctgtagcgtttatcttctcgacgcccgagccgagaaactcggtggtttcgttccggcacgcttctcggtcgcatggtcggggcgaacctatccggaaggtgcgcggcaagagttggtgctgtcaaaggcggaacgcgacccggcactacgccgcgcggcgctgaaccactacgggcggaagtgcatggctcccggctgtggtttcgtgccgaaagtcgattcgcagctcgatgttcaccacctcgacccgattgccgaggggcaacgggaaacacgaatcgaggatgtggtggttctgtgtgcgaactgccatcgactggcgcactcgacttactgaaaaccttggaggcctaacgcctttgatcgctggcctgttgcggtcgaccgccaaaaaagggcaaatttgcccgatccggaatcgcgcgacggcgcccagcccattacatccggaaacatttgcgtacacatcggcgtcagtcgcttccatcgtt

SEQ ID NO: 244 - DNA, 11716 bp, Artificial Sequence
  Synthetic Oligonucleotide
  misc_feature (1)..(6321): n is a, c, g, or t
nnnnnnnnnnnnnnnnnnnnnnnnnnnnnnnnnnnnnnnnnnnnnnnnnnnnnnnnnnnnnnnnnnnnnnnnnnnnnnnnnnnnnnnnnnnnnnnnnnnnnnnnnnnnnnnnnnnnnnnnnnnnnnnnnnnnnnnnnnnnnnnnnnnnnnnnnnnnnnnnnnnnnnnnnnnnnnnnnnnnnnnnnnnnnnnnnnnnnnnnnnnnnnnnnnnnnnnnnnnnnnnnnnnnnnnnnnnnnnnnnnnnnnnnnnnnnnnnnnnnnnnnnnnnnnnnnnnnnnnnnnnnnnnnnnnnnnnnnnnnnnnnnnnnnnnnnnnnnnnnnnnnnnnnnnnnnnnnnnnnnnnnnnnnnnnnnnnnnnnnnnnnnnnnnnnnnnnnnnnnnnnnnnnnnnnnnnnnnnnnnnnnnnnnnnnnnnnnnnnnnnnnnnnnnnnnnnnnnnnnnnnnnnnnnnnnnnnnnnnnnnnnnnnnnnnnnnnnnnnnnnnnnnnnnnnnnnnnnnnnnnnnnnnnnnnnnnnnnnnnnnnnnnnnnnnnnnnnnnnnnnnnnnnnnnnnnnnnnnnnnnnnnnnnnnnnnnnnnnnnnnnnnnnnnnnnnnnnnnnnnnnnnnnnnnnnnnnnnnnnnnnnnnnnnnnnnnnnnnnnnnnnnnnnnnnnnnnnnnnnnnnnnnnnnnnnnnnnnnnnnnnnnnnnnnnnnnnnnnnnnnnnnnnnnnnnnnnnnnnnnnnnnnnnnnnnnnnnnnnnnnnnnnnnnnnnnnnnnnnnnnnnnnnnnnnnnnnnnnnnnnnnnnnnnnnnnnnnnnnnnnnnnnnnnnnnnnnnnnnnnnnnnnnnnnnnnnnnnnnnnnnnnnnnnnnnnnnnnnnnnnnnnnnnnnnnnnnnnnnnnnnnnnnnnnnnnnnnnnnnnnnnnnnnnnnnnnnnnnnnnnnnnnnnnnnnnnnnnnnnnnnnnnnnnnnnnnnnnnnnnnnnnnnnnnnnnnnnnnnnnnnnnnnnnnnnnnnnnnnnnnnnnnnnnnnnnnnnnnnnnnnnnnnnnnnnnnnnnnnnnnnnnnnnnnnnnnnnnnnnnnnnnnnnnnnnnnnnnnnnnnnnnnnnnnnnnnnnnnnnnnnnnnnnnnnnnnnnnnnnnnnnnnnnnnnnnnnnnnnnnnnnnnnnnnnnnnnnnnnnnnnnnnnnnnnnnnnnnnnnnnnnnnnnnnnnnnnnnnnnnnnnnnnnnnnnnnnnnnnnnnnnnnnnnnnnnnnnnnnnnnnnnnnnnnnnnnnnnnnnnnnnnnnnnnnnnnnnnnnnnnnnnnnnnnnnnnnnnnnnnnnnnnnnnnnnnnnnnnnnnnnnnnnnnnnnnnnnnnnnnnnnnnnnnnnnnnnnnnnnnnnnnnnnnnnnnnnnnnnnnnnnnnnnnnnnnnnnnnnnnnnnnnnnnnnnnnnnnnnnnnnnnnnnnnnnnnnnnnnnnnnnnnnnnnnnnnnnnnnnnnnnnnnnnnnnnnnnnnnnnnnnnnnnnnnnnnnnnnnnnnnnnnnnnnnnnnnnnnnnnnnnnnnnnnnnnnnnnnnnnnnnnnnnnnnnnnnnnnnnnnnnnnnnnnnnnnnnnnnnnnnnnnnnnnnnnnnnnnnnnnnnnnnnnnnnnnnnnnnnnnnnnnnnnnnnnnnnnnnnnnnnnnnnnnnnnnnnnnnnnnnnnnnnnnnnnnnnnnnnnnnnnnnnnnnnnnnnnnnnnnnnnnnnnnnnnnnnnnnnnnnnnnnnnnnnnnnnnnnnnnnnnnnnnnnnnnnnnnnnnnnnnnnnnnnnnnnnnnnnnnnnnnnnnnnnnnnnnnnnnnnnnnnnnnnnnnnnnnnnnnnnnnnnnnnnnnnnnnnnnnnnnnnnnnnnnnnnnnnnnnnnnnnnnnnnnnnnnnnnnnnnnnnnnnnnnnnnnnnnnnnnnnnnnnnnnnnnnnnnnnnnnnnnnnnnnnnnnnnnnnnnnnnnnnnnnnnnnnnnnnnnnnnnnnnnnnnnnnnnnnnnnnnnnnnnnnnnnnnnnnnnnnnnnnnnnnnnnnnnnnnnnnnnnnnnnnnnnnnnnnnnnnnnnnnnnnnnnnnnnnnnnnnnnnnnnnnnnnnnnnnnnnnnnnnnnnnnnnnnnnnnnnnnnnnnnnnnnnnnnnnnnnnnnnnnnnnnnnnnnnnnnnnnnnnnnnnnnnnnnnnnnnnnnnnnnnnnnnnnnnnnnnnnnnnnnnnnnnnnnnnnnnnnnnnnnnnnnnnnnnnnnnnnnnnnnnnnnnnnnnnnnnnnnnnnnnnnnnnnnnnnnnnnnnnnnnnnnnnnnnnnnnnnnnnnnnnnnnnnnnnnnnnnnnnnnnnnnnnnnnnnnnnnnnnnnnnnnnnnnnnnnnnnnnnnnnnnnnnnnnnnnnnnnnnnnnnnnnnnnnnnnnnnnnnnnnnnnnnnnnnnnnnnnnnnnnnnnnnnnnnnnnnnnnnnnnnnnnnnnnnnnnnnnnnnnnnnnnnnnnnnnnnnnnnnnnnnnnnnnnnnnnnnnnnnnnnnnnnnnnnnnnnnnnnnnnnnnnnnnnnnnnnnnnnnnnnnnnnnnnnnnnnnnnnnnnnnnnnnnnnnnnnnnnnnnnnnnnnnnnnnnnnnnnnnnnnnnnnnnnnnnnnnnnnnnnnnnnnnnnnnnnnnnnnnnnnnnnnnnnnnnnnnnnnnnnnnnnnnnnnnnnnnnnnnnnnnnnnnnnnnnnnnnnnnnnnnnnnnnnnnnnnnnnnnnnnnnnnnnnnnnnnnnnnnnnnnnnnnnnnnnnnnnnnnnnnnnnnnnnnnnnnnnnnnnnnnnnnnnnnnnnnnnnnnnnnnnnnnnnnnnnnnnnnnnnnnnnnnnnnnnnnnnnnnnnnnnnnnnnnnnnnnnnnnnnnnnnnnnnnnnnnnnnnnnnnnnnnnnnnnnnnnnnnnnnnnnnnnnnnnnnnnnnnnnnnnnnnnnnnnnnnnnnnnnnnnnnnnnnnnnnnnnnnnnnnnnnnnnnnnnnnnnnnnnnnnnnnnnnnnnnnnnnnnnnnnnnnnnnnnnnnnnnnnnnnnnnnnnnnnnnnnnnnnnnnnnnnnnnnnnnnnnnnnnnnnnnnnnnnnnnnnnnnnnnnnnnnnnnnnnnnnnnnnnnnnnnnnnnnnnnnnnnnnnnnnnnnnnnnnnnnnnnnnnnnnnnnnnnnnnnnnnnnnnnnnnnnnnnnnnnnnnnnnnnnnnnnnnnnnnnnnnnnnnnnnnnnnnnnnnnnnnnnnnnnnnnnnnnnnnnnnnnnnnnnnnnnnnnnnnnnnnnnnnnnnnnnnnnnnnnnnnnnnnnnnnnnnnnnnnnnnnnnnnnnnnnnnnnnnnnnnnnnnnnnnnnnnnnnnnnnnnnnnnnnnnnnnnnnnnnnnnnnnnnnnnnnnnnnnnnnnnnnnnnnnnnnnnnnnnnnnnnnnnnnnnnnnnnnnnnnnnnnnnnnnnnnnnnnnnnnnnnnnnnnnnnnnnnnnnnnnnnnnnnnnnnnnnnnnnnnnnnnnnnnnnnnnnnnnnnnnnnnnnnnnnnnnnnnnnnnnnnnnnnnnnnnnnnnnnnnnnnnnnnnnnnnnnnnnnnnnnnnnnnnnnnnnnnnnnnnnnnnnnnnnnnnnnnnnnnnnnnnnnnnnnnnnnnnnnnnnnnnnnnnnnnnnnnnnnnnnnnnnnnnnnnnnnnnnnnnnnnnnnnnnnnnnnnnnnnnnnnnnnnnnnnnnnnnnnnnnnnnnnnnnnnnnnnnnnnnnnnnnnnnnnnnnnnnnnnnnnnnnnnnnnnnnnnnnnnnnnnnnnnnnnnnnnnnnnnnnnnnnnnnnnnnnnnnnnnnnnnnnnnnnnnnnnnnnnnnnnnnnnnnnnnnnnnnnnnnnnnnnnnnnnnnnnnnnnnnnnnnnnnnnnnnnnnnnnnnnnnnnnnnnnnnnnnnnnnnnnnnnnnnnnnnnnnnnnnnnnnnnnnnnnnnnnnnnnnnnnnnnnnnnnnnnnnnnnnnnnnnnnnnnnnnnnnnnnnnnnnnnnnnnnnnnnnnnnnnnnnnnnnnnnnnnnnnnnnnnnnnnnnnnnnnnnnnnnnnnnnnnnnnnnnnnnnnnnnnnnnnnnnnnnnnnnnnnnnnnnnnnnnnnnnnnnnnnnnnnnnnnnnnnnnnnnnnnnnnnnnnnnnnnnnnnnnnnnnnnnnnnnnnnnnnnnnnnnnnnnnnnnnnnnnnnnnnnnnnnnnnnnnnnnnnnnnnnnnnnnnnnnnnnnnnnnnnnnnnnnnnnnnnnnnnnnnnnnnnnnnnnnnnnnnnnnnnnnnnnnnnnnnnnnnnnnnnnnnnnnnnnnnnnnnnnnnnnnnnnnnnnnnnnnnnnnnnnnnnnnnnnnnnnnnnnnnnnnnnnnnnnnnnnnnnnnnnnnnnnnnnnnnnnnnnnnnnnnnnnnnnnnnnnnnnnnnnnnnnnnnnnnnnnnnnnnnnnnnnnnnnnnnnnnnnnnnnnnnnnnnnnnnnnnnnnnnnnnnnnnnnnnnnnnnnnnnnnnnnnnnnnnnnnnnnnnnnnnnnnnnnnnnnnnnnnnnnnnnnnnnnnnnnnnnnnnnnnnnnnnnnnnnnnnnnnnnnnnnnnnnnnnnnnnnnnnnnnnnnnnnnnnnnnnnnnnnnnnnnnnnnnnnnnnnnnnnnnnnnnnnnnnnnnnnnnnnnnnnnnnnnnnnnnnnnnnnnnnnnnnnnnnnnnnnnnnnnnnnnnnnnnnnnnnnnnnnnnnnnnnnnnnnnnnnnnnnnnnnnnnnnnnnnnnnnnnnnnnnnnnnnnnnnnnnnnnnnnnnnnnnnnnnnnnnnnnnnnnnnnnnnnnnnnnnnnnnnnnnnnnnnnnnnnnnnnnnnnnnnnnnnnnnnnnnnnnnnnnnnnnnnnnnnnnnnnnnnnnnnnnnnnnnnnnnnnnnnnnnnnnnnnnnnnnnnnnnnnnnnnnnnnnnnnnnnnnnnnnnnnnnnnnnnnnnnnnnnnnnnnnnnnnnnnnnnnnnnnnnnnnnnnnnnnnnnnnnnnnnnnnnnnnnnnnnnnnnnnnnnnnnnnnnnnnnnnnnnnnnnnnnnnnnnnnnnnnnnnnnnnnnnnnnnnnnnnnnnnnnnnnnnnnnnnnnnnnnnnnnnnnnnnnnnnnnnnnnnnnnnnnnnnnnnnnnnnnnnnnnnnnnnnnnnnnnnnnnnnnnnnnnnnnnnnnnnnnnnnnnnnnnnnnnnnnnnnnnnnnnnnnnnnnnnnnnnnnnnnnnnnnnnnnnnnnnnnnnnnnnnnnnnnnnnnnnnnnnnnnnnnnnnnnnnnnnnnnnnnnnnnnnnnnnnnnnnnnnnnnnnnnnnnnnnnnnnnnnnnnnnnnnnnnnnnnnnnnnnnnnnnnnnnnnnnnnnnnnnnnnnnnnnnnnnnnnnnnnnnnnnnnnnnnnnnnnnnnnnnnnnnnnnnnnnnnnnnnnnnnnnnnnnnnnnnnnnnnnnnnnnnnnnnnnnnnnnnnnnnnnnnnnnnnnnnnnnnnnnnnnnnnnnnnnnnnnnnnnnnnnnnnnnnnnnnnnnnnnnnnnnnnnnnnnnnnnnnnnnnnnnnnnnnnnnnnnnnnnnnnnnnnnnnnnnnnnnnnnnnnnnnnnnnnnnnnnnnnnnnnnnnnnnnnnnnnnnnnnnnnnnnnnnnnnnnnnnnnnnnnnnnnnnnnnnnnnnnnnnnnnnnnnnnnnnnnnnnnnnnnnnnnnnnnnnnnnnnnnnnnnnnnnnnnnnnnnnnnnnnnnnnnnnnnnnnnnnnnnnnnnnnnnnnnnnnnnnnnnnnnnnnnnnnnnnnnnnnnnnnnnnnnnnnnnnnnnnnnnnnnnnnnnnnnnnnnnnnnnnnnnnnnnnnnnnnnnnnnnnnnnnnnnnnnnnnnnnnnnnnnnnnnnnnnnnnnnnnnnnnnnnnnnnnnnnnnnnnnnnnnnnnnnnnnnnnnnnnnnnnnnnnnnnnnnnnnnnnnnnnnnnnnnnnnnnnnnnnnnnnnnnnnnnnnnnnnnnnnnnnnnnnnnnnnnnnnnnnnnnnnnnnnnnnnnnnnnnnnnnnnnnnnnnnnnnnnnnnnnnnnnnnnnnnnnnnnnnnnnnnnnnnnnnnnnnnnnnnnnnnnnnnnnnnnnnnnnnnnnnnnnnnnnnnnnnnnnnnnnnnnnnnnnnnnnnnnnnnnnnnnnnnnnnnnnnnnnnnnnnnnnnnnnnnnnnnnnnnnnnnnnnnnnnnnnnnnnnnnnnnnnnnnnnnnnnnnnnnnnnnnnnnnnnnnnnnnnnnnnnnnnnnnnnnnnnnnnnnnnnnnnnnnnnnnnnnnnnnnnnnnnnnnnnnnnnnnnnnnnnnnnnnnnnnnnnnnnnnnnnnnnnnnnnnnnnnnnnnnnnnnnnnnnnnnnnnnnnnnatacaacaagcgcgcggcgcgtttcctgaaacggcatcccgaactcgaaaagcagtacctcaaaacactgcaactgctggaactcaatccccatcacccatccctgcgcctgcatcctttgagtggcaaactgcaagccctgcattccgtctcgatcaacctctcctaccgcattacgctggagctgctgatccaggacgagcagatcatcccggtaaacgtgggcgaccacgacgcggtgtattgaggatcgttgcaacgcgtttccggcgagcaataccatttcgccacgctgaccggcaatccgccttttccgtcaatgcccaacgcatagcagagtaaaatcctcacggacaaccagaaaacggagggcgaatggacaagctaaaaataaccgcgcatcttctcgcgccgctcgttaccggcggcggctacatgacgctcgacggcctgctggcggcacttctgttcgaccggcttcatgacgtcgacgctgcccatgcggcaattcctgtccgtcagaccgctggcctgctgcacgccagcgcggcaatcatggagccgattcgcgagcgggtctccttcatcgccgcgcttcggcccacgcacagcatcgaccccgaccacgttcagaagaacaagcacgggcagttgcaccgcaagttcgacacctcgttgaccaatgtcatgaacagctacgccatgctgaccgccccgaccgtcacctggtacgccgaaggcgacgccgaccgcatcggccagttgcttgcaccggtgcaattcatcggcaaacggcgcgccgccgggtttggtcgcgttgcgcaatggcagatcgaaccggacgacctcgacggcatcgaaggcaccttcggcgagccgctgcgcccagtgccggtcgacatgttcaagggcgacaaaacccaccccatcgtcgacgccgcctggcgcccggcctactggaacccgatacacagaacggcgtgttacgcgccaacctgaggaacaacggtgctcgctttcttcaacgacaatttcggccgccatctggtcgaacaaaccgacgatccggtcgccgatgcccggcgcgccctgtcatcggggcaccggatgaaaaagggtggcggcccgcagcgcatcgcatccggctgggccatcattcgccccgcaaaatccaccatgcaatttgaactcgcggcggatggcatcgaatacagcaagcagacacgctacgaagcatttctggccgaactggaaaactgggatggcacgccgcgcatgttcatcgaattcgccaaacgccccgttccggtcggcaatctgttccgcaccttcgatctgcgccaagtgcgcatctgctcgcccagtggcgtcgagacattcgatttcaccaaggcgccggaaaaagacgggtgcaagacacacaaggttctatggaaactcaaaaagggggaaaagtgacggacttcgtactccaaaagccaccgaccgtccgtggctacgccctgcaccgcatggctgccggactggccggtggcgacccggtactgtttgccgattgcggcgaccacttgcggttgcgtaccgacaaaccactggcggtggatcggcagccgctgcgcagcgtcagccccggcgacatcgtcggtttcgagctgcgcgcctgtgtcggcaagaagatcaagggcaaacatcgctactttccgaccgccgactggcgcagccggcaccaatggctggcgcggcagggcgagctgcacggattcaccatcgttaccgtgcattgcaccgccgcgatgctggccatcaaggcgggcgaacgacaattcaccgtcgaccagaccgatttcaccggcgttctcaaagtcaccgacgttgaacgcttcaaccaagccgtcgccaatggcatcggcaacaaggccagggctttcggctttggcatgctgctcatttaacgaggtacgccgccgtgaaaaccatcgtcatcaacgcccgcatcgccaccgttgccccgctctccatcaccctgccggtggccgaaggccagcttggcaacaagttcaacaacttccccatcgtcacccgtggccttgacgacgatggcaacaagttgcagaccggctacctgccggccaccacgctgcgcggatttctccgtcgcgccatcgtcaccgaccagatgatgcaggcagcggcggcaggcaaacactacaccctgcaaaaagcctatgccgacctgatcgggcaggatgcggcatcggaatcgaaagacgacatcgacctgctgaaactgcgccagacccgcgaggaaaatgccgtgcttgacctcttcggttccgggctgggcatcaagtcgcgcctgctggtgtcgcacttcatgccgacccacaacgtcctgcccgaagtcatgaccggcgtccgcaaagacctggaagacaccgacgacgtactggacatgctctcgccggccgaccgcgacctttatctcggccgcgccgaagccaacagccggcgcgccgccgcccagaccgtggtcaaaggcctggaaggcaagattcgccgggcacgaaaggccggcgaggaagttggcgaactggagcaagccctgacggaagcacaggcggtggtcgcccgccacgaatccgagatgggcgacatgaccaattcgtcgcgcaccctgaccaattacttcgccctgcctgccgggatcgaactgagcgggcgcctggtcatcgaaaacgcccgcgagcgcgacctgccgatgctggaactggcgctggacgcgctgtcgaagcggccgatactcggcgcgcaaagcgcccgtggttgcggcgaaatcgaaggcatgttcgatgttgcggtcgacggcgttttaacccggaaaatcaaaatcggcggctggcaagcggcgacggttacggacttttcagcggcggcaatggcaaaaactgctgtctgagcagtgggttgcggatagtgagatcaagctacctcgctgttgggtggttactggaactcagcccagcgaaggccttgcgcatctcgggatcaagctacctcgctgttgggtggttactggaacccgcgcgcagatcgacctgaccccaatgtcgatcaagctacctcgctgttgggtggttactggaacttctcggatcgggcaatgattcgatggacggatcaagctacctcgctgttgggtggttactggaactagttctcgacgatgcgctgcgcattggttgatcaagctacctcgctgttgggtggttactggaactgcaccaccatcctcgacttctacaaggtggatcaagccacctcgctgttgtgtggttactggaactaggcgcgcatataggtattgaccagctccgatcaagccaccccgctgttgggtggttactggaacagtcgaccgcgacaggtgtcgtaacggcgaagtcaagccacccggagggtgggtggttcctggaacttgcaatagccgaagccttccagcacggcggaccaagccaccccgttgttgggtggttactggaacaaaaatgcctcaaaatagccgtcagccgccaatcaagccacctgctgttgggtggttactagaacgagtatcacgagaatttcatcgatagcgaagatcaagccaccccgccgtggctactacaaaaagcaaatgtcatgtttcgctcaaccgagcaatcgacttacgcagccattgtcgccaaacacctggctatcgccgatgcgccgctgttactggaaggcgggacgggcatcggcaagacgcgggcgtatctttcggcgctcttccaatccggacggcgggttgccgttgtcctgccgacgcaccagttgatcgatcaattgctggattccggcgatctggcggcaacgcgcgacgcggctacggtggccgcgttccggcccgcgcggatgttcgagcggcgcgccgactatgaagcaggcaaacgcgccgccgacgccgcacaagtcatgttgtgcacggcggccagtgtcatcatcgaccatcgtctggatggcgaatacaacggctcgacgacccgcgactacctgttgttcgacgaggcggatcagctcccggacatggctgccctgcaaagcgatttcgccatcaccagcgccgaactggccgagttgggcattcgcgtaacgaatgttgccgatgcgctgaatgcgatcctggcgaagaagccacgcagcgtggcaccggaaacccgggcggcggcgcgcgtcattctcgacgccatcgtggaaccggcctggtatcagtccgccggcttgaacgacgatggcgacatcgtactgacgcacaagctgcccggccgcctgttgaagaagatcagcaaccggggcaacgtggcttttgtctcggcgaccctgaccgtcggcggtcgcttcaaggatttcatgaacagcatggccatcgaagcatgcagccacctgtcctgcgccatcgaaccggaacggcacggcgcgctcgatttccacatgatcccgctggcggtcgatacaccggaatggctggcggccatcgtccagacggcgcaggaggcggccaagccggtgctgatcgcaaccccgtcgcacgagctttcgtacctgcttggccaacggctgccggacgccattgtcaggacggccgatgaaaccgccacgcaagccgccatacgtgtgcccgccgggggcatcctgattgcggctggcgcctgggcggggctcgataccgcgctgcgctggcgctcaatcattgtaccaagagtaccgttcggacagccgcaggtgatcgatggcgaggtaacgaccagctatttcgatgcacgcaacacggcgacccgccgcttgcgtcaggtcatcgggcgcggcctgcgcacgcccgatgcggtctgtagcgtttatcttctcgacgcccgagccgagaaactcggtggtttcgttccggcacgcttctcggtcgcatggtcggggcgaacctatccggaaggtgcgcggcaagagttggtgctgtcaaaggcggaacgcgacccggcactacgccgcgcggcgctgaaccactacgggcggaagtgcatggctcccggctgtggtttcgtgccgaaagtcgattcgcagctcgatgttcaccacctcgacccgattgccgaggggcaacgggaaacacgaatcgaggatgtggtggttctgtgtgcgaactgccatcgactggcgcactcgacttactgaaaaccttggaggcctaacgcctttgatcgctggcctgttgcggtcgaccgccaaaaaagggcaaatttgcccgatccggaatcgcgcgacggcgcccagcccattacatccggaaacatttgcgtacacatcggcgtcagtcgcttccatcgtt

SEQ ID NO: 245 - DNA, 11716 bp, Artificial Sequence; identical to SEQ ID NO: 243
  Synthetic Oligonucleotide
  misc_feature (1)..(6297): n is a, c, g, or t

SEQ ID NO: 246 - DNA, 11716 bp, Artificial Sequence
  Synthetic Oligonucleotide
  misc_feature (1)..(6321): n is a, c, g, or t
nnnnnnnnnnnnnnnnnnnnnnnnnnnnnnnnnnnnnnnnnnnnnnnnnnnnnnnnnnnnnnnnnnnnnnnnnnnnnnnnnnnnnnnnnnnnnnnnnnnnnnnnnnnnnnnnnnnnnnnnnnnnnnnnnnnnnnnnnnnnnnnnnnnnnnnnnnnnnnnnnnnnnnnnnnnnnnnnnnnnnnnnnnnnnnnnnnnnnnnnnnnnnnnnnnnnnnnnnnnnnnnnnnnnnnnnnnnnnnnnnnnnnnnnnnnnnnnnnnnnnnnnnnnnnnnnnnnnnnnnnnnnnnnnnnnnnnnnnnnnnnnnnnnnnnnnnnnnnnnnnnnnnnnnnnnnnnnnnnnnnnnnnnnnnnnnnnnnnnnnnnnnnnnnnnnnnnnnnnnnnnnnnnnnnnnnnnnnnnnnnnnnnnnnnnnnnnnnnnnnnnnnnnnnnnnnnnnnnnnnnnnnnnnnnnnnnnnnnnnnnnnnnnnnnnnnnnnnnnnnnnnnnnnnnnnnnnnnnnnnnnnnnnnnnnnnnnnnnnnnnnnnnnnnnnnnnnnnnnnnnnnnnnnnnnnnnnnnnnnnnnnnnnnnnnnnnnnnnnnnnnnnnnnnnnnnnnnnnnnnnnnnnnnnnnnnnnnnnnnnnnnnnnnnnnnnnnnnnnnnnnnnnnnnnnnnnnnnnnnnnnnnnnnnnnnnnnnnnnnnnnnnnnnnnnnnnnnnnnnnnnnnnnnnnnnnnnnnnnnnnnnnnnnnnnnnnnnnnnnnnnnnnnnnnnnnnnnnnnnnnnnnnnnnnnnnnnnnnnnnnnnnnnnnnnnnnnnnnnnnnnnnnnnnnnnnnnnnnnnnnnnnnnnnnnnnnnnnnnnnnnnnnnnnnnnnnnnnnnnnnnnnnnnnnnnnnnnnnnnnnnnnnnnnnnnnnnnnnnnnnnnnnnnnnnnnnnnnnnnnnnnnnnnnnnnnnnnnnnnnnnnnnnnnnnnnnnnnnnnnnnnnnnnnnnnnnnnnnnnnnnnnnnnnnnnnnnnnnnnnnnnnnnnnnnnnnnnnnnnnnnnnnnnnnnnnnnnnnnnnnnnnnnnnnnnnnnnnnnnnnnnnnnnnnnnnnnnnnnnnnnnnnnnnnnnnnnnnnnnnnnnnnnnnnnnnnnnnnnnnnnnnnnnnnnnnnnnnnnnnnnnnnnnnnnnnnnnnnnnnnnnnnnnnnnnnnnnnnnnnnnnnnnnnnnnnnnnnnnnnnnnnnnnnnnnnnnnnnnnnnnnnnnnnnnnnnnnnnnnnnnnnnnnnnnnnnnnnnnnnnnnnnnnnnnnnnnnnnnnnnnnnnnnnnnnnnnnnnnnnnnnnnnnnnnnnnnnnnnnnnnnnnnnnnnnnnnnnnnnnnnnnnnnnnnnnnnnnnnnnnnnnnnnnnnnnnnnnnnnnnnnnnnnnnnnnnnnnnnnnnnnnnnnnnnnnnnnnnnnnnnnnnnnnnnnnnnnnnnnnnnnnnnnnnnnnnnnnnnnnnnnnnnnnnnnnnnnnnnnnnnnnnnnnnnnnnnnnnnnnnnnnnnnnnnnnnnnnnnnnnnnnnnnnnnnnnnnnnnnnnnnnnnnnnnnnnnnnnnnnnnnnnnnnnnnnnnnnnnnnnnnnnnnnnnnnnnnnnnnnnnnnnnnnnnnnnnnnnnnnnnnnnnnnnnnnnnnnnnnnnnnnnnnnnnnnnnnnnnnnnnnnnnnnnnnnnnnnnnnnnnnnnnnnnnnnnnnnnnnnnnnnnnnnnnnnnnnnnnnnnnnnnnnnnnnnnnnnnnnnnnnnnnnnnnnnnnnnnnnnnnnnnnnnnnnnnnnnnnnnnnnnnnnnnnnnnnnnnnnnnnnnnnnnnnnnnnnnnnnnnnnnnnnnnnnnnnnnnnnnnnnnnnnnnnnnnnnnnnnnnnnnnnnnnnnnnnnnnnnnnnnnnnnnnnnnnnnnnnnnnnnnnnnnnnnnnnnnnnnnnnnnnnnnnnnnnnnnnnnnnnnnnnnnnnnnnnnnnnnnnnnnnnnnnnnnnnnnnnnnnnnnnnnnnnnnnnnnnnnnnnnnnnnnnnnnnnnnnnnnnnnnnnnnnnnnnnnnnnnnnnnnnnnnnnnnnnnnnnnnnnnnnnnnnnnnnnnnnnnnnnnnnnnnnnnnnnnnnnnnnnnnnnnnnnnnnnnnnnnnnnnnnnnnnnnnnnnnnnnnnnnnnnnnnnnnnnnnnnnnnnnnnnnnnnnnnnnnnnnnnnnnnnnnnnnnnnnnnnnnnnnnnnnnnnnnnnnnnnnnnnnnnnnnnnnnnnnnnnnnnnnnnnnnnnnnnnnnnnnnnnnnnnnnnnnnnnnnnnnnnnnnnnnnnnnnnnnnnnnnnnnnnnnnnnnnnnnnnnnnnnnnnnnnnnnnnnnnnnnnnnnnnnnnnnnnnnnnnnnnnnnnnnnnnnnnnnnnnnnnnnnnnnnnnnnnnnnnnnnnnnnnnnnnnnnnnnnnnnnnnnnnnnnnnnnnnnnnnnnnnnnnnnnnnnnnnnnnnnnnnnnnnnnnnnnnnnnnnnnnnnnnnnnnnnnnnnnnnnnnnnnnnnnnnnnnnnnnnnnnnnnnnnnnnnnnnnnnnnnnnnnnnnnnnnnnnnnnnnnnnnnnnnnnnnnnnnnnnnnnnnnnnnnnnnnnnnnnnnnnnnnnnnnnnnnnnnnnnnnnnnnnnnnnnnnnnnnnnnnnnnnnnnnnnnnnnnnnnnnnnnnnnnnnnnnnnnnnnnnnnnnnnnnnnnnnnnnnnnnnnnnnnnnnnnnnnnnnnnnnnnnnnnnnnnnnnnnnnnnnnnnnnnnnnnnnnnnnnnnnnnnnnnnnnnnnnnnnnnnnnnnnnnnnnnnnnnnnnnnnnnnnnnnnnnnnnnnnnnnnnnnnnnnnnnnnnnnnnnnnnnnnnnnnnnnnnnnnnnnnnnnnnnnnnnnnnnnnnnnnnnnnnnnnnnnnnnnnnnnnnnnnnnnnnnnnnnnnnnnnnnnnnnnnnnnnnnnnnnnnnnnnnnnnnnnnnnnnnnnnnnnnnnnnnnnnnnnnnnnnnnnnnnnnnnnnnnnnnnnnnnnnnnnnnnnnnnnnnnnnnnnnnnnnnnnnnnnnnnnnnnnnnnnnnnnnnnnnnnnnnnnnnnnnnnnnnnnnnnnnnnnnnnnnnnnnnnnnnnnnnnnnnnnnnnnnnnnnnnnnnnnnnnnnnnnnnnnnnnnnnnnnnnnnnnnnnnnnnnnnnnnnnnnnnnnnnnnnnnnnnnnnnnnnnnnnnnnnnnnnnnnnnnnnnnnnnnnnnnnnnnnnnnnnnnnnnnnnnnnnnnnnnnnnnnnnnnnnnnnnnnnnnnnnnnnnnnnnnnnnnnnnnnnnnnnnnnnnnnnnnnnnnnnnnnnnnnnnnnnnnnnnnnnnnnnnnnnnnnnnnnnnnnnnnnnnnnnnnnnnnnnnnnnnnnnnnnnnnnnnnnnnnnnnnnnnnnnnnnnnnnnnnnnnnnnnnnnnnnnnnnnnnnnnnnnnnnnnnnnnnnnnnnnnnnnnnnnnnnnnnnnnnnnnnnnnnnnnnnnnnnnnnnnnnnnnnnnnnnnnnnnnnnnnnnnnnnnnnnnnnnnnnnnnnnnnnnnnnnnnnnnnnnnnnnnnnnnnnnnnnnnnnnnnnnnnnnnnnnnnnnnnnnnnnnnnnnnnnnnnnnnnnnnnnnnnnnnnnnnnnnnnnnnnnnnnnnnnnnnnnnnnnnnnnnnnnnnnnnnnnnnnnnnnnnnnnnnnnnnnnnnnnnnnnnnnnnnnnnnnnnnnnnnnnnnnnnnnnnnnnnnnnnnnnnnnnnnnnnnnnnnnnnnnnnnnnnnnnnnnnnnnnnnnnnnnnnnnnnnnnnnnnnnnnnnnnnnnnnnnnnnnnnnnnnnnnnnnnnnnnnnnnnnnnnnnnnnnnnnnnnnnnnnnnnnnnnnnnnnnnnnnnnnnnnnnnnnnnnnnnnnnnnnnnnnnnnnnnnnnnnnnnnnnnnnnnnnnnnnnnnnnnnnnnnnnnnnnnnnnnnnnnnnnnnnnnnnnnnnnnnnnnnnnnnnnnnnnnnnnnnnnnnnnnnnnnnnnnnnnnnnnnnnnnnnnnnnnnnnnnnnnnnnnnnnnnnnnnnnnnnnnnnnnnnnnnnnnnnnnnnnnnnnnnnnnnnnnnnnnnnnnnnnnnnnnnnnnnnnnnnnnnnnnnnnnnnnnnnnnnnnnnnnnnnnnnnnnnnnnnnnnnnnnnnnnnnnnnnnnnnnnnnnnnnnnnnnnnnnnnnnnnnnnnnnnnnnnnnnnnnnnnnnnnnnnnnnnnnnnnnnnnnnnnnnnnnnnnnnnnnnnnnnnnnnnnnnnnnnnnnnnnnnnnnnnnnnnnnnnnnnnnnnnnnnnnnnnnnnnnnnnnnnnnnnnnnnnnnnnnnnnnnnnnnnnnnnnnnnnnnnnnnnnnnnnnnnnnnnnnnnnnnnnnnnnnnnnnnnnnnnnnnnnnnnnnnnnnnnnnnnnnnnnnnnnnnnnnnnnnnnnnnnnnnnnnnnnnnnnnnnnnnnnnnnnnnnnnnnnnnnnnnnnnnnnnnnnnnnnnnnnnnnnnnnnnnnnnnnnnnnnnnnnnnnnnnnnnnnnnnnnnnnnnnnnnnnnnnnnnnnnnnnnnnnnnnnnnnnnnnnnnnnnnnnnnnnnnnnnnnnnnnnnnnnnnnnnnnnnnnnnnnnnnnnnnnnnnnnnnnnnnnnnnnnnnnnnnnnnnnnnnnnnnnnnnnnnnnnnnnnnnnnnnnnnnnnnnnnnnnnnnnnnnnnnnnnnnnnnnnnnnnnnnnnnnnnnnnnnnnnnnnnnnnnnnnnnnnnnnnnnnnnnnnnnnnnnnnnnnnnnnnnnnnnnnnnnnnnnnnnnnnnnnnnnnnnnnnnnnnnnnnnnnnnnnnnnnnnnnnnnnnnnnnnnnnnnnnnnnnnnnnnnnnnnnnnnnnnnnnnnnnnnnnnnnnnnnnnnnnnnnnnnnnnnnnnnnnnnnnnnnnnnnnnnnnnnnnnnnnnnnnnnnnnnnnnnnnnnnnnnnnnnnnnnnnnnnnnnnnnnnnnnnnnnnnnnnnnnnnnnnnnnnnnnnnnnnnnnnnnnnnnnnnnnnnnnnnnnnnnnnnnnnnnnnnnnnnnnnnnnnnnnnnnnnnnnnnnnnnnnnnnnnnnnnnnnnnnnnnnnnnnnnnnnnnnnnnnnnnnnnnnnnnnnnnnnnnnnnnnnnnnnnnnnnnnnnnnnnnnnnnnnnnnnnnnnnnnnnnnnnnnnnnnnnnnnnnnnnnnnnnnnnnnnnnnnnnnnnnnnnnnnnnnnnnnnnnnnnnnnnnnnnnnnnnnnnnnnnnnnnnnnnnnnnnnnnnnnnnnnnnnnnnnnnnnnnnnnnnnnnnnnnnnnnnnnnnnnnnnnnnnnnnnnnnnnnnnnnnnnnnnnnnnnnnnnnnnnnnnnnnnnnnnnnnnnnnnnnnnnnnnnnnnnnnnnnnnnnnnnnnnnnnnnnnnnnnnnnnnnnnnnnnnnnnnnnnnnnnnnnnnnnnnnnnnnnnnnnnnnnnnnnnnnnnnnnnnnnnnnnnnnnnnnnnnnnnnnnnnnnnnnnnnnnnnnnnnnnnnnnnnnnnnnnnnnnnnnnnnnnnnnnnnnnnnnnnnnnnnnnnnnnnnnnnnnnnnnnnnnnnnnnnnnnnnnnnnnnnnnnnnnnnnnnnnnnnnnnnnnnnnnnnnnnnnnnnnnnnnnnnnnnnnnnnnnnnnnnnnnnnnnnnnnnnnnnnnnnnnnnnnnnnnnnnnnnnnnnnnnnnnnnnnnnnnnnnnnnnnnnnnnnnnnnnnnnnnnnnnnnnnnnnnnnnnnnnnnnnnnnnnnnnnnnnnnnnnnnnnnnnnnnnnnnnnnnnnnnnnnnnnnnnnnnnnnnnnnnnnnnnnnnnnnnnnnnnnnnnnnnnnnnnnnnnnnnnnnnnnnnnnnnnnnnnnnnnnnnnnnnnnnnnnnnnnnnnnnnnnnnnnnnnnnnnnnnnnnnnnnnnnnnnnnnnnnnnnnnnnnnnnnnnnnnnnnnnnnnnnnnnnnnnnnnnnnnnnnnnnnnnnnnnnnnnnnnnnnnnnnnnnnnnnnnnnnnnnnnnnnnnnnnnnnnnnnnnnnnnnnnnnnnnnnnnnnnnnnnnnnnnnnnnnnnnnnnnnnnnnnnnnnnnnnnnnnnnnnnnnnnnnnnnnnnnnnnnnnnnnnnnnnnnnnnnnnnnnnnnnnnnnnnnnnnnnnnnnnnnnnnnnnnnnnnnnnnnnnnnnnnnnnnnnnnnnnnnnnnnnnnnnnnnnnnnnnnnnnnnnnnnnnnnnnnnnnnnnnnnnnnnnnnnnnnnnnnnnnnnnnnnnnnnnnnnnnnnnnnnnnnnnnnnnnnnnnnnnnnnnnnnnnnnnnnnnnnnnnnnnnnnnnnnnnnnnnnnnnnatacaacaagcgcgcggcgcgtttcctgaaacggcatcccgaactcgaaaagcagtacctcaaaacactgcaactgctggaactcaatccccatcacccatccctgcgcctgcatcctttgagtggcaaactgcaagccctgcattccgtctcgatcaacctctcctaccgcattacgctggagctgctgatccaggacgagcagatcatcccggtaaacgtgggcgaccacgacgcggtgtattgaggatcgttgcaacgcgtttccggcgagcaataccatttcgccacgctgaccggcaatccgccttttccgtcaatgcccaacgcatagcagagtaaaatcctcacggacaaccagaaaacggagggcgaatggacaagctaaaaataaccgcgcatcttctcgcgccgctcgttaccggcggcggctacatgacgctcgacggcctgctggcggcacttctgttcgaccggcttcatgacgtcgacgctgcccatgcggcaattcctgtccgtcagaccgctggcctgctgcacgccagcgcggcaatcatggagccgattcgcgagcgggtctccttcatcgccgcgcttcggcccacgcacagcatcgaccccgaccacgttcagaagaacaagcacgggcagttgcaccgcaagttcgacacctcgttgaccaatgtcatgaacagctacgccatgctgaccgccccgaccgtcacctggtacgccgaaggcgacgccgaccgcatcggccagttgcttgcaccggtgcaattcatcggcaaacggcgcgccgccgggtttggtcgcgttgcgcaatggcagatcgaaccggacgacctcgacggcatcgaaggcaccttcggcgagccgctgcgcccagtgccggtcgacatgttcaagggcgacaaaacccaccccatcgtcgacgccgcctggcgcccggcctactggaacccgatacacagaacggcgtgttacgcgccaacctgaggaacaacggtgctcgctttcttcaacgacaatttcggccgccatctggtcgaacaaaccgacgatccggtcgccgatgcccggcgcgccctgtcatcggggcaccggatgaaaaagggtggcggcccgcagcgcatcgcatccggctgggccatcattcgccccgcaaaatccaccatgcaatttgaactcgcggcggatggcatcgaatacagcaagcagacacgctacgaagcatttctggccgaactggaaaactgggatggcacgccgcgcatgttcatcgaattcgccaaacgccccgttccggtcggcaatctgttccgcaccttcgatctgcgccaagtgcgcatctgctcgcccagtggcgtcgagacattcgatttcaccaaggcgccggaaaaagacgggtgcaagacacacaaggttctatggaaactcaaaaagggggaaaagtgacggacttcgtactccaaaagccaccgaccgtccgtggctacgccctgcaccgcatggctgccggactggccggtggcgacccggtactgtttgccgattgcggcgaccacttgcggttgcgtaccgacaaaccactggcggtggatcggcagccgctgcgcagcgtcagccccggcgacatcgtcggtttcgagctgcgcgcctgtgtcggcaagaagatcaagggcaaacatcgctactttccgaccgccgactggcgcagccggcaccaatggctggcgcggcagggcgagctgcacggattcaccatcgttaccgtgcattgcaccgccgcgatgctggccatcaaggcgggcgaacgacaattcaccgtcgaccagaccgatttcaccggcgttctcaaagtcaccgacgttgaacgcttcaaccaagccgtcgccaatggcatcggcaacaaggccagggctttcggctttggcatgctgctcatttaacgaggtacgccgccgtgaaaaccatcgtcatcaacgcccgcatcgccaccgttgccccgctctccatcaccctgccggtggccgaaggccagcttggcaacaagttcaacaacttccccatcgtcacccgtggccttgacgacgatggcaacaagttgcagaccggctacctgccggccaccacgctgcgcggatttctccgtcgcgccatcgtcaccgaccagatgatgcaggcagcggcggcaggcaaacactacaccctgcaaaaagcctatgccgacctgatcgggcaggatgcggcatcggaatcgaaagacgacatcgacctgctgaaactgcgccagacccgcgaggaaaatgccgtgcttgacctcttcggttccgggctgggcatcaagtcgcgcctgctggtgtcgcacttcatgccgacccacaacgtcctgcccgaagtcatgaccggcgtccgcaaagacctggaagacaccgacgacgtactggacatgctctcgccggccgaccgcgacctttatctcggccgcgccgaagccaacagccggcgcgccgccgcccagaccgtggtcaaaggcctggaaggcaagattcgccgggcacgaaaggccggcgaggaagttggcgaactggagcaagccctgacggaagcacaggcggtggtcgcccgccacgaatccgagatgggcgacatgaccaattcgtcgcgcaccctgaccaattacttcgccctgcctgccgggatcgaactgagcgggcgcctggtcatcgaaaacgcccgcgagcgcgacctgccgatgctggaactggcgctggacgcgctgtcgaagcggccgatactcggcgcgcaaagcgcccgtggttgcggcgaaatcgaaggcatgttcgatgttgcggtcgacggcgttttaacccggaaaatcaaaatcggcggctggcaagcggcgacggttacggacttttcagcggcggcaatggcaaaaactgctgtctgagcagtgggttgcggatagtgagatcaagctacctcgctgttgggtggttactggaactcagcccagcgaaggccttgcgcatctcgggatcaagctacctcgctgttgggtggttactggaacccgcgcgcagatcgacctgaccccaatgtcgatcaagctacctcgctgttgggtggttactggaacttctcggatcgggcaatgattcgatggacggatcaagctacctcgctgttgggtggttactggaactagttctcgacgatgcgctgcgcattggttgatcaagctacctcgctgttgggtggttactggaactgcaccaccatcctcgacttctacaaggtggatcaagccacctcgctgttgtgtggttactggaactaggcgcgcatataggtattgaccagctccgatcaagccaccccgctgttgggtggttactggaacagtcgaccgcgacaggtgtcgtaacggcgaagtcaagccacccggagggtgggtggttcctggaacttgcaatagccgaagccttccagcacggcggaccaagccaccccgttgttgggtggttactggaacaaaaatgcctcaaaatagccgtcagccgccaatcaagccacctgctgttgggtggttactagaacgagtatcacgagaatttcatcgatagcgaagatcaagccaccccgccgtggctactacaaaaagcaaatgtcatgtttcgctcaaccgagcaatcgacttacgcagccattgtcgccaaacacctggctatcgccgatgcgccgctgttactggaaggcgggacgggcatcggcaagacgcgggcgtatctttcggcgctcttccaatccggacggcgggttgccgttgtcctgccgacgcaccagttgatcgatcaattgctggattccggcgatctggcggcaacgcgcgacgcggctacggtggccgcgttccggcccgcgcggatgttcgagcggcgcgccgactatgaagcaggcaaacgcgccgccgacgccgcacaagtcatgttgtgcacggcggccagtgtcatcatcgaccatcgtctggatggcgaatacaacggctcgacgacccgcgactacctgttgttcgacgaggcggatcagctcccggacatggctgccctgcaaagcgatttcgccatcaccagcgccgaactggccgagttgggcattcgcgtaacgaatgttgccgatgcgctgaatgcgatcctggcgaagaagccacgcagcgtggcaccggaaacccgggcggcggcgcgcgtcattctcgacgccatcgtggaaccggcctggtatcagtccgccggcttgaacgacgatggcgacatcgtactgacgcacaagctgcccggccgcctgttgaagaagatcagcaaccggggcaacgtggcttttgtctcggcgaccctgaccgtcggcggtcgcttcaaggatttcatgaacagcatggccatcgaagcatgcagccacctgtcctgcgccatcgaaccggaacggcacggcgcgctcgatttccacatgatcccgctggcggtcgatacaccggaatggctggcggccatcgtccagacggcgcaggaggcggccaagccggtgctgatcgcaaccccgtcgcacgagctttcgtacctgcttggccaacggctgccggacgccattgtcaggacggccgatgaaaccgccacgcaagccgccatacgtgtgcccgccgggggcatcctgattgcggctggcgcctgggcggggctcgataccgcgctgcgctggcgctcaatcattgtaccaagagtaccgttcggacagccgcaggtgatcgatggcgaggtaacgaccagctatttcgatgcacgcaacacggcgacccgccgcttgcgtcaggtcatcgggcgcggcgtgcgcacgcccgatgcggtctgtagcgtttatcttctcgacgcccgagccgagaaactcggtggtttcgttccggcacgcttctcggtcgcatggtcggggcgaacctatccggaaggtgcgcggcaagagttggtgctgtcaaaggcggaacgcgacccggcactacgccgcgcggcgctgaaccactacgggcggaagtgcatggctcccggctgtggtttcgtgccgaaagtcgattcgcagctcgatgttcaccacctcgacccgattgccgaggggcaacgggaaacacgaatcgaggatgtggtggttctgtgtgcgaactgccatcgactggcgcactcgacttactgaaaaccttggaggcctaacgcctttgatcgctggcctgttgcggtcgaccgccaaaaaagggcaaatttgcccgatccggaatcgcgcgacggcgcccagcccattacatccggaaacatttgcgtacacatcggcgtcagtcgcttccatcgtt

SEQ ID NO: 247 - DNA, 11716 bp, Artificial Sequence; identical to SEQ ID NO: 244
  Synthetic Oligonucleotide
  misc_feature (1)..(6321): n is a, c, g, or t

SEQ ID NO: 248 - DNA, 11716 bp, Artificial Sequence; identical to SEQ ID NO: 246
  Synthetic Oligonucleotide
  misc_feature (1)..(6321): n is a, c, g, or t

SEQ ID NO: 249 - DNA, 11688 bp, Artificial Sequence
  Synthetic Oligonucleotide
  misc_feature (1)..(8491): n is a, c, g, or t
nnnnnnnnnnnnnnnnnnnnnnnnnnnnnnnnnnnnnnnnnnnnnnnnnnnnnnnnnnnnnnnnnnnnnnnnnnnnnnnnnnnnnnnnnnnnnnnnnnnnnnnnnnnnnnnnnnnnnnnnnnnnnnnnnnnnnnnnnnnnnnnnnnnnnnnnnnnnnnnnnnnnnnnnnnnnnnnnnnnnnnnnnnnnnnnnnnnnnnnnnnnnnnnnnnnnnnnnnnnnnnnnnnnnnnnnnnnnnnnnnnnnnnnnnnnnnnnnnnnnnnnnnnnnnnnnnnnnnnnnnnnnnnnnnnnnnnnnnnnnnnnnnnnnnnnnnnnnnnnnnnnnnnnnnnnnnnnnnnnnnnnnnnnnnnnnnnnnnnnnnnnnnnnnnnnnnnnnnnnnnnnnnnnnnnnnnnnnnnnnnnnnnnnnnnnnnnnnnnnnnnnnnnnnnnnnnnnnnnnnnnnnnnnnnnnnnnnnnnnnnnnnnnnnnnnnnnnnnnnnnnnnnnnnnnnnnnnnnnnnnnnnnnnnnnnnnnnnnnnnnnnnnnnnnnnnnnnnnnnnnnnnnnnnnnnnnnnnnnnnnnnnnnnnnnnnnnnnnnnnnnnnnnnnnnnnnnnnnnnnnnnnnnnnnnnnnnnnnnnnnnnnnnnnnnnnnnnnnnnnnnnnnnnnnnnnnnnnnnnnnnnnnnnnnnnnnnnnnnnnnnnnnnnnnnnnnnnnnnnnnnnnnnnnnnnnnnnnnnnnnnnnnnnnnnnnnnnnnnnnnnnnnnnnnnnnnnnnnnnnnnnnnnnnnnnnnnnnnnnnnnnnnnnnnnnnnnnnnnnnnnnnnnnnnnnnnnnnnnnnnnnnnnnnnnnnnnnnnnnnnnnnnnnnnnnnnnnnnnnnnnnnnnnnnnnnnnnnnnnnnnnnnnnnnnnnnnnnnnnnnnnnnnnnnnnnnnnnnnnnnnnnnnnnnnnnnnnnnnnnnnnnnnnnnnnnnnnnnnnnnnnnnnnnnnnnnnnnnnnnnnnnnnnnnnnnnnnnnnnnnnnnnnnnnnnnnnnnnnnnnnnnnnnnnnnnnnnnnnnnnnnnnnnnnnnnnnnnnnnnnnnnnnnnnnnnnnnnnnnnnnnnnnnnnnnnnnnnnnnnnnnnnnnnnnnnnnnnnnnnnnnnnnnnnnnnnnnnnnnnnnnnnnnnnnnnnnnnnnnnnnnnnnnnnnnnnnnnnnnnnnnnnnnnnnnnnnnnnnnnnnnnnnnnnnnnnnnnnnnnnnnnnnnnnnnnnnnnnnnnnnnnnnnnnnnnnnnnnnnnnnnnnnnnnnnnnnnnnnnnnnnnnnnnnnnnnnnnnnnnnnnnnnnnnnnnnnnnnnnnnnnnnnnnnnnnnnnnnnnnnnnnnnnnnnnnnnnnnnnnnnnnnnnnnnnnnnnnnnnnnnnnnnnnnnnnnnnnnnnnnnnnnnnnnnnnnnnnnnnnnnnnnnnnnnnnnnnnnnnnnnnnnnnnnnnnnnnnnnnnnnnnnnnnnnnnnnnnnnnnnnnnnnnnnnnnnnnnnnnnnnnnnnnnnnnnnnnnnnnnnnnnnnnnnnnnnnnnnnnnnnnnnnnnnnnnnnnnnnnnnnnnnnnnnnnnnnnnnnnnnnnnnnnnnnnnnnnnnnnnnnnnnnnnnnnnnnnnnnnnnnnnnnnnnnnnnnnnnnnnnnnnnnnnnnnnnnnnnnnnnnnnnnnnnnnnnnnnnnnnnnnnnnnnnnnnnnnnnnnnnnnnnnnnnnnnnnnnnnnnnnnnnnnnnnnnnnnnnnnnnnnnnnnnnnnnnnnnnnnnnnnnnnnnnnnnnnnnnnnnnnnnnnnnnnnnnnnnnnnnnnnnnnnnnnnnnnnnnnnnnnnnnnnnnnnnnnnnnnnnnnnnnnnnnnnnnnnnnnnnnnnnnnnnnnnnnnnnnnnnnnnnnnnnnnnnnnnnnnnnnnnnnnnnnnnnnnnnnnnnnnnnnnnnnnnnnnnnnnnnnnnnnnnnnnnnnnnnnnnnnnnnnnnnnnnnnnnnnnnnnnnnnnnnnnnnnnnnnnnnnnnnnnnnnnnnnnnnnnnnnnnnnnnnnnnnnnnnnnnnnnnnnnnnnnnnnnnnnnnnnnnnnnnnnnnnnnnnnnnnnnnnnnnnnnnnnnnnnnnnnnnnnnnnnnnnnnnnnnnnnnnnnnnnnnnnnnnnnnnnnnnnnnnnnnnnnnnnnnnnnnnnnnnnnnnnnnnnnnnnnnnnnnnnnnnnnnnnnnnnnnnnnnnnnnnnnnnnnnnnnnnnnnnnnnnnnnnnnnnnnnnnnnnnnnnnnnnnnnnnnnnnnnnnnnnnnnnnnnnnnnnnnnnnnnnnnnnnnnnnnnnnnnnnnnnnnnnnnnnnnnnnnnnnnnnnnnnnnnnnnnnnnnnnnnnnnnnnnnnnnnnnnnnnnnnnnnnnnnnnnnnnnnnnnnnnnnnnnnnnnnnnnnnnnnnnnnnnnnnnnnnnnnnnnnnnnnnnnnnnnnnnnnnnnnnnnnnnnnnnnnnnnnnnnnnnnnnnnnnnnnnnnnnnnnnnnnnnnnnnnnnnnnnnnnnnnnnnnnnnnnnnnnnnnnnnnnnnnnnnnnnnnnnnnnnnnnnnnnnnnnnnnnnnnnnnnnnnnnnnnnnnnnnnnnnnnnnnnnnnnnnnnnnnnnnnnnnnnnnnnnnnnnnnnnnnnnnnnnnnnnnnnnnnnnnnnnnnnnnnnnnnnnnnnnnnnnnnnnnnnnnnnnnnnnnnnnnnnnnnnnnnnnnnnnnnnnnnnnnnnnnnnnnnnnnnnnnnnnnnnnnnnnnnnnnnnnnnnnnnnnnnnnnnnnnnnnnnnnnnnnnnnnnnnnnnnnnnnnnnnnnnnnnnnnnnnnnnnnnnnnnnnnnnnnnnnnnnnnnnnnnnnnnnnnnnnnnnnnnnnnnnnnnnnnnnnnnnnnnnnnnnnnnnnnnnnnnnnnnnnnnnnnnnnnnnnnnnnnnnnnnnnnnnnnnnnnnnnnnnnnnnnnnnnnnnnnnnnnnnnnnnnnnnnnnnnnnnnnnnnnnnnnnnnnnnnnnnnnnnnnnnnnnnnnnnnnnnnnnnnnnnnnnnnnnnnnnnnnnnnnnnnnnnnnnnnnnnnnnnnnnnnnnnnnnnnnnnnnnnnnnnnnnnnnnnnnnnnnnnnnnnnnnnnnnnnnnnnnnnnnnnnnnnnnnnnnnnnnnnnnnnnnnnnnnnnnnnnnnnnnnnnnnnnnnnnnnnnnnnnnnnnnnnnnnnnnnnnnnnnnnnnnnnnnnnnnnnnnnnnnnnnnnnnnnnnnnnnnnnnnnnnnnnnnnnnnnnnnnnnnnnnnnnnnnnnnnnnnnnnnnnnnnnnnnnnnnnnnnnnnnnnnnnnnnnnnnnnnnnnnnnnnnnnnnnnnnnnnnnnnnnnnnnnnnnnnnnnnnnnnnnnnnnnnnnnnnnnnnnnnnnnnnnnnnnnnnnnnnnnnnnnnnnnnnnnnnnnnnnnnnnnnnnnnnnnnnnnnnnnnnnnnnnnnnnnnnnnnnnnnnnnnnnnnnnnnnnnnnnnnnnnnnnnnnnnnnnnnnnnnnnnnnnnnnnnnnnnnnnnnnnnnnnnnnnnnnnnnnnnnnnnnnnnnnnnnnnnnnnnnnnnnnnnnnnnnnnnnnnnnnnnnnnnnnnnnnnnnnnnnnnnnnnnnnnnnnnnnnnnnnnnnnnnnnnnnnnnnnnnnnnnnnnnnnnnnnnnnnnnnnnnnnnnnnnnnnnnnnnnnnnnnnnnnnnnnnnnnnnnnnnnnnnnnnnnnnnnnnnnnnnnnnnnnnnnnnnnnnnnnnnnnnnnnnnnnnnnnnnnnnnnnnnnnnnnnnnnnnnnnnnnnnnnnnnnnnnnnnnnnnnnnnnnnnnnnnnnnnnnnnnnnnnnnnnnnnnnnnnnnnnnnnnnnnnnnnnnnnnnnnnnnnnnnnnnnnnnnnnnnnnnnnnnnnnnnnnnnnnnnnnnnnnnnnnnnnnnnnnnnnnnnnnnnnnnnnnnnnnnnnnnnnnnnnnnnnnnnnnnnnnnnnnnnnnnnnnnnnnnnnnnnnnnnnnnnnnnnnnnnnnnnnnnnnnnnnnnnnnnnnnnnnnnnnnnnnnnnnnnnnnnnnnnnnnnnnnnnnnnnnnnnnnnnnnnnnnnnnnnnnnnnnnnnnnnnnnnnnnnnnnnnnnnnnnnnnnnnnnnnnnnnnnnnnnnnnnnnnnnnnnnnnnnnnnnnnnnnnnnnnnnnnnnnnnnnnnnnnnnnnnnnnnnnnnnnnnnnnnnnnnnnnnnnnnnnnnnnnnnnnnnnnnnnnnnnnnnnnnnnnnnnnnnnnnnnnnnnnnnnnnnnnnnnnnnnnnnnnnnnnnnnnnnnnnnnnnnnnnnnnnnnnnnnnnnnnnnnnnnnnnnnnnnnnnnnnnnnnnnnnnnnnnnnnnnnnnnnnnnnnnnnnnnnnnnnnnnnnnnnnnnnnnnnnnnnnnnnnnnnnnnnnnnnnnnnnnnnnnnnnnnnnnnnnnnnnnnnnnnnnnnnnnnnnnnnnnnnnnnnnnnnnnnnnnnnnnnnnnnnnnnnnnnnnnnnnnnnnnnnnnnnnnnnnnnnnnnnnnnnnnnnnnnnnnnnnnnnnnnnnnnnnnnnnnnnnnnnnnnnnnnnnnnnnnnnnnnnnnnnnnnnnnnnnnnnnnnnnnnnnnnnnnnnnnnnnnnnnnnnnnnnnnnnnnnnnnnnnnnnnnnnnnnnnnnnnnnnnnnnnnnnnnnnnnnnnnnnnnnnnnnnnnnnnnnnnnnnnnnnnnnnnnnnnnnnnnnnnnnnnnnnnnnnnnnnnnnnnnnnnnnnnnnnnnnnnnnnnnnnnnnnnnnnnnnnnnnnnnnnnnnnnnnnnnnnnnnnnnnnnnnnnnnnnnnnnnnnnnnnnnnnnnnnnnnnnnnnnnnnnnnnnnnnnnnnnnnnnnnnnnnnnnnnnnnnnnnnnnnnnnnnnnnnnnnnnnnnnnnnnnnnnnnnnnnnnnnnnnnnnnnnnnnnnnnnnnnnnnnnnnnnnnnnnnnnnnnnnnnnnnnnnnnnnnnnnnnnnnnnnnnnnnnnnnnnnnnnnnnnnnnnnnnnnnnnnnnnnnnnnnnnnnnnnnnnnnnnnnnnnnnnnnnnnnnnnnnnnnnnnnnnnnnnnnnnnnnnnnnnnnnnnnnnnnnnnnnnnnnnnnnnnnnnnnnnnnnnnnnnnnnnnnnnnnnnnnnnnnnnnnnnnnnnnnnnnnnnnnnnnnnnnnnnnnnnnnnnnnnnnnnnnnnnnnnnnnnnnnnnnnnnnnnnnnnnnnnnnnnnnnnnnnnnnnnnnnnnnnnnnnnnnnnnnnnnnnnnnnnnnnnnnnnnnnnnnnnnnnnnnnnnnnnnnnnnnnnnnnnnnnnnnnnnnnnnnnnnnnnnnnnnnnnnnnnnnnnnnnnnnnnnnnnnnnnnnnnnnnnnnnnnnnnnnnnnnnnnnnnnnnnnnnnnnnnnnnnnnnnnnnnnnnnnnnnnnnnnnnnnnnnnnnnnnnnnnnnnnnnnnnnnnnnnnnnnnnnnnnnnnnnnnnnnnnnnnnnnnnnnnnnnnnnnnnnnnnnnnnnnnnnnnnnnnnnnnnnnnnnnnnnnnnnnnnnnnnnnnnnnnnnnnnnnnnnnnnnnnnnnnnnnnnnnnnnnnnnnnnnnnnnnnnnnnnnnnnnnnnnnnnnnnnnnnnnnnnnnnnnnnnnnnnnnnnnnnnnnnnnnnnnnnnnnnnnnnnnnnnnnnnnnnnnnnnnnnnnnnnnnnnnnnnnnnnnnnnnnnnnnnnnnnnnnnnnnnnnnnnnnnnnnnnnnnnnnnnnnnnnnnnnnnnnnnnnnnnnnnnnnnnnnnnnnnnnnnnnnnnnnnnnnnnnnnnnnnnnnnnnnnnnnnnnnnnnnnnnnnnnnnnnnnnnnnnnnnnnnnnnnnnnnnnnnnnnnnnnnnnnnnnnnnnnnnnnnnnnnnnnnnnnnnnnnnnnnnnnnnnnnnnnnnnnnnnnnnnnnnnnnnnnnnnnnnnnnnnnnnnnnnnnnnnnnnnnnnnnnnnnnnnnnnnnnnnnnnnnnnnnnnnnnnnnnnnnnnnnnnnnnnnnnnnnnnnnnnnnnnnnnnnnnnnnnnnnnnnnnnnnnnnnnnnnnnnnnnnnnnnnnnnnnnnnnnnnnnnnnnnnnnnnnnnnnnnnnnnnnnnnnnnnnnnnnnnnnnnnnnnnnnnnnnnnnnnnnnnnnnnnnnnnnnnnnnnnnnnnnnnnnnnnnnnnnnnnnnnnnnnnnnnnnnnnnnnnnnnnnnnnnnnnnnnnnnnnnnnnnnnnnnnnnnnnnnnnnnnnnnnnnnnnnnnnnnnnnnnnnnnnnnnnnnnnnnnnnnnnnnnnnnnnnnnnnnnnnnnnnnnnnnnnnnnnnnnnnnnnnnnnnnnnnnnnnnnnnnnnnnnnnnnnnnnnnnnnnnnnnnnnnnnnnnnnnnnnnnnnnnnnnnnnnnnnnnnnnnnnnnnnnnnnnnnnnnnnnnnnnnnnnnnnnnnnnnnnnnnnnnnnnnnnnnnnnnnnnnnnnnnnnnnnnnnnnnnnnnnnnnnnnnnnnnnnnnnnnnnnnnnnnnnnnnnnnnnnnnnnnnnnnnnnnnnnnnnnnnnnnnnnnnnnnnnnnnnnnnnnnnnnnnnnnnnnnnnnnnnnnnnnnnnnnnnnnnnnnnnnnnnnnnnnnnnnnnnnnnnnnnnnnnnnnnnnnnnnnnnnnnnnnnnnnnnnnnnnnnnnnnnnnnnnnnnnnnnnnnnnnnnnnnnnnnnnnnnnnnnnnnnnnnnnnnnnnnnnnnnnnnnnnnnnnnnnnnnnnnnnnnnnnnnnnnnnnnnnnnnnnnnnnnnnnnnnnnnnnnnnnnnnnnnnnnnnnnnnnnnnnnnnnnnnnnnnnnnnnnnnnnnnnnnnnnnnnnnnnnnnnnnnnnnnnnnnnnnnnnnnnnnnnnnnnnnnnnnnnnnnnnnnnnnnnnnnnnnnnnnnnnnnnnnnnnnnnnnnnnnnnnnnnnnnnnnnnnnnnnnnnnnnnnnnnnnnnnnnnnnnnnnnnnnnnnnnnnnnnnnnnnnnnnnnnnnnnnnnnnnnnnnnnnnnnnnnnnnnnnnnnnnnnnnnnnnnnnnnnnnnnnnnnnnnnnnnnnnnnnnnnnnnnnnnnnnnnnnnnnnnnnnnnnnnnnnnnnnnnnnnnnnnnnnnnnnnnnnnnnnnnnnnnnnnnnnnnnnnnnnnnnnnnnnnnnnnnnnnnnnnnnnnnnnnnnnnnnnnnnnnnnnnnnnnnnnnnnnnnnnnnnnnnnnnnnnnnnnnnnnnnnnnnnnnnnnnnnnnnnnnnnnnnnnnnnnnnnnnnnnnnnnnnnnnnnnnnnnnnnnnnnnnnnnnnnnnnnnnnnnnnnnnnnnnnnnnnnnnnnnnnnnnnnnnnnnnnnnnnnnnnnnnnnnnnnnnnnnnnnnnnnnnnnnnnnnnnnnnnnnnnnnnnnnnnnnnnnnnnnnnnnnnnnnnnnnnnnnnnnnnnnnnnnnnnnnnnnnnnnnnnnnnnnnnnnnnnnnnnnnnnnnnnnnnnnnnnnnnnnnnnnnnnnnnnnnnnnnnnnnnnnnnnnnnnnnnnnnnnnnnnnnnnnnnnnnnnnnnnnnnnnnnnnnnnnnnnnnnnnnnnnnnnnnnnnnnnnnnnnnnnnnnnnnnnnnnnnnnnnnnnnnnnnnnnnnnnnnnnnnnnnnnnnnnnnnnnnnnnnnnnnnnnnnnnnnnnnnnnnnnnnnnnnnnnnnnnnnnnnnnnnnnnnnnnnnnnnnnnnnnnnnnnnnnnnnnnnnnnnnnnnnnnnnnnnnnnnnnnnnnnnnnnnnnnnnnnnnnnnnnnnnnnnnnnnnnnnnnnnnnnnnnnnnnnnnnnnnnnnnnnnnnnnnnnnnnnnnnnnnnnnnnnnnnnnnnnnnnnnnnnnnnnnnnnnnnnnnnnnnnnnnnnnnnnnnnnnnnnnnnnnnnnnnnnnnnnnnnnnnnnnnnnnnnnnnnnnnnnnnnnnnnnnnnnnnnnnnnnnnnnnnnnnnnnnnnnnnnnnnnnnnnnnnnnnnnnnnnnnnnnnnnnnnnnnnnnnnnnnnnnnnnnnnnnnnnnnnnnnnnnnnnnnnnnnnnnnnnnnnnnnnnnnnnnnnnnnnnnnnnnnnnnnnnnnnnnnnnnnnnnnnnnnnnnnnnnnnnnnnnnnnnnnnnnnnnnnnnnnnnnnnnnnnnnnnnnnnnnnnnnnnnnnnnnnnnnnnnnnnnnnnnnnnnnnnnnnnnnnnnnnnnnnnnnnnnnnnnnnnnnnnnnnnnnnnnnnnnnnnnnnnnnnnnnnnnnnnnnnnnnnnnnnnnnnnnnnnnnnnnnnnnnnnnnnnnnnnnnnnnnnnnnnnnnnnnnnnnnnnnnnnnnnnnnnnnnnnnnnnnnnnnnnnnnnnnnnnnnnnnnnnnnnnnnnnnnnnnnnnnnnnnnnnnnnnnnnnnnnnnnnnnnnnnnnnnnnnnnnnnnnnnnnnnnnnnnnnnnnnnnnnnnnnnnnnnnnnnnnnnnnnnnnnnnnnnnnnnnnnnnnnnnnnnnnnnnnnnnnnnnnnnnnnnnnnnnncggggacaaacagcagggatttgagcgtcatggatggtgatccttcaatggggattgcatgctaacaaactgcatctcgccggttttcgagagtgttgggcatgaaaaaccttgcatccaaaggaattaatcgccataaaaagggtcaacagctcatcaacgacaatccaagacttgcctaaacgacataactatttttttttgagacattgaatgaaacccgacaccattgaagcgactttgcctgcgattgatgtcactgagttgcgccgctgtctcggaacctttgtgaccggtgtgaccgtcatgacagcgctggacgcggatggtcagcctgatggcatcaccgcgaattcattcagttcgttgtctctggacccgccgttgatcgtctggagcctgcgtttgcaatcacgcagtttccaaacattcaaaaacgcccagcgttttgctgtcaatatattggcgcaagaccaagtgtctgtgtccaaccggttcgcgacttcgggtgtgaaaaattttgcagaggtgccccacacactaggccttggcggcgtgccattgatcgagggttgtgcttcttaccttgaatgctgtttagaagccacttaccccggcggtgaccatgaactgtttgtagcgagggtagagcggattcagatgaacgataagaagccgttggcctatggcaatggcgggtatttgggggttgaggttttggataaaacgaacagctcatagattttcaagacaacacttgctgcgttactcacctagagtttttctagattcttagtaccctttaggcttgacaagccgaccgccaaaattagttataaaaaactaatatatgattatttggtggaaaaattaaaaattacctactcacttctcggtccggttattaccaacggcgggtacatgaccttggacgcacttctggctggcttgatcttcgaccagactggtgatgtggacagagcgcatggcgagattccgctacagaacagtcaaggcgtttggcatgccagtgctgcgtttgctgaaaaaatcgacaccaacaaaaaaggctttgtcgccaatctccatgcaaaacacgaccttgatctgaatttgatcgcaaagggcaaagacgggttgaagccacatcgaagccttggtttgacacgcagacgggagttcggtgctgtttttaacagctacaagctgttttcagcgccagaactcacttggtatgcccaaggcgatgcagatgccatagggcggcttttaaagggcgtggagttcattggcaaacgcagggcgagtggctttgggcaagttggccgtctaagcatcgagccagcagacttggacggactggtcgggcatttcggtgaaccgcttagaccagtgccgcaagaactgtttaacggtgaccgctcatccgtcaaagcagatgctgcatggcgaccggcatattggcatccgctcaatcgagctatatgttttgtacccgaggcattgtgatgaacacctttgaatttttcaatcaatactttggaaggcatttggtgtcccaagagggtgagccacatgtggccgcttacagagctttgtccagcagtcacactctttccaaaggaacccctagcagactgtcttcgggttgggcaatcgtgcgtccttccatctccagcttgcaacttgccgtggctgcgagtggacttcatattgatcctcgcacacgtgtcgaagctttcatggcagagcttgaactatgggacggtttacagccaagaatttttttaatgtttgataaagcgcccgtgcctatagaaaaccttttcatgtcggtagatagctttgaagatttcaaacgggcaatgggcattcgtactgtcagcaagctttcaaaaatcatagaaccgactctgcatggaaagttacattttcatgtgtctgatgtggagatcaatacgccagaatggatggacattgtgcaaaaggtaattgatcaggctatgcgtcccacattgattgtcacacctagccatgagctttctcagacattgggtagcctgatacctaacgctgttgtcaggcaaccagaagaaacgaccagcgcggctgcatacaggaaggggaaagcagatgttttgatagcagctggcgcatgggctggactggacacaacggtaaggtggtcttcagtcgttgttccaagaattccgtttgagcgaccagttgtcttggatgggcatcaggaaagtcattttttgaattcacgcaattcggcgttgaggagaatgcgtcaggttataggtcgtggcttgcgttcgccagaagctgaatgccatgtcttcattcttgacagcaggatcaaagcgattgagttttttgtgccaaaaaggtttcgccctcagtgggctgaaaaagtttacttggaaggcgcaagaatagaggtgagcctatccaagcttgagcgtgacccgacagtccgaacaagggctttgtcacactatggtcaagactgtatggcttgcggattcaagccaagacacatttcgcaggtagacgttcatcacctgttcccactgagtgagggtggggagcggttgaccagtatccaagatgttgcggtgttatgcgctacttgtcacagactggcgcactcaacaaatccaccaatgaccgtggatgcaatcagggttgtaaatggaaaaatataggtgttacttaacaaaagatctgattcaatttggcatgaatatgactgttgacacgcaatcaaactgttggtgcaattactctaaccattaggagtaacaattgacttctatgctttgcaaaatcagtgcttgtgacaagggactggttattcatttacccaaggcgatggctgatctggcctgcgttgttgaagatacgtcagtgcgaatcactgtcgttcctggtcgaatcgtgatcgaggcagcaactgaatcaacacttgaagatatgttgtcggcctatgacccggaaaaacacggcggggaattgatggctacctcgcccataggcgtagagactttcgcttgatgtatcgcttatgatctccccccaattcatcagccgtatcagtttgcgccgcgacatcgttgaatcatttgacagctacccgttttgcttgcctgcggtgcgcatgctcgattacctagagatgcaccccaaaatca

SEQ ID NO: 250 - DNA, 11683 bp, Artificial Sequence
  Synthetic Oligonucleotide
  misc_feature (1)..(6595): n is a, c, g, or t
nnnnnnnnnnnnnnnnnnnnnnnnnnnnnnnnnnnnnnnnnnnnnnnnnnnnnnnnnnnnnnnnnnnnnnnnnnnnnnnnnnnnnnnnnnnnnnnnnnnnnnnnnnnnnnnnnnnnnnnnnnnnnnnnnnnnnnnnnnnnnnnnnnnnnnnnnnnnnnnnnnnnnnnnnnnnnnnnnnnnnnnnnnnnnnnnnnnnnnnnnnnnnnnnnnnnnnnnnnnnnnnnnnnnnnnnnnnnnnnnnnnnnnnnnnnnnnnnnnnnnnnnnnnnnnnnnnnnnnnnnnnnnnnnnnnnnnnnnnnnnnnnnnnnnnnnnnnnnnnnnnnnnnnnnnnnnnnnnnnnnnnnnnnnnnnnnnnnnnnnnnnnnnnnnnnnnnnnnnnnnnnnnnnnnnnnnnnnnnnnnnnnnnnnnnnnnnnnnnnnnnnnnnnnnnnnnnnnnnnnnnnnnnnnnnnnnnnnnnnnnnnnnnnnnnnnnnnnnnnnnnnnnnnnnnnnnnnnnnnnnnnnnnnnnnnnnnnnnnnnnnnnnnnnnnnnnnnnnnnnnnnnnnnnnnnnnnnnnnnnnnnnnnnnnnnnnnnnnnnnnnnnnnnnnnnnnnnnnnnnnnnnnnnnnnnnnnnnnnnnnnnnnnnnnnnnnnnnnnnnnnnnnnnnnnnnnnnnnnnnnnnnnnnnnnnnnnnnnnnnnnnnnnnnnnnnnnnnnnnnnnnnnnnnnnnnnnnnnnnnnnnnnnnnnnnnnnnnnnnnnnnnnnnnnnnnnnnnnnnnnnnnnnnnnnnnnnnnnnnnnnnnnnnnnnnnnnnnnnnnnnnnnnnnnnnnnnnnnnnnnnnnnnnnnnnnnnnnnnnnnnnnnnnnnnnnnnnnnnnnnnnnnnnnnnnnnnnnnnnnnnnnnnnnnnnnnnnnnnnnnnnnnnnnnnnnnnnnnnnnnnnnnnnnnnnnnnnnnnnnnnnnnnnnnnnnnnnnnnnnnnnnnnnnnnnnnnnnnnnnnnnnnnnnnnnnnnnnnnnnnnnnnnnnnnnnnnnnnnnnnnnnnnnnnnnnnnnnnnnnnnnnnnnnnnnnnnnnnnnnnnnnnnnnnnnnnnnnnnnnnnnnnnnnnnnnnnnnnnnnnnnnnnnnnnnnnnnnnnnnnnnnnnnnnnnnnnnnnnnnnnnnnnnnnnnnnnnnnnnnnnnnnnnnnnnnnnnnnnnnnnnnnnnnnnnnnnnnnnnnnnnnnnnnnnnnnnnnnnnnnnnnnnnnnnnnnnnnnnnnnnnnnnnnnnnnnnnnnnnnnnnnnnnnnnnnnnnnnnnnnnnnnnnnnnnnnnnnnnnnnnnnnnnnnnnnnnnnnnnnnnnnnnnnnnnnnnnnnnnnnnnnnnnnnnnnnnnnnnnnnnnnnnnnnnnnnnnnnnnnnnnnnnnnnnnnnnnnnnnnnnnnnnnnnnnnnnnnnnnnnnnnnnnnnnnnnnnnnnnnnnnnnnnnnnnnnnnnnnnnnnnnnnnnnnnnnnnnnnnnnnnnnnnnnnnnnnnnnnnnnnnnnnnnnnnnnnnnnnnnnnnnnnnnnnnnnnnnnnnnnnnnnnnnnnnnnnnnnnnnnnnnnnnnnnnnnnnnnnnnnnnnnnnnnnnnnnnnnnnnnnnnnnnnnnnnnnnnnnnnnnnnnnnnnnnnnnnnnnnnnnnnnnnnnnnnnnnnnnnnnnnnnnnnnnnnnnnnnnnnnnnnnnnnnnnnnnnnnnnnnnnnnnnnnnnnnnnnnnnnnnnnnnnnnnnnnnnnnnnnnnnnnnnnnnnnnnnnnnnnnnnnnnnnnnnnnnnnnnnnnnnnnnnnnnnnnnnnnnnnnnnnnnnnnnnnnnnnnnnnnnnnnnnnnnnnnnnnnnnnnnnnnnnnnnnnnnnnnnnnnnnnnnnnnnnnnnnnnnnnnnnnnnnnnnnnnnnnnnnnnnnnnnnnnnnnnnnnnnnnnnnnnnnnnnnnnnnnnnnnnnnnnnnnnnnnnnnnnnnnnnnnnnnnnnnnnnnnnnnnnnnnnnnnnnnnnnnnnnnnnnnnnnnnnnnnnnnnnnnnnnnnnnnnnnnnnnnnnnnnnnnnnnnnnnnnnnnnnnnnnnnnnnnnnnnnnnnnnnnnnnnnnnnnnnnnnnnnnnnnnnnnnnnnnnnnnnnnnnnnnnnnnnnnnnnnnnnnnnnnnnnnnnnnnnnnnnnnnnnnnnnnnnnnnnnnnnnnnnnnnnnnnnnnnnnnnnnnnnnnnnnnnnnnnnnnnnnnnnnnnnnnnnnnnnnnnnnnnnnnnnnnnnnnnnnnnnnnnnnnnnnnnnnnnnnnnnnnnnnnnnnnnnnnnnnnnnnnnnnnnnnnnnnnnnnnnnnnnnnnnnnnnnnnnnnnnnnnnnnnnnnnnnnnnnnnnnnnnnnnnnnnnnnnnnnnnnnnnnnnnnnnnnnnnnnnnnnnnnnnnnnnnnnnnnnnnnnnnnnnnnnnnnnnnnnnnnnnnnnnnnnnnnnnnnnnnnnnnnnnnnnnnnnnnnnnnnnnnnnnnnnnnnnnnnnnnnnnnnnnnnnnnnnnnnnnnnnnnnnnnnnnnnnnnnnnnnnnnnnnnnnnnnnnnnnnnnnnnnnnnnnnnnnnnnnnnnnnnnnnnnnnnnnnnnnnnnnnnnnnnnnnnnnnnnnnnnnnnnnnnnnnnnnnnnnnnnnnnnnnnnnnnnnnnnnnnnnnnnnnnnnnnnnnnnnnnnnnnnnnnnnnnnnnnnnnnnnnnnnnnnnnnnnnnnnnnnnnnnnnnnnnnnnnnnnnnnnnnnnnnnnnnnnnnnnnnnnnnnnnnnnnnnnnnnnnnnnnnnnnnnnnnnnnnnnnnnnnnnnnnnnnnnnnnnnnnnnnnnnnnnnnnnnnnnnnnnnnnnnnnnnnnnnnnnnnnnnnnnnnnnnnnnnnnnnnnnnnnnnnnnnnnnnnnnnnnnnnnnnnnnnnnnnnnnnnnnnnnnnnnnnnnnnnnnnnnnnnnnnnnnnnnnnnnnnnnnnnnnnnnnnnnnnnnnnnnnnnnnnnnnnnnnnnnnnnnnnnnnnnnnnnnnnnnnnnnnnnnnnnnnnnnnnnnnnnnnnnnnnnnnnnnnnnnnnnnnnnnnnnnnnnnnnnnnnnnnnnnnnnnnnnnnnnnnnnnnnnnnnnnnnnnnnnnnnnnnnnnnnnnnnnnnnnnnnnnnnnnnnnnnnnnnnnnnnnnnnnnnnnnnnnnnnnnnnnnnnnnnnnnnnnnnnnnnnnnnnnnnnnnnnnnnnnnnnnnnnnnnnnnnnnnnnnnnnnnnnnnnnnnnnnnnnnnnnnnnnnnnnnnnnnnnnnnnnnnnnnnnnnnnnnnnnnnnnnnnnnnnnnnnnnnnnnnnnnnnnnnnnnnnnnnnnnnnnnnnnnnnnnnnnnnnnnnnnnnnnnnnnnnnnnnnnnnnnnnnnnnnnnnnnnnnnnnnnnnnnnnnnnnnnnnnnnnnnnnnnnnnnnnnnnnnnnnnnnnnnnnnnnnnnnnnnnnnnnnnnnnnnnnnnnnnnnnnnnnnnnnnnnnnnnnnnnnnnnnnnnnnnnnnnnnnnnnnnnnnnnnnnnnnnnnnnnnnnnnnnnnnnnnnnnnnnnnnnnnnnnnnnnnnnnnnnnnnnnnnnnnnnnnnnnnnnnnnnnnnnnnnnnnnnnnnnnnnnnnnnnnnnnnnnnnnnnnnnnnnnnnnnnnnnnnnnnnnnnnnnnnnnnnnnnnnnnnnnnnnnnnnnnnnnnnnnnnnnnnnnnnnnnnnnnnnnnnnnnnnnnnnnnnnnnnnnnnnnnnnnnnnnnnnnnnnnnnnnnnnnnnnnnnnnnnnnnnnnnnnnnnnnnnnnnnnnnnnnnnnnnnnnnnnnnnnnnnnnnnnnnnnnnnnnnnnnnnnnnnnnnnnnnnnnnnnnnnnnnnnnnnnnnnnnnnnnnnnnnnnnnnnnnnnnnnnnnnnnnnnnnnnnnnnnnnnnnnnnnnnnnnnnnnnnnnnnnnnnnnnnnnnnnnnnnnnnnnnnnnnnnnnnnnnnnnnnnnnnnnnnnnnnnnnnnnnnnnnnnnnnnnnnnnnnnnnnnnnnnnnnnnnnnnnnnnnnnnnnnnnnnnnnnnnnnnnnnnnnnnnnnnnnnnnnnnnnnnnnnnnnnnnnnnnnnnnnnnnnnnnnnnnnnnnnnnnnnnnnnnnnnnnnnnnnnnnnnnnnnnnnnnnnnnnnnnnnnnnnnnnnnnnnnnnnnnnnnnnnnnnnnnnnnnnnnnnnnnnnnnnnnnnnnnnnnnnnnnnnnnnnnnnnnnnnnnnnnnnnnnnnnnnnnnnnnnnnnnnnnnnnnnnnnnnnnnnnnnnnnnnnnnnnnnnnnnnnnnnnnnnnnnnnnnnnnnnnnnnnnnnnnnnnnnnnnnnnnnnnnnnnnnnnnnnnnnnnnnnnnnnnnnnnnnnnnnnnnnnnnnnnnnnnnnnnnnnnnnnnnnnnnnnnnnnnnnnnnnnnnnnnnnnnnnnnnnnnnnnnnnnnnnnnnnnnnnnnnnnnnnnnnnnnnnnnnnnnnnnnnnnnnnnnnnnnnnnnnnnnnnnnnnnnnnnnnnnnnnnnnnnnnnnnnnnnnnnnnnnnnnnnnnnnnnnnnnnnnnnnnnnnnnnnnnnnnnnnnnnnnnnnnnnnnnnnnnnnnnnnnnnnnnnnnnnnnnnnnnnnnnnnnnnnnnnnnnnnnnnnnnnnnnnnnnnnnnnnnnnnnnnnnnnnnnnnnnnnnnnnnnnnnnnnnnnnnnnnnnnnnnnnnnnnnnnnnnnnnnnnnnnnnnnnnnnnnnnnnnnnnnnnnnnnnnnnnnnnnnnnnnnnnnnnnnnnnnnnnnnnnnnnnnnnnnnnnnnnnnnnnnnnnnnnnnnnnnnnnnnnnnnnnnnnnnnnnnnnnnnnnnnnnnnnnnnnnnnnnnnnnnnnnnnnnnnnnnnnnnnnnnnnnnnnnnnnnnnnnnnnnnnnnnnnnnnnnnnnnnnnnnnnnnnnnnnnnnnnnnnnnnnnnnnnnnnnnnnnnnnnnnnnnnnnnnnnnnnnnnnnnnnnnnnnnnnnnnnnnnnnnnnnnnnnnnnnnnnnnnnnnnnnnnnnnnnnnnnnnnnnnnnnnnnnnnnnnnnnnnnnnnnnnnnnnnnnnnnnnnnnnnnnnnnnnnnnnnnnnnnnnnnnnnnnnnnnnnnnnnnnnnnnnnnnnnnnnnnnnnnnnnnnnnnnnnnnnnnnnnnnnnnnnnnnnnnnnnnnnnnnnnnnnnnnnnnnnnnnnnnnnnnnnnnnnnnnnnnnnnnnnnnnnnnnnnnnnnnnnnnnnnnnnnnnnnnnnnnnnnnnnnnnnnnnnnnnnnnnnnnnnnnnnnnnnnnnnnnnnnnnnnnnnnnnnnnnnnnnnnnnnnnnnnnnnnnnnnnnnnnnnnnnnnnnnnnnnnnnnnnnnnnnnnnnnnnnnnnnnnnnnnnnnnnnnnnnnnnnnnnnnnnnnnnnnnnnnnnnnnnnnnnnnnnnnnnnnnnnnnnnnnnnnnnnnnnnnnnnnnnnnnnnnnnnnnnnnnnnnnnnnnnnnnnnnnnnnnnnnnnnnnnnnnnnnnnnnnnnnnnnnnnnnnnnnnnnnnnnnnnnnnnnnnnnnnnnnnnnnnnnnnnnnnnnnnnnnnnnnnnnnnnnnnnnnnnnnnnnnnnnnnnnnnnnnnnnnnnnnnnnnnnnnnnnnnnnnnnnnnnnnnnnnnnnnnnnnnnnnnnnnnnnnnnnnnnnnnnnnnnnnnnnnnnnnnnnnnnnnnnnnnnnnnnnnnnnnnnnnnnnnnnnnnnnnnnnnnnnnnnnnnnnnnnnnnnnnnnnnnnnnnnnnnnnnnnnnnnnnnnnnnnnnnnnnnnnnnnnnnnnnnnnnnnnnnnnnnnnnnnnnnnnnnnnnnnnnnnnnnnnnnnnnnnnnnnnnnnnnnnnnnnnnnnnnnnnnnnnnnnnnnnnnnnnnnnnnnnnnnnnnnnnnnnnnnnnnnnnnnnnnnnnnnnnnnnnnnnnnnnnnnnnnnnnnnnnnnnnnnnnnnnnnnnnnnnnnnnnnnnnnnnnnnnnnnnnnnnnnnnnnnnnnnnnnnnnnnnnnnnnnnnnnnnnnnnnnnnnnnnnnnnnnnnnnnnnnnnnnnnnnnnnnnnnnnnnnnnnnnnnnnnnnnnnnnnnnnnnnnnnnnnnnnnnnnnnnnnnnnnnnnnnnnnnnnnnnnnnnnnnnnnnnnnnnnnnnnnnnnnnnnnnnnnnnnnnnnnnnnnnnnnnnnnnnnnnnnnnnnnnnnnnnnnnnnnnnnnnnnnnnnnnnnnnnnnnnnnnnnnnnnnnnnnnnnnnnnnnnnnnnnnnnnnnnnnnnnnnnnnnnnnnnnnnnnnnnnnnnnnnnnnnnnnnnnnnnnnnnnnnnnnnnnnnnnnnnnnnnnnnnnnnnnnnnnnnnnnnnnnnnnnnnnnnnnnnnnnnnnnnnnnnnnnnnnnnnnnnnnnnnnnnnnnnnnnnnnnnnnnnnnnnnnnnnnnnnnnnnnnnnnnnnnnnnnnnnnnnnnnnnnnnnnnnnnnnnnnnnnnnnnnnnnnnnnnnnnnnnnnnnnnnnnnnnnnnnnnnnnnnnnnnnnnnnnnnnnnnnnnnnnnnnnnnnnnnnnnnnnnnnnnnnnnnnnnnnnnnnnnnnnnnnnnnnnnnnnnnnnnnnnnncgccacgcaccagcgcgagccgcgggtgcgaaagagagcgagggccggcgttgcatggtgtagatccagtggccggcgtgcagacgcgctgcacacaaaacatgattgtaatacttgggcaggcaataaaaaaacccggaaaatttgcaccatccagacagaaggcaaacacttcttccggagtacggccgtgcatgcgtaccgttttttctagcacggccatcacatcacctcatccaatttgtttattgctgccgcaccgaacggtgccgcgtagcgcgcccagtgagttggggctagggctctatcgaaactgcgcagataagagactacatcaaaagtattaattcctatagactgataaatcaagtccctgcttagctgtttttcacaacgaggtgccagtccatggatcacacaatcacaaaaccagcgcgcgtcgaaggctacgccgtccaccgtatggtcgccgctttggtagacgacgcacccgcgctgcatctcgatgccggcgacaccctaaccattcgcaccgatgcgcccctgcccagtgggcatattgtgggcttctcgttgcgtgcctgtgtctctgtcaagaacaaggggcggcaccgctatttccccagtgctgactggcgctctcgccacagttggctcgagcgaaaaggcgtacagcatggcttcgaagtcatcaccgtgcattgctctgccaaacacttggtcatcgaaaaacaatctggccaattcagtgttgatgacaccttgtttacgggtgtcctcaaagttgtcgattacgacaagtacaacgccgcgctgctatcgggcatcggcaacacggcacgcgccttcgggttcggcatgttagttatttaatcttcaccaagggaaaccatgccaaagcaaaccatcgttatcgacaccgttatcaccacacaaggcccgctgtctatcgccatgcccgtcgcacagggcacacgggcaaacgactacaacaactttccattgatggcccgtgggcaggatgaactgggcgccgtattgcaaacagcctacctgcccgctagtacggtgcgtgggttccttcgccgtgcggctggcattgccgcgatggaaaagcgcggcgtaggcaacaccacattgcagcaagcgtattccgatattttggggcagtctaaagacgccaaagaaacggtggacttggtccagctgtctgccatacgcgaggcagaccccatactcgacctctttggttcgtggtctatcaagtcgcgcttactggtgagtaacttcttgcccacaaccaacgtgttgccacaggccatcacgggtgtcagaaaagacttagaagacaccgaaggcgtgttgaccctcttgagtgagaccgaccaacaggcctattacaaccgcagtgacatcaacagccagcgcgcagccgctgacgcagtcgtcaagggcctcactcgtgacatcagaaaagccaaaaaagacggcaacgcactcactgacctagaggcggcgcttgtgatcgccgacgcgaaggccgtggccttaaaaacggatatgggcgagatggcgaactcatcacgcaccatcaccgagttttttgccttgcccgctaacatggccttgcacggacgcatcgtggttgagcaagccaaggagcgtgaccttgcattgatcgtggaggcgctagacaccctgtctattcgccccatgttgggcgcccaagtagcgcgcggctgtggcgaggtggcggggcagttcaccatcaaggtggatggcatcgtggtcaagacagtcaccacgggcggctgggtgcctgcgcaggtcgaagacttctcgtctgatgcgcctgcaccagccgctgtctaattgcacgtggaccagttacgaatcaccgcccacctcagcggcccccttgtgacggggggcggctacctcacctttgatgcgttgctcgcctctgccacttacagcttgacgcaagacattgagcaggcccacaaccagctgccacttaaacaagttgccggcctgtaccacgccagcgccgccatttatgaacccgttgccatcggggcattggctattgtgcaagccatgcgtcccgacgacctgtggcttgaccaccagtggttaaagaagaacaagcgcggcgctgtgcacaccaagttcgacaacctatccgacaacatactgaccacctacaagaccatagcggcaccgaccatgacctggtactgcgaaggtgatgcagaccgcattcgtgtcttactagcgcatctacccctcattggtaaaaagcgggtttgctccgtgacccagtggaccgttgaggcgggcgagcttgacggtctgcatggctatgccgatgagccactgcggcctgtacccgttgagctgtgggatggtgacaagagcagccccatcgtggacgcggcatggcgtcccgcttattgggatgcgactgggcgcaccgcttgttttgtgaactgagggcacaccatgacgacgcttgaatttttaatcagtacttcggtcgccacctcgttgcgcaaaccggtgatgcgcaggccgatgcaacgcgcacgctgtcgtctggccacaaaatggccaagggtggcacagcacaacgcattgcatcgggttgggcggtgatctcagaagatgtcagcacgcttcaattcaagctggcggccaccggcttaagttacggcggacagacgcgttacgaggcttggctagatgcgcttgaggcatttagcggcaagcccatcatgcttattgagtttgataagaagcctgtaccagttaccaacctgtttcgtacgcatgatttacgagcggtacaggtgtgttcgcccggcggggcggcgctatttgactttacgcaagaacccaccgctgagagtggtaaagcgcacaaagtgctgtgggaattaaaactagaaaggctaaaaagcgctgttgaatcaagcgcttgagccacatgagatcaagccaccctctaaatgggtggttactagaacaacgcaggtgtgaatccaacatgtccgccggatcaagccaccctctaaatgggtggttactagaaccgcgcaggtggttgattaaccgagcctaccgatcaagccaccctctaaatgggtggttactagaactcaccggtcagccactcgtttgttttgcggatcaagccaccgtctaaataggtgggtactagaacatcttgtggctcgacacagcgcttttcagcagatcaagccaccctctaaatgggtggttactagaactacagagccaccacatcgcgcaacgcattcggatcaagccaccctctaaatgggtggttacttatttacagacataccatgggccgccgtgcccttattaggagttcaccgatgtttcgttcctcagagcagcagcatttctgcaatgtgcttattaagcatttgaaacgcgtcgatgcgcccatattgctggaaggcggggtgggtcttgggaagacgcgtgcctacctggccgcactggcaactacgacgcaaacggttgccattgtgttacccacacaccaactgattgaccagttgctggctagcgctgacttgtcagccgttgccttgccattggccgtgttcaggccagccagtcggtttgacacacgggaggcgtaccaagcgcagcgagaggcggcccgtgctgcgcgtgtcatgctctgcaccgctgcaagcgtgattattgaccaacgccttgcgggggcttacaacggcgcaacacagcgtgatgtggtgttatttgatgaagccgaccagttacccgatatggcggcattgcagagcgactttgtgattgaggcggcgctactgcagggccagccgctgcacgcggccttagagcgcataagcaccacccgttcacagtcggttgaggccgagcaaaaggctgctgcgcgggtcatgcttgagatattggccgaaccggtgggctacgcatccgtcgggcttgatgatgatggcaatgcgcggctacaccacgccctgccaggtcgcttattaaagaaaattagcaatcgcggtagcacggtgtttctttctgcaacgctgacccacaacgataagtttgatgacttcaagatcgccatgggcctagacgcggtgagtagcctgtcaacaagcattgagccagaacagcatggcacgctcgacttcaccgtacacgcgcacgaggtggacacgcctgactggtttgcggccaccgttcagtgcatacaaagcgcgcagcgccccacgttggtggtcacacctagccatgacctcacagagcggctacaaaccgccgtgggtgagcaagcagacttgcttatacgtgcgggtgcatgggcgggtcttgacacgccaacgcgctggcgtaccgtggttattccgcgcgtgccatttggcgcaccagtcattgttgacggggtggcggtcacgtcttacttggccgccaaggtgacggccagtcggcggatgcgccaagcaattggccgtgggcttagaacacctgaggcggtgtgcacggttgtggttttggatgcgcgggcacacaacttaggtcgctttgtgccagagcgttttgcggcagattggtcgtctcggcaagtgtttgaggagggtgcccgccatgcggtggtgctgtccaaagcggagcgcgaccccgctttggccaaagccgcgctcagacactacggcgctcaatgccaacaagcgggttgttccgtgacagaggcgtgtcagctggacgtgcaccaccttgaccccgtaagcgaaggcgtgcgccgcacaaccttgaaggatgtgaccgtgctgtgtgcaaaccaccaccgacaggcccaccacgacatgcaaatggggctgaacgtgtcgtagcgcaacaaaaaacccgccatacctttgggtacgcgggttttgggagttctggcaaggcctgaaacctaaatgtggtggtgataggtggacttgaaccaccgaccccagcattatgaatgctgtgctctaaccaactgagctatatcaccgagcctgaaattatagccaaaattctcag

SEQ ID NO: 251 - DNA, 11678 bp, Artificial Sequence
  Synthetic Oligonucleotide
ctgcaaacggctgacaagaacggtaagcgcgcctttggttgggactctgacatgcaagcctacgcgcctaaagcgcaccttgggtcagcaatcatcaactgggcaccttattacagcaaggctgtaaaagacacgctggacggtacctggagcacgggtacttcatggtggggcgttaaagaaggcgccattgacatggtctccgtcgcggacgatgtacctgctgacatcaaggccaaagttgatgagatccgcgcgggtctgaaagacgggagctttgctgtttggacgggccccattgtggacaacaccggcaaagagcaagtggccgctggcgtaaaggcagatgacgcgttcttgggcggtatcaagttctacgtcaaaggcgttgaaggccaagtgcccggcaattaagcgggggtcagcctgactgacaatggccagcgcttcggcgcctggccatttttttacgcctaaaatgcgaggcaaagggagtcaaaaccaatgagtatcaagagcgataagtggattcgcaagatggctgaatccacgggcatgatcgagccgttcgaacccggccaggtgcgcgaggtggatggcaaacgaatcatcagctatggcaccagcagctacggttacgacatccgctgcgccccggaattcaaggttttcaccaatatccacagcacggtggttgatcccaagaacttcgatgaaaagagctttgtcgatttccacggcgactcgtgcatcattccgcccaacagtttcgccctggctcgaaccgtcgagtacttccgcattccgcgcaacgtgttgaccgtttgcttggggaaaagcacctatgctcgctgcgggatcatcgtgaatgtgacgcccttcgagcccgagtgggaagggtatgtcaccttggaattttcgaacaccacgccgttaccagctcgtatctatgcgggtgagggttgcgcacaagtgctcttttttgagagcgacgaggtgtgtgaagtcagttacaaggaccggggcgggaaataccaaggtcaggtcggtgtgaccctgccaaaggcttaattttcggctgcttgtggtgatttgcccacgggagccggcctcagaggtttcgtagggtccctgaaacgtgggacaatcagcggttacatgaccgcatctttctccgaactgtccttagcaccgtcactggctaaggccgttgcccaaatgggctacgaaaccatgacgcccatccaagcccaagccatccccgtggtgttgcaagggcgagacgtgatgggcgcggcccaaaccggtaccggtaaaacagccgccttttcattaccgctgttgcagcgtttgctgcgtcacgaaaatgcctccgtctcacccgcacgccaccctgtgcgggcgctggtattgctcccaacacgtgagttggctagccaagtcgaggatcaaattcggcagtacgccgcttttaccaaactgcgcagcacagtggtgtttggcggtatggacatcaagccccaaattgcggctttgcgccaaggggtcgaagtgctggttgctacgccgggccgtttgttggaccacatcgaggctaaaaccgcggtactgaatcaggttgagtacgtggtgctcgacgaggccgatcgcatgctggacatgggctttgccgacgatattcaagccatttccaagcaaacgccagccacgcgacaagccctgctgttttcggcgacctatcccgatactatcgccacactgtcggcccggctgatgcgtcaaccgcagatggtgaaagtcgacaccacccatgacacccatgccatcgaggagtggtttttcgaagtcgagcccgatacccgattggatgcggtcacgcggttgctaaaccactaccaacccacctccaccgtcgcgttttgcaacacccgggtgcaatgcaacgatttggtgcaaattctgcgtgcgcatggcttctcggccctgacgctgcacggcgacctcgatcagcgcgatcgcgatcaagtactgattcaatttgccaaccacagttgttcggttttagtggccaccgatgtggcggcacgcggtttggatattgccgatctcgccgctgttatcaatgtcgacaccacgcctgacccacaggtctacacccatcgcattggtcgtaccggtcgcgcaggcgcgactggcttggctttgagtctggtcaccatgcccgagatgagtcgcgtggcacgcatcgaagaggtcaacaaccgtccagcgcggtgggcgaatttgtcaacgcttcaagcgacgggcagcgctttgaaggcgccgatgcgcaccttgcaaatcgcgggtggacgaaaagagaaaatccgtgcgggcgatattttgggcgccctaaccggcgaggcggggttcgataaatccgaagttggcaagatcagcttaggcgaattttcaagctacgtcgcggttgcggtgcccatcgcccagcgggcttgtgacgccctcaacgcgggccgcgtgaaaggcaagcgcgtgaaagtgcgcttgctcgataactgatctcaggcggctggccagtcaaacatcaaacccaggttttgcaccgccgccccgctggcgcctttacccaagttgtccaagcgggccaccagcaggctgtggccatgcgtgtcgttgccgaacacgtggatctctaggtcgttggtatcggccagcgccaatgcatcgagcttgccggtgtcggcggcatcctcgtgcctcacgacccgcacaaagcgactgttcccgtagtgcgcctcgaacaccccagccaagcgggccttgtcggtacccgctgccagttggtcgcggtgcaagggcaattgcaccaacataccttgtgcaaaattgcccacgctggggacaaataaggggcgcgtttgcaagcccgtccactgcatgatctcggggatgtgcttgtggctgagtcccaacgcataaagctcatacgcgggcgcactgttggcttcataagcctcaatcatggtgcgaccgccgccactgtagccactcacgctgggcaagcaaaccggcgttgtcgccggcagtacgccagcgtcaatcagggggcgcaacagggcgatggcacccgtggcgtagcaacctgggttggccacacgttccgcctgctggacggcggcggcctgcgacgcacacaactcagggaagccgtaaacccagcccggggcgacgcgatgcgctgtcgaggcatccacaatccgcggtgctttttgacccgccgctttcagctcgtccaccaacgcgaccgtctcgcgggcggcatcatcgtgcaggcactgcaccaccgcatcggcctgcgccaacagggcgcgtttggcagccacgtctttgcgcaaagcggggtcgatttgcagcaactgaacgtgcggcatcgtcgccagacgctcgcgaatctgaagtcccgtggtgccggcttcgccgtcgatgaaaatattagtcatggctgatatttggggttgcggcccgcgtcgccgtcagtttggtgaaaaatttctgcactgcaacatgatacagtctacggttggtaatttcctctgactggcctagcagggttgcccccgtttttgccataaaagggaagtgatttgtccctactttgagagccctgacatgaagatccacgagtaccaaggcaaagagatcctgcgccaattcgaggtgccagttccccgcggcatccctgcctttacagtgcaagaagcggttgaagccgcacaaaaattgggcggccctgtctgggttgtcaaagcgcaaatccatgccggtggccgaggcaaaggcggcggtgtgaaattggcccggtcaattgacgaagtcaagcaactcgctggcgagattttgggcatgcagttggtcacgcaccaaaccggccctgagggacaaaaagttcgccgcctcttgatcgaagacggcgccgatatcaagaaagaatattacgtgtccgcggtcaccgaccgcgccagccaacgcgttgccatcatggcttccagcgaaggcggtatggacatcgaagaggtggcgcacaagacgcccgagaaaatcatcaaggtatttgtcgaccccgcaaccggtctgaccgccgcgcaagcgaccgagctggcaaacggtattggtgtgccagcggcatcaaccgccgctgcggctgatgtgtttcaaaaactgtacaaatgctacatggacaccgacgcctcattggtcgaagtgaaccccctaatcctcgaaggcaacggcggcatcaaagcgctcgacgccaagttcaactttgacagcaacgccctgttccgtcatcccgaaatcgtcgcgtaccgtgaccttgacgaagaagacgcggccgaagtcgaagcctctaaatttgacctcgcctacatcagcctcgacggcaacatcggttgcttggtgaacggcgccggtttggccatggccaccatggacaccatcaagttgttcggtgccgagcccgctaacttcctagacgttggcggaggtgccacgcctgagaaagtaactgaagccttcaagatcatgctgaagaaccccaaagtgaaggccattttggtcaacatctttggcggcatcatgcgttgcgacacgattgcacagggtgttatcaccgcgtgtaaggcggtcaacctgggcgtgccgttggtggtgcgcatgaagggtaccaacgaagagctgggtaagcagatgttggcagagtctggtctgccgatcatcagcgccgactccatggccgaggccgccgaaaaaattgttgctgcggttaaagcctgagcgaaaaggaataagcatgtccatcctgattaataaagacaccaaagtcatcacccaaggtatcaccggtaagaccggtcaattccacacggaaaagtgccaagagtacgcaaacggcaagaactgtttcgtcgcgggtgtgaaccccaaaaaagcgggcgaaagcattttcaacatcccgatttacggctctgtgaaagaagcggccagcaccaccggtgcaaccgtatctgtcatctacgtgccgcccgcaggcgctgccgccgccatctgggaagcggttgaagccgacctcgacttggccatctgcatcaccgaaggtattcctgtgcgcgacatgttggaagtgcgtaaccgcatggccgccaaagaagccgccggtggcaaaaagaccttgctgttgggcccgaactgccctggtttgatcacgcctgacgaaatcaaaatcggcatcatgcccggccacatccacaagaagggccgcattggcgtggtcagccgctccggcacgctgacctacgaagcggtgggccaattgaccgagttgggtctgggccaatccagtgctgttggcattggtggcgaccccatcaacggcttgaagcacatcgatgtcatgcgcatgttcaatgacgaccccgacacagacgccgtcatcatgatcggcgaaatcggtggtcccgatgaagccgaagccgcccgttggtgcaaagaaaacatgaagaagccagtggtcggctttatcgctggtgtgaccgcaccggctggtaagcgcatgggccatgcgggtgccttaatctctggtggtgaagacaccgctgaggccaagctggccatcatggaagcttgcggtttcaccgtgacccgcaacccgtccgaaatgggtaagctgctgaagcgcttgctgtaaaccggatcggcagcgtcagcatgccgctggcgcgtgttcgtgcaaaaatggcaacgtgttccatgcgttgccattttttttgatacgttcaatcgaaagaaaataaccggtgcttgagtttttaacccctgaattctggatcgcggtgggtcaaattatcttgattgatattttgctcggcggcgataacgcggttgtcatcgctttggcctgtcgacagctgcctgaaaaccagcgcatgcagggcatcatgtggggcactgtgggcgcgattggtttgcgggtgttgcttatcgtttttgcgctaacacttctgaccatcccttatctgaaaatcgttggcggtttgttgctggtgtggattggtgtgaagctcatgatccccgatgaggaaggagaccatagcgtcgtcgatgccagtgacaagctctggtcagccgtcaaaacagtcatcttggccgacttggtcatgagcatcgacaacgtcatggccattgctggcgccgcgcagggtgctgccgagcatcaacaagtgccgctggtaatttttggcctgctggtcagcgtgcccatcatcgtatggggcagtcaattggttttgaaaatcatggacagcatgcccattgtcatcaccttgggtgcaatgttgttgggctggattgccggcatcatgatttggaccgacccggtgctggtcgatgtgctgccgtctgagcccctgatgggtttgtctttgcgccattgggcggggtttgtcggtgcttgcttggtgtgggtgattggtcgtgcggtcatcgcaaagcgccctaaacccttaggggcttgacgttatctctgagcgccttagacaccgtgcatcgttggttcaactttggaaacaacccggacactcattcatgcaactttccagcaaccgtaaccttggcttcaccttgattgaattgatggtggtggtggccgtggtgggcatcttggctgcagtggccattccgcaatatcaaaactacacccaacgcgcgcggtgggccgccaacctcggcgccattgccgcgttacaaggtacggtcagtgagtgcctcggccaacaagccaacgacatcacgttatgcgacacgtttggcgaacttggggtcaccagtggcctgaataccgacggcgtcatgccgttgccccatggcacggttgccgtgcaagccagcggtgatgccaccgcgattcgggttgttttaacgggcgctgccaatgcgggtaattgcatcatcacagccagcttgacgcccgcagaaggagcccaaatgctgcaatgggccctcacgcgggacaccacacaaactaaatgtaccgctgccaacacgggcgttgacgcagcaggctgattcgggcgtaagatgcggctttaatttttggagcccagcatggcaaaaggtcagcaaaaaacaaacaaggaatccaaaaagcccaagaaggccgccgccgccgcccctgctttgaacagtgcgcaagaacccgtgcgtgccgtggtcaccacatccgtgatgcccaaaggcaaggctaaaaataaaccggccttctaatatttattagctatttattttaaaaattaaacaataaaagagtacttattgactattatgttgtgaagtaatcgacttgccttccgcaagccgttgattcacacatggggcaggctctgcaaacattcactcgacgggcgacgctcaaaaccccggtcatcatgcgggggtacctcacgcttgatgcactgctgatggcggagttggtcactggcgacgtctcgcacttactcaagcgagatgcgcagttgtactacgccagcgccgcctttttggtggacccgcttgaggaaaagcaaaaggcatcatttgttgccagcatgcggcccgagcaccacccggagctccgcgagctcatcgcccccaacacgcacacacccaacgcgccaccgcttttgcacacgcatcggtcgcgtggcaatgtcaacgacgtggcaattggacgcgctcgccgcaaagaagcgggcaacatcctcaaccaatacgtggcccacgctgctgcagccgtcgagtggtatgccaccggccatgccgagcaggtctggcaggttgtgcaagacatcgcatttattggcaaaaagcgatcagcgggctacggcgaaatcgacgcatggcaggtgatccccggccaccttgatggcctcaccgatgacttcggagagcccttgcgccccgtgccggttgagcgatggccaacctccgcgacgcttattccctccgaggccgcatggtgcgccccgtattgggatattcgaaaccgaaccaaatgctacacgccggagccacgatgaacggcgccgacttcttaatgcaacacatcggttatcggttattgccgaaagcgatgcacaccggcgatgccgtcaccgatgccaacgcgctattcagcatcagtttgcccctacacaccggaaaaacactccggctttccagttgctggtgggtgatcacacccgatgcaacgtacaccagcgttaaggccatccccgagaccggcgccattcaggggcagttgcggcaggccgtcatcttgtcatccctaaaaacgggattgcccctcttgatcctcgcgattggcaagagccccatttacgcacgcgacctctttgtgacctacgacccacgcgcaacgcgctattgcagcgatcgcagtttgcgcaccgttgattcaactctggagaagtggtggacaccttaatcagcaagcccatccagctgtgcggctatgcgctgcaccgcttggttgcgcaacatcaaaacggtgcgccagcgctctggcgtgacgagggtgacaccgtgcgaattcgctcgcgtgacgcctgtccgcccacctacgtcgcagggcaactgttgggctttgtcacattggcgtgtgtgtcgtttggtagcaaacaccggtacctgccggtcgccgattggcgtggtcgcaaagcgtggctggaggcacagggcatcaaacacggtttcgaggtggttggggtgcacgcccagggtggcatgcaaaccgtgaccacccatgacggtcgccacttcaccattgatgccacgcaattcacgggcttgctgcgcgtcacccagcctgcgccattcaacgactgtctgctcaatggcatcggcaaagtaggtaaagcctttggcctcaacttactcgtcgttcattaacccaacgcttaaaaacgcttatccggagttcaccaccatgcaagacgttcgcatcgatatcgccatcaatacgattcaacccatcaccttcacccatcacggcatcgacgggttgcccaccatggctcgcggcgttgacatggagggtcatcccctgcgcaccgtttacattccagccgcgcagtttcgcggtcggctaaggcatgaggcggcgttggcaaaaatgcgtaccgcacacagccccgtcaagttggcggaagcctacatgctggccttggggcaaaacatcgacaccaaagaagacgaggctgatgagaaagtgcggttgggcgagctactcgctttacgggcggccaaccccttcattgatctcttcggaacgtggcgcatggacagccggctttacgtgtcgcacctgatgccggtcgtcaacgtcaagcccgacacctttcaccacatccgccgcgatctagacaccaacgacgcgttgtttgccgagttacccgaagccgaaatcgacgtcttttacgaacggcaagacggacagtcgcaagcctctcaagcggagagtctgattaaggtggccacccgcgaactgcgcaaagccaaaaaagaaaacgacctcgccaaatgcgacgagttcgaagccaagatcgaagaactcaaagccctcaagaaggcgcacaaagccggtgacgaatcgggcaacaccaaacacttggtggcgatggaggccgtccctgcgggaattcaattgttgtgcaaactcatcataaagcgggccacgccgctcgacctcagcatgctcacgggtgcgcttaacgcgatcagcgaattccccatgatgggtgcccagcgggcccgtggctgaggcaaggtgagtggcgccgcaaccgtctgccacacccagggtgaggtgttggcgcaaatcgccttcggtggttttttgccagctgcactggagtggaccgatgcgggcaccgcgttcatgactggcctcgaaacggttgccgtcgccgcgtgaaaggcccttaccgcagcccacagcaggcgcaatacgccaagctcatcgagcgcgctgtcagcaaacccggtgcgcccctgttggcgggtgctgcgcccgggctcggtaagacacacggctacgccatcccgttgttgtgcagtggcaaaaaagttgccatcgccatgagcacgcgccaactgatcgatcaatttatagcgagcgatgcactcgccgctgcgcaagccgcactagaggccgaggggcggcccgctgccaccgttgtcgccttgcaaccccgccgtcaatttgaaacggcggtggcctacagcgcgcacaaaacggcggcgcttgatgccgacgtcttggtgctcacacacatgggcgtgctcatcgatacccacatcccagcctacgcccagttgcgtcagcgcgctgtcttgttgtttgacgaagccgatcttttggccgatgccgccgacttgcgcagcacctatcgcattgaggctgaggccttagcccgcgcaggcgtcgaaaacgccacaccgacaaaggcggttgaaaccatcattaaaaaatccgatgaccccgaggaaaaagcagtcgccacagccatccaacgcgctttggcagagccggcttggtacaaagtgatcggtaaagaagacaacggcgatttggtgctgacccaccgcatgccggggcgcatgttgcgcaccctcatcaatgacatgccgcggtgcattttcaccagtggcaccctcacggtatcggggcgttttgaccactttgtcaaagccatcggcctgaccgcagtggcacccgaaagccagcacattgaccccgtgcaacacggccaactgcgcgttgaggtggccagtgaggccctcaccccagaagcacaagccgaacgcatcatgcacgcggcgacaccggtattggtgctgaccaccagccacgcgactacggcggcgttgggctctttgtgccccggtgccatctgccgcgcacccggtgaagccctcatggatgcggtggcgcgatgccctgatgatggcatcttgatcgccgctggcgcctggtctggcctcgatgcgccgcgcctgcggtggcaaaccgtggtcatccccaaaacaccgtacggcaaaccactcatccttgacgcccagcagataagcgcttacgtggacagcaaggttgttgccatcaggcgcaccaaccaagggttacaccgtgggctgcgcaccaccgatgccacctgcaccttgctgttactcgatccggatagccgtcgtgccgatttacgtcaagccattccccgtcgtttcttggtggattgggacagcgtggccgagggctcgttggttttgcgcacgcacttcgcccgtgaacgaaaaaaaggtctgcgtgaaaaaaccctgagccggcgcgggcagcactgcgaacaccccggctgtacggccacccaagagcatttgctggaggtgcaccacctcaacccgattgccaacggcccccgcgacacagttactgatgacctgcgggtgctttgtaaaaatcaccacgcggatgcccaccaagccatgcgaaaagctgattttttaaaagtgaaaacaactgaaaagcgtgcagaggcagacacttaggccacagctggtcaagctacgccgtaaatgcgtagttactggaacaacat

SEQ ID NO: 252 - DNA, 11671 bp, Artificial Sequence
  Synthetic Oligonucleotide
  misc_feature (1)..(6942): n is a, c, g, or t
nnnnnnnnnnnnnnnnnnnnnnnnnnnnnnnnnnnnnnnnnnnnnnnnnnnnnnnnnnnnnnnnnnnnnnnnnnnnnnnnnnnnnnnnnnnnnnnnnnnnnnnnnnnnnnnnnnnnnnnnnnnnnnnnnnnnnnnnnnnnnnnnnnnnnnnnnnnnnnnnnnnnnnnnnnnnnnnnnnnnnnnnnnnnnnnnnnnnnnnnnnnnnnnnnnnnnnnnnnnnnnnnnnnnnnnnnnnnnnnnnnnnnnnnnnnnnnnnnnnnnnnnnnnnnnnnnnnnnnnnnnnnnnnnnnnnnnnnnnnnnnnnnnnnnnnnnnnnnnnnnnnnnnnnnnnnnnnnnnnnnnnnnnnnnnnnnnnnnnnnnnnnnnnnnnnnnnnnnnnnnnnnnnnnnnnnnnnnnnnnnnnnnnnnnnnnnnnnnnnnnnnnnnnnnnnnnnnnnnnnnnnnnnnnnnnnnnnnnnnnnnnnnnnnnnnnnnnnnnnnnnnnnnnnnnnnnnnnnnnnnnnnnnnnnnnnnnnnnnnnnnnnnnnnnnnnnnnnnnnnnnnnnnnnnnnnnnnnnnnnnnnnnnnnnnnnnnnnnnnnnnnnnnnnnnnnnnnnnnnnnnnnnnnnnnnnnnnnnnnnnnnnnnnnnnnnnnnnnnnnnnnnnnnnnnnnnnnnnnnnnnnnnnnnnnnnnnnnnnnnnnnnnnnnnnnnnnnnnnnnnnnnnnnnnnnnnnnnnnnnnnnnnnnnnnnnnnnnnnnnnnnnnnnnnnnnnnnnnnnnnnnnnnnnnnnnnnnnnnnnnnnnnnnnnnnnnnnnnnnnnnnnnnnnnnnnnnnnnnnnnnnnnnnnnnnnnnnnnnnnnnnnnnnnnnnnnnnnnnnnnnnnnnnnnnnnnnnnnnnnnnnnnnnnnnnnnnnnnnnnnnnnnnnnnnnnnnnnnnnnnnnnnnnnnnnnnnnnnnnnnnnnnnnnnnnnnnnnnnnnnnnnnnnnnnnnnnnnnnnnnnnnnnnnnnnnnnnnnnnnnnnnnnnnnnnnnnnnnnnnnnnnnnnnnnnnnnnnnnnnnnnnnnnnnnnnnnnnnnnnnnnnnnnnnnnnnnnnnnnnnnnnnnnnnnnnnnnnnnnnnnnnnnnnnnnnnnnnnnnnnnnnnnnnnnnnnnnnnnnnnnnnnnnnnnnnnnnnnnnnnnnnnnnnnnnnnnnnnnnnnnnnnnnnnnnnnnnnnnnnnnnnnnnnnnnnnnnnnnnnnnnnnnnnnnnnnnnnnnnnnnnnnnnnnnnnnnnnnnnnnnnnnnnnnnnnnnnnnnnnnnnnnnnnnnnnnnnnnnnnnnnnnnnnnnnnnnnnnnnnnnnnnnnnnnnnnnnnnnnnnnnnnnnnnnnnnnnnnnnnnnnnnnnnnnnnnnnnnnnnnnnnnnnnnnnnnnnnnnnnnnnnnnnnnnnnnnnnnnnnnnnnnnnnnnnnnnnnnnnnnnnnnnnnnnnnnnnnnnnnnnnnnnnnnnnnnnnnnnnnnnnnnnnnnnnnnnnnnnnnnnnnnnnnnnnnnnnnnnnnnnnnnnnnnnnnnnnnnnnnnnnnnnnnnnnnnnnnnnnnnnnnnnnnnnnnnnnnnnnnnnnnnnnnnnnnnnnnnnnnnnnnnnnnnnnnnnnnnnnnnnnnnnnnnnnnnnnnnnnnnnnnnnnnnnnnnnnnnnnnnnnnnnnnnnnnnnnnnnnnnnnnnnnnnnnnnnnnnnnnnnnnnnnnnnnnnnnnnnnnnnnnnnnnnnnnnnnnnnnnnnnnnnnnnnnnnnnnnnnnnnnnnnnnnnnnnnnnnnnnnnnnnnnnnnnnnnnnnnnnnnnnnnnnnnnnnnnnnnnnnnnnnnnnnnnnnnnnnnnnnnnnnnnnnnnnnnnnnnnnnnnnnnnnnnnnnnnnnnnnnnnnnnnnnnnnnnnnnnnnnnnnnnnnnnnnnnnnnnnnnnnnnnnnnnnnnnnnnnnnnnnnnnnnnnnnnnnnnnnnnnnnnnnnnnnnnnnnnnnnnnnnnnnnnnnnnnnnnnnnnnnnnnnnnnnnnnnnnnnnnnnnnnnnnnnnnnnnnnnnnnnnnnnnnnnnnnnnnnnnnnnnnnnnnnnnnnnnnnnnnnnnnnnnnnnnnnnnnnnnnnnnnnnnnnnnnnnnnnnnnnnnnnnnnnnnnnnnnnnnnnnnnnnnnnnnnnnnnnnnnnnnnnnnnnnnnnnnnnnnnnnnnnnnnnnnnnnnnnnnnnnnnnnnnnnnnnnnnnnnnnnnnnnnnnnnnnnnnnnnnnnnnnnnnnnnnnnnnnnnnnnnnnnnnnnnnnnnnnnnnnnnnnnnnnnnnnnnnnnnnnnnnnnnnnnnnnnnnnnnnnnnnnnnnnnnnnnnnnnnnnnnnnnnnnnnnnnnnnnnnnnnnnnnnnnnnnnnnnnnnnnnnnnnnnnnnnnnnnnnnnnnnnnnnnnnnnnnnnnnnnnnnnnnnnnnnnnnnnnnnnnnnnnnnnnnnnnnnnnnnnnnnnnnnnnnnnnnnnnnnnnnnnnnnnnnnnnnnnnnnnnnnnnnnnnnnnnnnnnnnnnnnnnnnnnnnnnnnnnnnnnnnnnnnnnnnnnnnnnnnnnnnnnnnnnnnnnnnnnnnnnnnnnnnnnnnnnnnnnnnnnnnnnnnnnnnnnnnnnnnnnnnnnnnnnnnnnnnnnnnnnnnnnnnnnnnnnnnnnnnnnnnnnnnnnnnnnnnnnnnnnnnnnnnnnnnnnnnnnnnnnnnnnnnnnnnnnnnnnnnnnnnnnnnnnnnnnnnnnnnnnnnnnnnnnnnnnnnnnnnnnnnnnnnnnnnnnnnnnnnnnnnnnnnnnnnnnnnnnnnnnnnnnnnnnnnnnnnnnnnnnnnnnnnnnnnnnnnnnnnnnnnnnnnnnnnnnnnnnnnnnnnnnnnnnnnnnnnnnnnnnnnnnnnnnnnnnnnnnnnnnnnnnnnnnnnnnnnnnnnnnnnnnnnnnnnnnnnnnnnnnnnnnnnnnnnnnnnnnnnnnnnnnnnnnnnnnnnnnnnnnnnnnnnnnnnnnnnnnnnnnnnnnnnnnnnnnnnnnnnnnnnnnnnnnnnnnnnnnnnnnnnnnnnnnnnnnnnnnnnnnnnnnnnnnnnnnnnnnnnnnnnnnnnnnnnnnnnnnnnnnnnnnnnnnnnnnnnnnnnnnnnnnnnnnnnnnnnnnnnnnnnnnnnnnnnnnnnnnnnnnnnnnnnnnnnnnnnnnnnnnnnnnnnnnnnnnnnnnnnnnnnnnnnnnnnnnnnnnnnnnnnnnnnnnnnnnnnnnnnnnnnnnnnnnnnnnnnnnnnnnnnnnnnnnnnnnnnnnnnnnnnnnnnnnnnnnnnnnnnnnnnnnnnnnnnnnnnnnnnnnnnnnnnnnnnnnnnnnnnnnnnnnnnnnnnnnnnnnnnnnnnnnnnnnnnnnnnnnnnnnnnnnnnnnnnnnnnnnnnnnnnnnnnnnnnnnnnnnnnnnnnnnnnnnnnnnnnnnnnnnnnnnnnnnnnnnnnnnnnnnnnnnnnnnnnnnnnnnnnnnnnnnnnnnnnnnnnnnnnnnnnnnnnnnnnnnnnnnnnnnnnnnnnnnnnnnnnnnnnnnnnnnnnnnnnnnnnnnnnnnnnnnnnnnnnnnnnnnnnnnnnnnnnnnnnnnnnnnnnnnnnnnnnnnnnnnnnnnnnnnnnnnnnnnnnnnnnnnnnnnnnnnnnnnnnnnnnnnnnnnnnnnnnnnnnnnnnnnnnnnnnnnnnnnnnnnnnnnnnnnnnnnnnnnnnnnnnnnnnnnnnnnnnnnnnnnnnnnnnnnnnnnnnnnnnnnnnnnnnnnnnnnnnnnnnnnnnnnnnnnnnnnnnnnnnnnnnnnnnnnnnnnnnnnnnnnnnnnnnnnnnnnnnnnnnnnnnnnnnnnnnnnnnnnnnnnnnnnnnnnnnnnnnnnnnnnnnnnnnnnnnnnnnnnnnnnnnnnnnnnnnnnnnnnnnnnnnnnnnnnnnnnnnnnnnnnnnnnnnnnnnnnnnnnnnnnnnnnnnnnnnnnnnnnnnnnnnnnnnnnnnnnnnnnnnnnnnnnnnnnnnnnnnnnnnnnnnnnnnnnnnnnnnnnnnnnnnnnnnnnnnnnnnnnnnnnnnnnnnnnnnnnnnnnnnnnnnnnnnnnnnnnnnnnnnnnnnnnnnnnnnnnnnnnnnnnnnnnnnnnnnnnnnnnnnnnnnnnnnnnnnnnnnnnnnnnnnnnnnnnnnnnnnnnnnnnnnnnnnnnnnnnnnnnnnnnnnnnnnnnnnnnnnnnnnnnnnnnnnnnnnnnnnnnnnnnnnnnnnnnnnnnnnnnnnnnnnnnnnnnnnnnnnnnnnnnnnnnnnnnnnnnnnnnnnnnnnnnnnnnnnnnnnnnnnnnnnnnnnnnnnnnnnnnnnnnnnnnnnnnnnnnnnnnnnnnnnnnnnnnnnnnnnnnnnnnnnnnnnnnnnnnnnnnnnnnnnnnnnnnnnnnnnnnnnnnnnnnnnnnnnnnnnnnnnnnnnnnnnnnnnnnnnnnnnnnnnnnnnnnnnnnnnnnnnnnnnnnnnnnnnnnnnnnnnnnnnnnnnnnnnnnnnnnnnnnnnnnnnnnnnnnnnnnnnnnnnnnnnnnnnnnnnnnnnnnnnnnnnnnnnnnnnnnnnnnnnnnnnnnnnnnnnnnnnnnnnnnnnnnnnnnnnnnnnnnnnnnnnnnnnnnnnnnnnnnnnnnnnnnnnnnnnnnnnnnnnnnnnnnnnnnnnnnnnnnnnnnnnnnnnnnnnnnnnnnnnnnnnnnnnnnnnnnnnnnnnnnnnnnnnnnnnnnnnnnnnnnnnnnnnnnnnnnnnnnnnnnnnnnnnnnnnnnnnnnnnnnnnnnnnnnnnnnnnnnnnnnnnnnnnnnnnnnnnnnnnnnnnnnnnnnnnnnnnnnnnnnnnnnnnnnnnnnnnnnnnnnnnnnnnnnnnnnnnnnnnnnnnnnnnnnnnnnnnnnnnnnnnnnnnnnnnnnnnnnnnnnnnnnnnnnnnnnnnnnnnnnnnnnnnnnnnnnnnnnnnnnnnnnnnnnnnnnnnnnnnnnnnnnnnnnnnnnnnnnnnnnnnnnnnnnnnnnnnnnnnnnnnnnnnnnnnnnnnnnnnnnnnnnnnnnnnnnnnnnnnnnnnnnnnnnnnnnnnnnnnnnnnnnnnnnnnnnnnnnnnnnnnnnnnnnnnnnnnnnnnnnnnnnnnnnnnnnnnnnnnnnnnnnnnnnnnnnnnnnnnnnnnnnnnnnnnnnnnnnnnnnnnnnnnnnnnnnnnnnnnnnnnnnnnnnnnnnnnnnnnnnnnnnnnnnnnnnnnnnnnnnnnnnnnnnnnnnnnnnnnnnnnnnnnnnnnnnnnnnnnnnnnnnnnnnnnnnnnnnnnnnnnnnnnnnnnnnnnnnnnnnnnnnnnnnnnnnnnnnnnnnnnnnnnnnnnnnnnnnnnnnnnnnnnnnnnnnnnnnnnnnnnnnnnnnnnnnnnnnnnnnnnnnnnnnnnnnnnnnnnnnnnnnnnnnnnnnnnnnnnnnnnnnnnnnnnnnnnnnnnnnnnnnnnnnnnnnnnnnnnnnnnnnnnnnnnnnnnnnnnnnnnnnnnnnnnnnnnnnnnnnnnnnnnnnnnnnnnnnnnnnnnnnnnnnnnnnnnnnnnnnnnnnnnnnnnnnnnnnnnnnnnnnnnnnnnnnnnnnnnnnnnnnnnnnnnnnnnnnnnnnnnnnnnnnnnnnnnnnnnnnnnnnnnnnnnnnnnnnnnnnnnnnnnnnnnnnnnnnnnnnnnnnnnnnnnnnnnnnnnnnnnnnnnnnnnnnnnnnnnnnnnnnnnnnnnnnnnnnnnnnnnnnnnnnnnnnnnnnnnnnnnnnnnnnnnnnnnnnnnnnnnnnnnnnnnnnnnnnnnnnnnnnnnnnnnnnnnnnnnnnnnnnnnnnnnnnnnnnnnnnnnnnnnnnnnnnnnnnnnnnnnnnnnnnnnnnnnnnnnnnnnnnnnnnnnnnnnnnnnnnnnnnnnnnnnnnnnnnnnnnnnnnnnnnnnnnnnnnnnnnnnnnnnnnnnnnnnnnnnnnnnnnnnnnnnnnnnnnnnnnnnnnnnnnnnnnnnnnnnnnnnnnnnnnnnnnnnnnnnnnnnnnnnnnnnnnnnnnnnnnnnnnnnnnnnnnnnnnnnnnnnnnnnnnnnnnnnnnnnnnnnnnnnnnnnnnnnnnnnnnnnnnnnnnnnnnnnnnnnnnnnnnnnnnnnnnnnnnnnnnnnnnnnnnnnnnnnnnnnnnnnnnnnnnnnnnnnnnnnnnnnnnnnnnnnnnnnnnnnnnnnnnnnnnnnnnnnnnnnnnnnnnnnnnnnnnnnnnnnnnnnnnnnnnnnnnnnnnnnnnnnnnnnnnnnnnnnnnnnnnnnnnnnnnnnnnnnnnnnnnnnnnnnnnnnnnnnnnnnnnnnnnnnnnnnnnnnnnnnnnnnnnnnnnnnnnnnnnnnnnnnnnnnnnnnnnnnnnnnnnnnnnnnnnnnnnnnnnnnnnnnnnnnnnnnnnnnnnnnnnnnnnnnnnnnnnnnnnnnnnnnnnnnnnnnnnnnnnnnnnnnnnnnnnnnnnnnnnnnnnnnnnnnnnnnnnnnnnnnnnnnnnnnnnnnnnnnnnnnnnnnnnnnnnnnnnnnnnnnnnnnnnnnnnnnnnnnnnnnnnnnnnnnnnnnnnnnnnnnnnnnnnnnnnnnnnnnnnnnnnnnnnnnnnnnnnnnnnnnnnnnnnnnnnnnnnnnnnnnnnnnnnnnnnnnnnnnnnnnnnnnnnnnnnnnnnnnnnnnnnnnnnnnnnnnnnnnnnnnnnnnnnnnnnnnnnnnnnnnnnnnnnnnnnnnnnnnnnnnnnnnnnnnnnnnnnnnnnnnnnnnnnnnnnnnnnnnnnnnnnnnnnnnnnnnnnnnnnnnnnnnnnnnnnnnnnnnnnnnnnnnnnnnnnnnnnnnnnnnnnnnnnnnnnnnnnnnnnnnnnnnnnnnnnnnnnnnnnnnnnnnnnnnnnnnnnnnnnnnnnnnnnnnnnnnnnnnnnnnnnnnnnnnnnnnnnnnnnnnnnnnnagcttcaagcgacggggttaagacaggcttacaaaataagtactctgaagttgatactgattcagtgtggctttttttgattttgggaaacagagattgggtgagcttggttgtgttgatgatgggaggactggcgcttatacttttgacatcgatagatatttcgacttcgaaaggatgcaaaatgactgaagctcaatttcaagtcatgatcgccatcggttttttatgggcgatcgccatcgctgttttgtactttgaggccaaagaaaaaagcaaaaccgaacataaagacaagggactttgaatcccctcaacttgttcatcaaaaagccagacttggtctggcttttttcatgctcacttcaacagagaccatgcaaagtgggtggtttgtttaccaatatccccacgccatccaaaccatatttaattattaaaatttattcataagatcacaatttttttttaccattatatttagtacttatagattctattgattcgacatcatctttcagagcgtcgtccattgaaaggcaggccaattgacaccatttgtacttcgtgcccacttgagcacaccattgatacggcgtggacacgtcaccttggacgcgctgttgatgtcctgtctgaccactggtgatgtatcccatttgttgttgtgcaaagatgatttgtactttgcaagttcaggttttgcagtggatgcaaacgccacccaacgcgtttcattcgttgccagtttgcgacctgagcattcaccgcaatggttggatgtacttcattccaacacaaaaaacggcgatttgaaaattggactgtcacggcagcgggacggcggcaacatcatcaatgcttacacggccacagttgcgagcgccattgagtggtacgccacaggcgatatgcaggcagtgctggccgtggtgaagtccatcccattcataggcaagcgcagaacatcaggatttgggcaagtcaagcaatgggaggtggcctcgggcgaattagatggtttggtgggttttgcagttgagccactgcggccagtgcctacagaacgctggtctgagggtggcgactggactcctgttgaagctgcttggaaagcgccctactgggatgtgcgaaaccgcacctgctgttttgttccggaggtgtgaggtgaatggccccgaatttttcatgcgttatgcaggctatcgcctgctacctgaggataaaaaaactgacgatgcggttgctgatgccgacacattgcttggcatgtcgctgcctatgcatacagggcaatctttgcgactgtcctcatgttggatggttgtgacaccgcaatgggttgccaccagcttcaaggctttagcccttgcgggatttcgccaagaaaccgaacgcaaaacagccatcgatgaggcactgaaaccaggcggaccgtgcatgcttttggcactggacaagcgctccatgacagcccgcgatttgttcgtcacctatgacgcacgtgcggcccgaatgtgcagcccaggttttgtgaagacctatgacgccaccaaggagaaatcatggacatcttgatcgacaagccagctcgcgtgaagggctatgccttgcaccgcatggtggcgcagttccgtaatggcaaacctgcattgtgggcagatgaaggccagcaactccgcatccgacccgaagaggccacaccacccgtgtatgccgcaggtcaaatgctggccttcaccaccacggcctgtgtcgccttcagtagcggacacaagcataaatacctgccgttgtctgattggcgtggacgccgcacatggctggaacaacaagcgcacaaacatggctttgaaattgtgggtgtccacgtgtcgggcggcatgcaagaggtgctcacccatgatggacgtcgcttcaaacttgatgccaccgaattcaccggcctgttgaaagtcatcgaaccccaagcctttgggctttgccttgtcaaaggcattggcaaagtaggcaaagcttttggcttgaatctcttgatcgtgcaataactcaccaaggaaaaaccatgacctcatctcataacctgattgcagacattgagctgctgaccttgcaacctttgaccttcacacaccatggcaccgagggcttgcccttgctgacgcgcggcattgacgatgaaggacgtcaccaacgaacggtctaccttcctgcagctcaactgcgtggcagggtgcggcatgaatcggccatggccgagttacgcaagaaacccgaaaaagccaagctcgaagacgcctacatgctggctttggggcaagacctgcgacccagcgaagacgatgagcccgaggatattcgcctcagcgaacaaatcaagtttcgacagaaaaacccgtttctcgacatttttggcacctggaaagttgccagccgtttgtatgtttcgcacctcttgcctgctgtgaatgtattacccgacaaagtcagccacattcgccgcgaccttgacaccaacgaagacatgatggctttgctggatgacgaggagcaaaaccgcttgtacgaccggcaagacaagcaaggcctggcttcaaaggcagaaagcttaatcaaactaaccaaccgggaattacttgccgctcgcaaagccaaagaccagaccaagttggcggatctcaatgccaagttggaagaactcaaagcgcttaagaaatcacagaagggggatgaccaatccgacaacaccaagcacttgcttgaattacaagtcattcccgcaggcatcacactcaccggcaaactcatcgttctacatgccacagctttcgacttgaacactttggtcgaggccttcaacggcttaagtcgcaacccctatatgggtgcacaacgcgcccggggctgtggcgaagtgcaaggtcaagtccgctttcaaaatgacttgggtgaggtgttggttgtggtgaagtttggtggtctgcaagctgccaaggtggcgtggacagatgctgggcaacagtggttgctgccacagggcgaactgacaagcgcatgatttatcgaagcccagaacaacagcgctatgccaagttgatcgagggtgctcttcgcccaggcccgcccttgctggcgggggcctcagcaggtttgggcaaaacccatggttacagcatcccactggtgcgctcgggcaagcggattgccatcgccatgagcacacgccagttgatgcagcaatacctcgacagccatgccttggctacagccttgcaagggcacacatgcacggtgggggaactgcaatcccgtcaacactttgaaactgacaaggcctatcaagcgcaccgatccgaagccttgcaagcacaggtgctgttggtcacccatgccgccgccttgattgacagtttgcaaccgggctatgcccaactgcgcgagcgtgatgtggtgttgttcgatgaggccgatttattggccgacgccgcagaccttcgcagcacctttgccatcagcgcggaaacactcaaagcctgccaagctcaacatttgacgcctgaacaagcagcccacaaggtgcgtcaactcaccacatcaactgaagaccgctgtgcagcaagcgccatcttgtatgccctggccaatcctgcgccctacaaaatggtgggtcacaatgacgcaggtgacttggtgctgcgtcaccgcatgcctgggcgcatgctcaagcctttggtgaaagaggcgccacgctgtattttcaccagtggcaccctgcaagtgcacggcagctttgaccattttgtgcgggccatggggctcacggccatggcgcccgaaagctgccacatcgaacccccgcagcatggccacttgagagttcaagccacggctgatgccttgtctttggaacagatcgcccttcgaatagccgccgctcaaaaccccaccttggtgctcaccagcagccaccgttcgagccaagaactcggggccttgttgccacacgctgtggtgcgtgaagcagatgaacctttggcagatgcggtgcaacgctgccccaccgatggggtgctgatagcagcgggtgcgtggtcgggcttggacgaacctcggctgcgttggcgcacggtggtgattcctcaaaccccatacggtcagcctgttcaggtgaatggaatttcggtgaactacttcatcgacagccaagtggtggccttgcggcgcaccaaccaaggtttgcaccggggtttgcgcacacccgatgcgcagtgcactctgctgttgctggacccgcgaagtagtcgattgactctgcggtcggccatcccagccaggttctcggtggattgggatggctttgaagaaggctcgttggtgttacaaacccatttcaaacgcgagcgcaatcaacaactgaaaaatgcagccttgaagcactacggcaaccagtgcatgtttgaaggctgtgaggtgaccaaagcccattggctggaagtccaccacaccctgcccatcagcgagggcgagcgccgaaccacgctagaagatgtgcaggttttatgcagcaaccaccacaaagaagcccatcatttgctgcgcatggctgctttttctgatgaaaaatcaactgaaatttcaacggagtcaacaacttaaaacgcttcaggtcaagctgccatgtgaatgtgcagttactagaacttctagtttcccctgttcttttcca

SEQ ID NO: 253 - DNA, 11654 bp, Artificial Sequence
  Synthetic Oligonucleotide
  misc_feature (1)..(7917): n is a, c, g, or t
nnnnnnnnnnnnnnnnnnnnnnnnnnnnnnnnnnnnnnnnnnnnnnnnnnnnnnnnnnnnnnnnnnnnnnnnnnnnnnnnnnnnnnnnnnnnnnnnnnnnnnnnnnnnnnnnnnnnnnnnnnnnnnnnnnnnnnnnnnnnnnnnnnnnnnnnnnnnnnnnnnnnnnnnnnnnnnnnnnnnnnnnnnnnnnnnnnnnnnnnnnnnnnnnnnnnnnnnnnnnnnnnnnnnnnnnnnnnnnnnnnnnnnnnnnnnnnnnnnnnnnnnnnnnnnnnnnnnnnnnnnnnnnnnnnnnnnnnnnnnnnnnnnnnnnnnnnnnnnnnnnnnnnnnnnnnnnnnnnnnnnnnnnnnnnnnnnnnnnnnnnnnnnnnnnnnnnnnnnnnnnnnnnnnnnnnnnnnnnnnnnnnnnnnnnnnnnnnnnnnnnnnnnnnnnnnnnnnnnnnnnnnnnnnnnnnnnnnnnnnnnnnnnnnnnnnnnnnnnnnnnnnnnnnnnnnnnnnnnnnnnnnnnnnnnnnnnnnnnnnnnnnnnnnnnnnnnnnnnnnnnnnnnnnnnnnnnnnnnnnnnnnnnnnnnnnnnnnnnnnnnnnnnnnnnnnnnnnnnnnnnnnnnnnnnnnnnnnnnnnnnnnnnnnnnnnnnnnnnnnnnnnnnnnnnnnnnnnnnnnnnnnnnnnnnnnnnnnnnnnnnnnnnnnnnnnnnnnnnnnnnnnnnnnnnnnnnnnnnnnnnnnnnnnnnnnnnnnnnnnnnnnnnnnnnnnnnnnnnnnnnnnnnnnnnnnnnnnnnnnnnnnnnnnnnnnnnnnnnnnnnnnnnnnnnnnnnnnnnnnnnnnnnnnnnnnnnnnnnnnnnnnnnnnnnnnnnnnnnnnnnnnnnnnnnnnnnnnnnnnnnnnnnnnnnnnnnnnnnnnnnnnnnnnnnnnnnnnnnnnnnnnnnnnnnnnnnnnnnnnnnnnnnnnnnnnnnnnnnnnnnnnnnnnnnnnnnnnnnnnnnnnnnnnnnnnnnnnnnnnnnnnnnnnnnnnnnnnnnnnnnnnnnnnnnnnnnnnnnnnnnnnnnnnnnnnnnnnnnnnnnnnnnnnnnnnnnnnnnnnnnnnnnnnnnnnnnnnnnnnnnnnnnnnnnnnnnnnnnnnnnnnnnnnnnnnnnnnnnnnnnnnnnnnnnnnnnnnnnnnnnnnnnnnnnnnnnnnnnnnnnnnnnnnnnnnnnnnnnnnnnnnnnnnnnnnnnnnnnnnnnnnnnnnnnnnnnnnnnnnnnnnnnnnnnnnnnnnnnnnnnnnnnnnnnnnnnnnnnnnnnnnnnnnnnnnnnnnnnnnnnnnnnnnnnnnnnnnnnnnnnnnnnnnnnnnnnnnnnnnnnnnnnnnnnnnnnnnnnnnnnnnnnnnnnnnnnnnnnnnnnnnnnnnnnnnnnnnnnnnnnnnnnnnnnnnnnnnnnnnnnnnnnnnnnnnnnnnnnnnnnnnnnnnnnnnnnnnnnnnnnnnnnnnnnnnnnnnnnnnnnnnnnnnnnnnnnnnnnnnnnnnnnnnnnnnnnnnnnnnnnnnnnnnnnnnnnnnnnnnnnnnnnnnnnnnnnnnnnnnnnnnnnnnnnnnnnnnnnnnnnnnnnnnnnnnnnnnnnnnnnnnnnnnnnnnnnnnnnnnnnnnnnnnnnnnnnnnnnnnnnnnnnnnnnnnnnnnnnnnnnnnnnnnnnnnnnnnnnnnnnnnnnnnnnnnnnnnnnnnnnnnnnnnnnnnnnnnnnnnnnnnnnnnnnnnnnnnnnnnnnnnnnnnnnnnnnnnnnnnnnnnnnnnnnnnnnnnnnnnnnnnnnnnnnnnnnnnnnnnnnnnnnnnnnnnnnnnnnnnnnnnnnnnnnnnnnnnnnnnnnnnnnnnnnnnnnnnnnnnnnnnnnnnnnnnnnnnnnnnnnnnnnnnnnnnnnnnnnnnnnnnnnnnnnnnnnnnnnnnnnnnnnnnnnnnnnnnnnnnnnnnnnnnnnnnnnnnnnnnnnnnnnnnnnnnnnnnnnnnnnnnnnnnnnnnnnnnnnnnnnnnnnnnnnnnnnnnnnnnnnnnnnnnnnnnnnnnnnnnnnnnnnnnnnnnnnnnnnnnnnnnnnnnnnnnnnnnnnnnnnnnnnnnnnnnnnnnnnnnnnnnnnnnnnnnnnnnnnnnnnnnnnnnnnnnnnnnnnnnnnnnnnnnnnnnnnnnnnnnnnnnnnnnnnnnnnnnnnnnnnnnnnnnnnnnnnnnnnnnnnnnnnnnnnnnnnnnnnnnnnnnnnnnnnnnnnnnnnnnnnnnnnnnnnnnnnnnnnnnnnnnnnnnnnnnnnnnnnnnnnnnnnnnnnnnnnnnnnnnnnnnnnnnnnnnnnnnnnnnnnnnnnnnnnnnnnnnnnnnnnnnnnnnnnnnnnnnnnnnnnnnnnnnnnnnnnnnnnnnnnnnnnnnnnnnnnnnnnnnnnnnnnnnnnnnnnnnnnnnnnnnnnnnnnnnnnnnnnnnnnnnnnnnnnnnnnnnnnnnnnnnnnnnnnnnnnnnnnnnnnnnnnnnnnnnnnnnnnnnnnnnnnnnnnnnnnnnnnnnnnnnnnnnnnnnnnnnnnnnnnnnnnnnnnnnnnnnnnnnnnnnnnnnnnnnnnnnnnnnnnnnnnnnnnnnnnnnnnnnnnnnnnnnnnnnnnnnnnnnnnnnnnnnnnnnnnnnnnnnnnnnnnnnnnnnnnnnnnnnnnnnnnnnnnnnnnnnnnnnnnnnnnnnnnnnnnnnnnnnnnnnnnnnnnnnnnnnnnnnnnnnnnnnnnnnnnnnnnnnnnnnnnnnnnnnnnnnnnnnnnnnnnnnnnnnnnnnnnnnnnnnnnnnnnnnnnnnnnnnnnnnnnnnnnnnnnnnnnnnnnnnnnnnnnnnnnnnnnnnnnnnnnnnnnnnnnnnnnnnnnnnnnnnnnnnnnnnnnnnnnnnnnnnnnnnnnnnnnnnnnnnnnnnnnnnnnnnnnnnnnnnnnnnnnnnnnnnnnnnnnnnnnnnnnnnnnnnnnnnnnnnnnnnnnnnnnnnnnnnnnnnnnnnnnnnnnnnnnnnnnnnnnnnnnnnnnnnnnnnnnnnnnnnnnnnnnnnnnnnnnnnnnnnnnnnnnnnnnnnnnnnnnnnnnnnnnnnnnnnnnnnnnnnnnnnnnnnnnnnnnnnnnnnnnnnnnnnnnnnnnnnnnnnnnnnnnnnnnnnnnnnnnnnnnnnnnnnnnnnnnnnnnnnnnnnnnnnnnnnnnnnnnnnnnnnnnnnnnnnnnnnnnnnnnnnnnnnnnnnnnnnnnnnnnnnnnnnnnnnnnnnnnnnnnnnnnnnnnnnnnnnnnnnnnnnnnnnnnnnnnnnnnnnnnnnnnnnnnnnnnnnnnnnnnnnnnnnnnnnnnnnnnnnnnnnnnnnnnnnnnnnnnnnnnnnnnnnnnnnnnnnnnnnnnnnnnnnnnnnnnnnnnnnnnnnnnnnnnnnnnnnnnnnnnnnnnnnnnnnnnnnnnnnnnnnnnnnnnnnnnnnnnnnnnnnnnnnnnnnnnnnnnnnnnnnnnnnnnnnnnnnnnnnnnnnnnnnnnnnnnnnnnnnnnnnnnnnnnnnnnnnnnnnnnnnnnnnnnnnnnnnnnnnnnnnnnnnnnnnnnnnnnnnnnnnnnnnnnnnnnnnnnnnnnnnnnnnnnnnnnnnnnnnnnnnnnnnnnnnnnnnnnnnnnnnnnnnnnnnnnnnnnnnnnnnnnnnnnnnnnnnnnnnnnnnnnnnnnnnnnnnnnnnnnnnnnnnnnnnnnnnnnnnnnnnnnnnnnnnnnnnnnnnnnnnnnnnnnnnnnnnnnnnnnnnnnnnnnnnnnnnnnnnnnnnnnnnnnnnnnnnnnnnnnnnnnnnnnnnnnnnnnnnnnnnnnnnnnnnnnnnnnnnnnnnnnnnnnnnnnnnnnnnnnnnnnnnnnnnnnnnnnnnnnnnnnnnnnnnnnnnnnnnnnnnnnnnnnnnnnnnnnnnnnnnnnnnnnnnnnnnnnnnnnnnnnnnnnnnnnnnnnnnnnnnnnnnnnnnnnnnnnnnnnnnnnnnnnnnnnnnnnnnnnnnnnnnnnnnnnnnnnnnnnnnnnnnnnnnnnnnnnnnnnnnnnnnnnnnnnnnnnnnnnnnnnnnnnnnnnnnnnnnnnnnnnnnnnnnnnnnnnnnnnnnnnnnnnnnnnnnnnnnnnnnnnnnnnnnnnnnnnnnnnnnnnnnnnnnnnnnnnnnnnnnnnnnnnnnnnnnnnnnnnnnnnnnnnnnnnnnnnnnnnnnnnnnnnnnnnnnnnnnnnnnnnnnnnnnnnnnnnnnnnnnnnnnnnnnnnnnnnnnnnnnnnnnnnnnnnnnnnnnnnnnnnnnnnnnnnnnnnnnnnnnnnnnnnnnnnnnnnnnnnnnnnnnnnnnnnnnnnnnnnnnnnnnnnnnnnnnnnnnnnnnnnnnnnnnnnnnnnnnnnnnnnnnnnnnnnnnnnnnnnnnnnnnnnnnnnnnnnnnnnnnnnnnnnnnnnnnnnnnnnnnnnnnnnnnnnnnnnnnnnnnnnnnnnnnnnnnnnnnnnnnnnnnnnnnnnnnnnnnnnnnnnnnnnnnnnnnnnnnnnnnnnnnnnnnnnnnnnnnnnnnnnnnnnnnnnnnnnnnnnnnnnnnnnnnnnnnnnnnnnnnnnnnnnnnnnnnnnnnnnnnnnnnnnnnnnnnnnnnnnnnnnnnnnnnnnnnnnnnnnnnnnnnnnnnnnnnnnnnnnnnnnnnnnnnnnnnnnnnnnnnnnnnnnnnnnnnnnnnnnnnnnnnnnnnnnnnnnnnnnnnnnnnnnnnnnnnnnnnnnnnnnnnnnnnnnnnnnnnnnnnnnnnnnnnnnnnnnnnnnnnnnnnnnnnnnnnnnnnnnnnnnnnnnnnnnnnnnnnnnnnnnnnnnnnnnnnnnnnnnnnnnnnnnnnnnnnnnnnnnnnnnnnnnnnnnnnnnnnnnnnnnnnnnnnnnnnnnnnnnnnnnnnnnnnnnnnnnnnnnnnnnnnnnnnnnnnnnnnnnnnnnnnnnnnnnnnnnnnnnnnnnnnnnnnnnnnnnnnnnnnnnnnnnnnnnnnnnnnnnnnnnnnnnnnnnnnnnnnnnnnnnnnnnnnnnnnnnnnnnnnnnnnnnnnnnnnnnnnnnnnnnnnnnnnnnnnnnnnnnnnnnnnnnnnnnnnnnnnnnnnnnnnnnnnnnnnnnnnnnnnnnnnnnnnnnnnnnnnnnnnnnnnnnnnnnnnnnnnnnnnnnnnnnnnnnnnnnnnnnnnnnnnnnnnnnnnnnnnnnnnnnnnnnnnnnnnnnnnnnnnnnnnnnnnnnnnnnnnnnnnnnnnnnnnnnnnnnnnnnnnnnnnnnnnnnnnnnnnnnnnnnnnnnnnnnnnnnnnnnnnnnnnnnnnnnnnnnnnnnnnnnnnnnnnnnnnnnnnnnnnnnnnnnnnnnnnnnnnnnnnnnnnnnnnnnnnnnnnnnnnnnnnnnnnnnnnnnnnnnnnnnnnnnnnnnnnnnnnnnnnnnnnnnnnnnnnnnnnnnnnnnnnnnnnnnnnnnnnnnnnnnnnnnnnnnnnnnnnnnnnnnnnnnnnnnnnnnnnnnnnnnnnnnnnnnnnnnnnnnnnnnnnnnnnnnnnnnnnnnnnnnnnnnnnnnnnnnnnnnnnnnnnnnnnnnnnnnnnnnnnnnnnnnnnnnnnnnnnnnnnnnnnnnnnnnnnnnnnnnnnnnnnnnnnnnnnnnnnnnnnnnnnnnnnnnnnnnnnnnnnnnnnnnnnnnnnnnnnnnnnnnnnnnnnnnnnnnnnnnnnnnnnnnnnnnnnnnnnnnnnnnnnnnnnnnnnnnnnnnnnnnnnnnnnnnnnnnnnnnnnnnnnnnnnnnnnnnnnnnnnnnnnnnnnnnnnnnnnnnnnnnnnnnnnnnnnnnnnnnnnnnnnnnnnnnnnnnnnnnnnnnnnnnnnnnnnnnnnnnnnnnnnnnnnnnnnnnnnnnnnnnnnnnnnnnnnnnnnnnnnnnnnnnnnnnnnnnnnnnnnnnnnnnnnnnnnnnnnnnnnnnnnnnnnnnnnnnnnnnnnnnnnnnnnnnnnnnnnnnnnnnnnnnnnnnnnnnnnnnnnnnnnnnnnnnnnnnnnnnnnnnnnnnnnnnnnnnnnnnnnnnnnnnnnnnnnnnnnnnnnnnnnnnnnnnnnnnnnnnnnnnnnnnnnnnnnnnnnnnnnnnnnnnnnnnnnnnnnnnnnnnnnnnnnnnnnnnnnnnnnnnnnnnnnnnnnnnnnnnnnnnnnnnnnnnnnnnnnnnnnnnnnnnnnnnnnnnnnnnnnnnnnnnnnnnnnnnnnnnnnnnnnnnnnnnnnnnnnnnnnnnnnnnnnnnnnnnnnnnnnnnnnnnnnnnnnnnnnnnnnnnnnnnnnnnnnnnnnnnnnnnnnnnnnnnnnnnnnnnnnnnnnnnnnnnnnnnnnnnnnnnnnnnnnnnnnnnnnnnnnnnnnnnnnnnnnnnnnnnnnnnnnnnnnnnnnnnnnnnnnnnnnnnnnnnnnnnnnnnnnnnnnnnnnnnnnnnnnnnnnnnnnnnnnnnnnnnnnnnnnnnnnnnnnnnnnnnnnnnnnnnnnnnnnnnnnnnnnnnnnnnnnnnnnnnnnnnnnnnnnnnnnnnnnnnnnnnnnnnnnnnnnnnnnnnnnnnnnnnnnnnnnnnnnnnnnnnnnnnnnnnnnnnnnnnnnnnnnnnnnnnnnnnnnnnnnnnnnnnnnnnnnnnnnnnnnnnnnnnnnnnnnnnnnnnnnnnnnnnnnnnnnnnnnnnnnnnnnnnnnnnnnnnnnnnnnnnnnnnnnnnnnnnnnnnnnnnnnnnnnnnnnnnnnnnnnnnnnnnnnnnnnnnnnnnnnnnnnnnnnnnnnnnnnnnnnnnnnnnnnnnnnnnnnnnnnnnnnnnnnnnnnnnnnnnnnnnnnnnnnnnnnnnnnnnnnnnnnnnnnnnnnnnnnnnnnnnnnnnnnnnnnnnnnnnnnnnnnnnnnnnnnnnnnnnnnnnnnnnnnnnnnnnnnnnnnnnnnnnnnnnnnnnnnnnnnnnnnnnnnnnnnnnnnnnnnnnnnnnnnnnnnnnnnnnnnnnnnnnnnnnnnnnnnnnnnnnnnnnnnnnnnnnnnnnnnnnnnnnnnnnnnnnnnnnnnnnnnnnnnnnnnnnnnnnnnnnnnnnnnnnnnnnnnnnnnnnnnnnnnnnnnnnnnnnnnnnnnnnnnnnnnnnnnnnnnnnnnnnnnnnnnnnnnnnnnnnnnnnnnnnnnnnnnnnnnnnnnnnnnnnnnnnnnnnnnnnnnnnnnnnnnnnnnnnnnnnnnnnnnnnnnnnnnnnnnnnnnnnnnnnnnnnnnnnnnnnnnnnnnnnnnnnnnnnnnnnnnnnnnnnnnnnnnnnnnnnnnnnnnnnnnnnnnnnnnnnnnnnnnnnnnnnnnnnnnnnnnnnnnnnnnnnnnnnnnnnnnnnnnnnnnnnnnnnnnnnnnnnnnnnnnnnnnnnnnnnnnnnnnnnnnnnnnnnnnnnnnnnnnnnnnnnnnnnnnnnnnnnnnnnnnnnnnnnnnnnnnnnnnnnnnnnnnnnnnnnnnnnnnnnnnnnnnnnnnnnnnnnnnnnnnnnnnnnnnnnnnnnnnnnnnnnnnnnnnnnnnnnnnnnnnnnnnnnnnnnnnnnnnnnnnnnnnnnnnnnnnnnnnnnnnnnnnnnnnnnnnnnnnnnnnnnnnnnnnnnnnnnnnnnnnnnnnnnnnnnnnnnnnnnnnnnnnnnnnnnnnnnnnnnnnnnnnnnnnnnnnnnnnnnnnnnnnnnnnnnnnnnnnnnnnnnnnnnnnnnnnnnnnnnnnnnnnnnnnnnnnnnnnnnnnnnnnnnnnnnnnnnnnnnnnnnnnnnnnnnnnnnnnnnnnnnnnnnnnnnnnnnnnnnnnnnnnnnnnnnnnnnnnnnnnnnnnnnnnnnnnnnnnnnnnnnnnnnnnnnnnnnnnnnnnnnnnnnnnnnnnnnnnnnnnnnnnnnnnnnnnnnnnnnnnnnnnnnnnnnnnnnnnnnnnnnnnnnnnnnnnnnnnnnnnnttgggcaagtcaagcaatgggaggtggcctctggcgaattagatggtttggtgggttttgcagttgagccactgcggccagtgcctacagaacgctggtctgagggtggcgactggactcctgttgaagctgcttggaaagcgccctactgggatgtgcgaaaccgcacctgctgttttgttccggaggtgtgaggtgaatggccccgaatttttcatgcgttatgcaggctatcgcctgctacctgaggataaaaaaactgacgatgcggttgctgatgccgacacattgcttggcatgtcgctgcctatgcatacagggcaatctttgcgactgtcctcatgttggatggttgtgacaccgcaatgggttgccaccagcttcaaggctttagcccttgcgggatttcgccaagaaaccgaacgcaaaacagccatcgatgaggcactgaaaccaggcggaccgtgcatgcttttggcactggacaagcgctccatgacagcccgcgatttgttcgtcacctatgacgcacgtgcggcccgaatgtgcagcccaggttttgtgaagacctatgacgccaccaaggagaaatcatggacatcttgatcgacaagccagctcgcgtgaagggctatgccttgcaccgcatggtggcgcagttccgtaatggcaaacctgcattgtgggcagatgaaggccagcaactccgcatccgacccgaagaggccacaccacccgtgtatgccgcaggtcaaatgctggccttcaccaccacggcctgtgtcgccttcagtagcggacacaagcataaatacctgccgttgtctgattggcgtggacgccgcacatggctggaacaacaagcgcacaaacatggctttgaaattgtgggtgtccacgtgtcgggcggcatgcaagaggtgctcacccatgatggacgtcgcttcaaacttgatgccaccgaattcaccggcctgttgaaagtcatcgaaccccaagcctttgggctttgccttgtcaaaggcattggcaaagtaggcaaagcttttggcttgaatctcttgatcgtgcaataactcaccaaggaaaaaccatgacctcatctcataacctgattgcagacattgagctgctgaccttgcaacctttgaccttcacacaccatggcaccgagggcttgcccttgctgacgcgcggcattgacgatgaaggacgtcaccaacgaacggtctaccttcctgcagctcaactgcgtggcagggtgcggcatgaatcggccatggccgagttacgcaagaaacccgaaaaagccaagctcgaagacgcctacatgctggctttggggcaagacctgcgacccagcgaagacgatgagcccgaggatattcgcctcagcgaacaaatcaagtttcgacagaaaaacccgtttctcgacatttttggcacctggaaagttgccagccgtttgtatgtttcgcacctcttgcctgctgtgaatgtattacccgacaaagtcagccacattcgccgcgaccttgacaccaacgaagacatgatggctttgctggatgacgaggagcaaaaccgcttgtacgaccggcaagacaagcaaggcctggcttcaaaggcagaaagcttaatcaaactaaccaaccgggaattacttgccgctcgcaaagccaaagaccagaccaagttggcggatctcaatgccaagttggaagaactcaaagcgcttaagaaatcacagaagggggatgaccaatccgacaacaccaagcacttgcttgaattacaagtcattcccgcaggcatcacactcaccggcaaactcatcgttcgacatgccacagctttcgacttgaacactttggtcgaggccttcaacggcttaagtcgcaacccctatatgggtgcacaacgcgcccggggctgtggcgaagtgcaaggtcaagtccgctttcaaaatgacttgggtgaggtgttggttgtggtgaagtttggtggtctgcaagctgccaaggtggcgtggacagatgctgggcaacagtggttgctgccacagggcgaactgacaagcgcatgatttatcgaagcccagaacaacagcgctatgccaagttgatcgagggtgctcttcgcccaggcccgcccttgctggcgggggcctcagcaggtttgggcaaaacccatggttacagcatcccactggtgcgctcgggcaagcggattgccatcgccatgagcacacgccagttgatgcagcaatacctcgacagccatgccttggctacagccttgcaagggcacacatgcacggtgggggaactgcaatcccgtcaacactttgaaactgacaaggcctatcaagcgcaccgatccgaagccttgcaagcacaggtgctgttggtcacccatgccgccgccttgattgacagtttgcaaccgggctatgcccaactgcgcgagcgtgatgtggtgttgttcgatgaggccgatttattggccgacgccgcagaccttcgcagcacctttgccatcagcgcggaaacactcaaagcctgccaagctcaacatttgacgcctgaacaagcagcccacaaggtgcgtcaactcaccacatcaactgaagaccgctgtgcagcaagcgccatcttgtatgccctggccaatcctgcgccctacaaaatggtgggtcacaatgacgcaggtgacttggtgctgcgtcaccgcatgcctgggcgcatgctcaagcctttggtgaaagaggcgccacgctgtattttcaccagtggcaccctgcaagtgcacggcagctttgaccattttgtgcgggccatggggctcacggccatggcgcccgaaagctgccacatcgaacccccgcagcatggccacttgagagttcaagccacggctgatgccttgtctttggaacagatcgcccttcgaatagccgccgctcaaaaccccaccttggtgctcaccagcagccaccgttcgagccaagaactcggggccttgttgccacacgctgtggtgcgtgaagcagatgaacctttggcagatgcggtgcaacgctgccccaccgatggggtgctgatagcagcgggtgcgtggtcgggcttggacgaacctcggctgcgttggcgcacggtggtgattcctcaaaccccatacggtcagcctgttcaggtgaatggaatttcggtgaactacttcatcgacagccaagtggtggccttgcggcgcaccaaccaaggtttgcaccggggtttgcgcacacccgatgcgcagtgcactctgctgttgctggacccgcgaagtagtcgattgactctgcggtcggccatcccagccaggttctcggtggattgggatggctttgaagaaggctcgttggtgttacaaacccatttcaaacgcgagcgcaatcaacaactgaaaaatgcagccttgaagcactacggcaaccagtgcatgtttgaaggctgtgaggtgaccaaagcccattggctggaagtccaccacaccctgcccatcagcgagggcgagcgccgaaccacgctagaagatgtgcaggttttatgcagcaaccaccacaaagaagcccatcatttgctgcgcatggctgctttttctgatgaaaaatcaactgaaatttcaacggagtcaacaacttaaaacgcttcaggtcaagctgccatgtgaatgtgcagttactagaacacaacacg

SEQ ID NO: 254 - DNA, 11648 bp, Artificial Sequence
  Synthetic Oligonucleotide
  misc_feature (1)..(8360): n is a, c, g, or t
nnnnnnnnnnnnnnnnnnnnnnnnnnnnnnnnnnnnnnnnnnnnnnnnnnnnnnnnnnnnnnnnnnnnnnnnnnnnnnnnnnnnnnnnnnnnnnnnnnnnnnnnnnnnnnnnnnnnnnnnnnnnnnnnnnnnnnnnnnnnnnnnnnnnnnnnnnnnnnnnnnnnnnnnnnnnnnnnnnnnnnnnnnnnnnnnnnnnnnnnnnnnnnnnnnnnnnnnnnnnnnnnnnnnnnnnnnnnnnnnnnnnnnnnnnnnnnnnnnnnnnnnnnnnnnnnnnnnnnnnnnnnnnnnnnnnnnnnnnnnnnnnnnnnnnnnnnnnnnnnnnnnnnnnnnnnnnnnnnnnnnnnnnnnnnnnnnnnnnnnnnnnnnnnnnnnnnnnnnnnnnnnnnnnnnnnnnnnnnnnnnnnnnnnnnnnnnnnnnnnnnnnnnnnnnnnnnnnnnnnnnnnnnnnnnnnnnnnnnnnnnnnnnnnnnnnnnnnnnnnnnnnnnnnnnnnnnnnnnnnnnnnnnnnnnnnnnnnnnnnnnnnnnnnnnnnnnnnnnnnnnnnnnnnnnnnnnnnnnnnnnnnnnnnnnnnnnnnnnnnnnnnnnnnnnnnnnnnnnnnnnnnnnnnnnnnnnnnnnnnnnnnnnnnnnnnnnnnnnnnnnnnnnnnnnnnnnnnnnnnnnnnnnnnnnnnnnnnnnnnnnnnnnnnnnnnnnnnnnnnnnnnnnnnnnnnnnnnnnnnnnnnnnnnnnnnnnnnnnnnnnnnnnnnnnnnnnnnnnnnnnnnnnnnnnnnnnnnnnnnnnnnnnnnnnnnnnnnnnnnnnnnnnnnnnnnnnnnnnnnnnnnnnnnnnnnnnnnnnnnnnnnnnnnnnnnnnnnnnnnnnnnnnnnnnnnnnnnnnnnnnnnnnnnnnnnnnnnnnnnnnnnnnnnnnnnnnnnnnnnnnnnnnnnnnnnnnnnnnnnnnnnnnnnnnnnnnnnnnnnnnnnnnnnnnnnnnnnnnnnnnnnnnnnnnnnnnnnnnnnnnnnnnnnnnnnnnnnnnnnnnnnnnnnnnnnnnnnnnnnnnnnnnnnnnnnnnnnnnnnnnnnnnnnnnnnnnnnnnnnnnnnnnnnnnnnnnnnnnnnnnnnnnnnnnnnnnnnnnnnnnnnnnnnnnnnnnnnnnnnnnnnnnnnnnnnnnnnnnnnnnnnnnnnnnnnnnnnnnnnnnnnnnnnnnnnnnnnnnnnnnnnnnnnnnnnnnnnnnnnnnnnnnnnnnnnnnnnnnnnnnnnnnnnnnnnnnnnnnnnnnnnnnnnnnnnnnnnnnnnnnnnnnnnnnnnnnnnnnnnnnnnnnnnnnnnnnnnnnnnnnnnnnnnnnnnnnnnnnnnnnnnnnnnnnnnnnnnnnnnnnnnnnnnnnnnnnnnnnnnnnnnnnnnnnnnnnnnnnnnnnnnnnnnnnnnnnnnnnnnnnnnnnnnnnnnnnnnnnnnnnnnnnnnnnnnnnnnnnnnnnnnnnnnnnnnnnnnnnnnnnnnnnnnnnnnnnnnnnnnnnnnnnnnnnnnnnnnnnnnnnnnnnnnnnnnnnnnnnnnnnnnnnnnnnnnnnnnnnnnnnnnnnnnnnnnnnnnnnnnnnnnnnnnnnnnnnnnnnnnnnnnnnnnnnnnnnnnnnnnnnnnnnnnnnnnnnnnnnnnnnnnnnnnnnnnnnnnnnnnnnnnnnnnnnnnnnnnnnnnnnnnnnnnnnnnnnnnnnnnnnnnnnnnnnnnnnnnnnnnnnnnnnnnnnnnnnnnnnnnnnnnnnnnnnnnnnnnnnnnnnnnnnnnnnnnnnnnnnnnnnnnnnnnnnnnnnnnnnnnnnnnnnnnnnnnnnnnnnnnnnnnnnnnnnnnnnnnnnnnnnnnnnnnnnnnnnnnnnnnnnnnnnnnnnnnnnnnnnnnnnnnnnnnnnnnnnnnnnnnnnnnnnnnnnnnnnnnnnnnnnnnnnnnnnnnnnnnnnnnnnnnnnnnnnnnnnnnnnnnnnnnnnnnnnnnnnnnnnnnnnnnnnnnnnnnnnnnnnnnnnnnnnnnnnnnnnnnnnnnnnnnnnnnnnnnnnnnnnnnnnnnnnnnnnnnnnnnnnnnnnnnnnnnnnnnnnnnnnnnnnnnnnnnnnnnnnnnnnnnnnnnnnnnnnnnnnnnnnnnnnnnnnnnnnnnnnnnnnnnnnnnnnnnnnnnnnnnnnnnnnnnnnnnnnnnnnnnnnnnnnnnnnnnnnnnnnnnnnnnnnnnnnnnnnnnnnnnnnnnnnnnnnnnnnnnnnnnnnnnnnnnnnnnnnnnnnnnnnnnnnnnnnnnnnnnnnnnnnnnnnnnnnnnnnnnnnnnnnnnnnnnnnnnnnnnnnnnnnnnnnnnnnnnnnnnnnnnnnnnnnnnnnnnnnnnnnnnnnnnnnnnnnnnnnnnnnnnnnnnnnnnnnnnnnnnnnnnnnnnnnnnnnnnnnnnnnnnnnnnnnnnnnnnnnnnnnnnnnnnnnnnnnnnnnnnnnnnnnnnnnnnnnnnnnnnnnnnnnnnnnnnnnnnnnnnnnnnnnnnnnnnnnnnnnnnnnnnnnnnnnnnnnnnnnnnnnnnnnnnnnnnnnnnnnnnnnnnnnnnnnnnnnnnnnnnnnnnnnnnnnnnnnnnnnnnnnnnnnnnnnnnnnnnnnnnnnnnnnnnnnnnnnnnnnnnnnnnnnnnnnnnnnnnnnnnnnnnnnnnnnnnnnnnnnnnnnnnnnnnnnnnnnnnnnnnnnnnnnnnnnnnnnnnnnnnnnnnnnnnnnnnnnnnnnnnnnnnnnnnnnnnnnnnnnnnnnnnnnnnnnnnnnnnnnnnnnnnnnnnnnnnnnnnnnnnnnnnnnnnnnnnnnnnnnnnnnnnnnnnnnnnnnnnnnnnnnnnnnnnnnnnnnnnnnnnnnnnnnnnnnnnnnnnnnnnnnnnnnnnnnnnnnnnnnnnnnnnnnnnnnnnnnnnnnnnnnnnnnnnnnnnnnnnnnnnnnnnnnnnnnnnnnnnnnnnnnnnnnnnnnnnnnnnnnnnnnnnnnnnnnnnnnnnnnnnnnnnnnnnnnnnnnnnnnnnnnnnnnnnnnnnnnnnnnnnnnnnnnnnnnnnnnnnnnnnnnnnnnnnnnnnnnnnnnnnnnnnnnnnnnnnnnnnnnnnnnnnnnnnnnnnnnnnnnnnnnnnnnnnnnnnnnnnnnnnnnnnnnnnnnnnnnnnnnnnnnnnnnnnnnnnnnnnnnnnnnnnnnnnnnnnnnnnnnnnnnnnnnnnnnnnnnnnnnnnnnnnnnnnnnnnnnnnnnnnnnnnnnnnnnnnnnnnnnnnnnnnnnnnnnnnnnnnnnnnnnnnnnnnnnnnnnnnnnnnnnnnnnnnnnnnnnnnnnnnnnnnnnnnnnnnnnnnnnnnnnnnnnnnnnnnnnnnnnnnnnnnnnnnnnnnnnnnnnnnnnnnnnnnnnnnnnnnnnnnnnnnnnnnnnnnnnnnnnnnnnnnnnnnnnnnnnnnnnnnnnnnnnnnnnnnnnnnnnnnnnnnnnnnnnnnnnnnnnnnnnnnnnnnnnnnnnnnnnnnnnnnnnnnnnnnnnnnnnnnnnnnnnnnnnnnnnnnnnnnnnnnnnnnnnnnnnnnnnnnnnnnnnnnnnnnnnnnnnnnnnnnnnnnnnnnnnnnnnnnnnnnnnnnnnnnnnnnnnnnnnnnnnnnnnnnnnnnnnnnnnnnnnnnnnnnnnnnnnnnnnnnnnnnnnnnnnnnnnnnnnnnnnnnnnnnnnnnnnnnnnnnnnnnnnnnnnnnnnnnnnnnnnnnnnnnnnnnnnnnnnnnnnnnnnnnnnnnnnnnnnnnnnnnnnnnnnnnnnnnnnnnnnnnnnnnnnnnnnnnnnnnnnnnnnnnnnnnnnnnnnnnnnnnnnnnnnnnnnnnnnnnnnnnnnnnnnnnnnnnnnnnnnnnnnnnnnnnnnnnnnnnnnnnnnnnnnnnnnnnnnnnnnnnnnnnnnnnnnnnnnnnnnnnnnnnnnnnnnnnnnnnnnnnnnnnnnnnnnnnnnnnnnnnnnnnnnnnnnnnnnnnnnnnnnnnnnnnnnnnnnnnnnnnnnnnnnnnnnnnnnnnnnnnnnnnnnnnnnnnnnnnnnnnnnnnnnnnnnnnnnnnnnnnnnnnnnnnnnnnnnnnnnnnnnnnnnnnnnnnnnnnnnnnnnnnnnnnnnnnnnnnnnnnnnnnnnnnnnnnnnnnnnnnnnnnnnnnnnnnnnnnnnnnnnnnnnnnnnnnnnnnnnnnnnnnnnnnnnnnnnnnnnnnnnnnnnnnnnnnnnnnnnnnnnnnnnnnnnnnnnnnnnnnnnnnnnnnnnnnnnnnnnnnnnnnnnnnnnnnnnnnnnnnnnnnnnnnnnnnnnnnnnnnnnnnnnnnnnnnnnnnnnnnnnnnnnnnnnnnnnnnnnnnnnnnnnnnnnnnnnnnnnnnnnnnnnnnnnnnnnnnnnnnnnnnnnnnnnnnnnnnnnnnnnnnnnnnnnnnnnnnnnnnnnnnnnnnnnnnnnnnnnnnnnnnnnnnnnnnnnnnnnnnnnnnnnnnnnnnnnnnnnnnnnnnnnnnnnnnnnnnnnnnnnnnnnnnnnnnnnnnnnnnnnnnnnnnnnnnnnnnnnnnnnnnnnnnnnnnnnnnnnnnnnnnnnnnnnnnnnnnnnnnnnnnnnnnnnnnnnnnnnnnnnnnnnnnnnnnnnnnnnnnnnnnnnnnnnnnnnnnnnnnnnnnnnnnnnnnnnnnnnnnnnnnnnnnnnnnnnnnnnnnnnnnnnnnnnnnnnnnnnnnnnnnnnnnnnnnnnnnnnnnnnnnnnnnnnnnnnnnnnnnnnnnnnnnnnnnnnnnnnnnnnnnnnnnnnnnnnnnnnnnnnnnnnnnnnnnnnnnnnnnnnnnnnnnnnnnnnnnnnnnnnnnnnnnnnnnnnnnnnnnnnnnnnnnnnnnnnnnnnnnnnnnnnnnnnnnnnnnnnnnnnnnnnnnnnnnnnnnnnnnnnnnnnnnnnnnnnnnnnnnnnnnnnnnnnnnnnnnnnnnnnnnnnnnnnnnnnnnnnnnnnnnnnnnnnnnnnnnnnnnnnnnnnnnnnnnnnnnnnnnnnnnnnnnnnnnnnnnnnnnnnnnnnnnnnnnnnnnnnnnnnnnnnnnnnnnnnnnnnnnnnnnnnnnnnnnnnnnnnnnnnnnnnnnnnnnnnnnnnnnnnnnnnnnnnnnnnnnnnnnnnnnnnnnnnnnnnnnnnnnnnnnnnnnnnnnnnnnnnnnnnnnnnnnnnnnnnnnnnnnnnnnnnnnnnnnnnnnnnnnnnnnnnnnnnnnnnnnnnnnnnnnnnnnnnnnnnnnnnnnnnnnnnnnnnnnnnnnnnnnnnnnnnnnnnnnnnnnnnnnnnnnnnnnnnnnnnnnnnnnnnnnnnnnnnnnnnnnnnnnnnnnnnnnnnnnnnnnnnnnnnnnnnnnnnnnnnnnnnnnnnnnnnnnnnnnnnnnnnnnnnnnnnnnnnnnnnnnnnnnnnnnnnnnnnnnnnnnnnnnnnnnnnnnnnnnnnnnnnnnnnnnnnnnnnnnnnnnnnnnnnnnnnnnnnnnnnnnnnnnnnnnnnnnnnnnnnnnnnnnnnnnnnnnnnnnnnnnnnnnnnnnnnnnnnnnnnnnnnnnnnnnnnnnnnnnnnnnnnnnnnnnnnnnnnnnnnnnnnnnnnnnnnnnnnnnnnnnnnnnnnnnnnnnnnnnnnnnnnnnnnnnnnnnnnnnnnnnnnnnnnnnnnnnnnnnnnnnnnnnnnnnnnnnnnnnnnnnnnnnnnnnnnnnnnnnnnnnnnnnnnnnnnnnnnnnnnnnnnnnnnnnnnnnnnnnnnnnnnnnnnnnnnnnnnnnnnnnnnnnnnnnnnnnnnnnnnnnnnnnnnnnnnnnnnnnnnnnnnnnnnnnnnnnnnnnnnnnnnnnnnnnnnnnnnnnnnnnnnnnnnnnnnnnnnnnnnnnnnnnnnnnnnnnnnnnnnnnnnnnnnnnnnnnnnnnnnnnnnnnnnnnnnnnnnnnnnnnnnnnnnnnnnnnnnnnnnnnnnnnnnnnnnnnnnnnnnnnnnnnnnnnnnnnnnnnnnnnnnnnnnnnnnnnnnnnnnnnnnnnnnnnnnnnnnnnnnnnnnnnnnnnnnnnnnnnnnnnnnnnnnnnnnnnnnnnnnnnnnnnnnnnnnnnnnnnnnnnnnnnnnnnnnnnnnnnnnnnnnnnnnnnnnnnnnnnnnnnnnnnnnnnnnnnnnnnnnnnnnnnnnnnnnnnnnnnnnnnnnnnnnnnnnnnnnnnnnnnnnnnnnnnnnnnnnnnnnnnnnnnnnnnnnnnnnnnnnnnnnnnnnnnnnnnnnnnnnnnnnnnnnnnnnnnnnnnnnnnnnnnnnnnnnnnnnnnnnnnnnnnnnnnnnnnnnnnnnnnnnnnnnnnnnnnnnnnnnnnnnnnnnnnnnnnnnnnnnnnnnnnnnnnnnnnnnnnnnnnnnnnnnnnnnnnnnnnnnnnnnnnnnnnnnnnnnnnnnnnnnnnnnnnnnnnnnnnnnnnnnnnnnnnnnnnnnnnnnnnnnnnnnnnnnnnnnnnnnnnnnnnnnnnnnnnnnnnnnnnnnnnnnnnnnnnnnnnnnnnnnnnnnnnnnnnnnnnnnnnnnnnnnnnnnnnnnnnnnnnnnnnnnnnnnnnnnnnnnnnnnnnnnnnnnnnnnnnnnnnnnnnnnnnnnnnnnnnnnnnnnnnnnnnnnnnnnnnnnnnnnnnnnnnnnnnnnnnnnnnnnnnnnnnnnnnnnnnnnnnnnnnnnnnnnnnnnnnnnnnnnnnnnnnnnnnnnnnnnnnnnnnnnnnnnnnnnnnnnnnnnnnnnnnnnnnnnnnnnnnnnnnnnnnnnnnnnnnnnnnnnnnnnnnnnnnnnnnnnnnnnnnnnnnnnnnnnnnnnnnnnnnnnnnnnnnnnnnnnnnnnnnnnnnnnnnnnnnnnnnnnnnnnnnnnnnnnnnnnnnnnnnnnnnnnnnnnnnnnnnnnnnnnnnnnnnnnnnnnnnnnnnnnnnnnnnnnnnnnnnnnnnnnnnnnnnnnnnnnnnnnnnnnnnnnnnnnnnnnnnnnnnnnnnnnnnnnnnnnnnnnnnnnnnnnnnnnnnnnnnnnnnnnnnnnnnnnnnnnnnnnnnnnnnnnnnnnnnnnnnnnnnnnnnnnnnnnnnnnnnnnnnnnnnnnnnnnnnnnnnnnnnnnnnnnnnnnnnnnnnnnnnnnnnnnnnnnnnnnnnnnnnnnnnnnnnnnnnnnnnnnnnnnnnnnnnnnnnnnnnnnnnnnnnnnnnnnnnnnnnnnnnnnnnnnnnnnnnnnnnnnnnnnnnnnnnnnnnnnnnnnnnnnnnnnnnnnnnnnnnnnnnnnnnnnnnnnnnnnnnnnnnnnnnnnnnnnnnnnnnnnnnnnnnnnnnnnnnnnnnnnnnnnnnnnnnnnnnnnnnnnnnnnnnnnnnnnnnnnnnnnnnnnnnnnnnnnnnnnnnnnnnnnnnnnnnnnnnnnnnnnnnnnnnnnnnnnnnnnnnnnnnnnnnnnnnnnnnnnnnnnnnnnnnnnnnnnnnnnnnnnnnnnnnnnnnnnnnnnnnnnnnnnnnnnnnnnnnnnnnnnnnnnnnnnnnnnnnnnnnnnnnnnnnnnnnnnnnnnnnnnnnnnnnnnnnnnnnnnnnnnnnnnnnnnnnnnnnnnnnnnnnnnnnnnnnnnnnnnnnnnnnnnnnnnnnnnnnnnnnnnnnnnnnnnnnnnnnnnnnnnnnnnnnnnnnnnnnnnnnnnnnnnnnnnnnnnnnnnnnnnnnnnnnnnnnnnnnnnnnnnnnnnnnnnnnnnnnnnnnnnnnnnnnnnnnnnnnnnnnnnnnnnnnnnnnnnnnnnnnnnnnnnnnnnnnnnnnnnnnnnnnnnnnnnnnnnnnnnnnnnnnnnnnnnnnnnnnnnnnnnnnnnnnnnnnnnnnnnnnnnnnnnnnnnnnnnnnnnnnnnnnnnnnnnnnnnnnnnnnnnnnnnnnnnnnnnnnnnnnnnnnnnnnnnnnnnnnnnnnnnnnnnnnnnnnnnnnnnnnnnnnnnnnnnnnnnnnnnnnnnnnnnnnnnnnnnnnnnnnnnnnnnnnnnnnnnnnnnnnnnnnnnnnnnnnnnnnnnnnnnnnnnnnnnnnnnnnnnnnnnnnnnnnnnnnnnnnnnnnnnnnnnnnnnnnnnnnnnnnnnnnnnnnnnnnnnnnnnnnnnnnnnnnnnnnnnnnnnnnnnnnnnnnnnnnnnnnnnnnnnnnnnnnnnnnnnnnnnnnnnnnnnnnnnnnnnnnnnnnnnnnnnnnnnnnnnnnnnnnnnnnnnnnnnnnnnnnnnnnnnnnnnnnnnnnnnnnnnnnnnnnnnnnnnnnnnnnnnnnnnnnnnnnnnnnnnnnnnnnnnnnnnnnnnnnnnnnnnnnnnnnnnnnnnnnnnnnnnnnnnnnnnnnnnnnnnnnnnnnnnnnnnnnnnnnnnnnnnnnnnnnnnnnnnnnnnnnnnnnnnnnggcacttaaggcaggcaagccctgtgtattgcttggactaggtaaacgaaccacgacggcaaatgatatttacgtgacctacgacccaagagccgcacgtttgtgcgagcaaggtaaaaccaaaacttatgacgctacaaaggagaaagcatggacatcatgattgataagccacctcgtgtgcgcgggtacgcacttcaccgaattgtggaacaacttcaaaacggcaagcctgccttgtgggcagatgaagggtcaactgttcgtattaggcctcatgacgcgcaaccacctctgtacgagatcggaaagttattggcattcacgacaactgcatgtgttgcatttagtaagggccacaagcatgtctatctcccaacatctgattggcgagggcgaagggtatggctagataaacaagcagccaaacatggttttgaggttgttggcgtccacatctctgggggcatgcaaaaaattgaaacccataatggccgaaagttcaccattgatgccactgagtttaccgggcttctgcgcgtaagcgattcgactttattcggtcagtgtttgataaatggagtcggcaaagttggcaaggcatttggtttgaatttgatgatcgttcaataaaacaaaaaaaggcacatgaaatgactaaccagaaaatgaaaatagttgcacaaatcagcttgcattcagtacaaccgctaacgtttactcatcatagtgttgacgggttaccgcttttggcaagaggcatcgatcaagaggggcgccaccttcgcacggtctacatacctgcagcgcaatttagaggtcgagttcggcacgaagcggcgttgagtcagatgcgctctgagagcggcaaggtgaagcttgaagaagcctatatgctagcccttggccaagacctacgcccagcggaagatgacgctccagaacaagtcaggctcaaagagcagattgcggtccgtaaagaaaaccccttattggacttatttggcacatggaagttggctagtcgtttgtatgtctctcacttcatgccagaggtcaatgttctacccgcaaaaatcagccatataagaagggacctagacacgaacgaagatatgatggatgcgctgggttctgatgagcaagaccgtatgtacgatcgtcagagtaaacaaggtatggcctcacaagttggtcaattaattaagcttgccacgcgtgaactaatggctgcaaagaaagcaaaagatgtaaccaaggttgacgaaatagaagccaaaatcttagagttaaaagaacttaaaaaaacgcaaaagggtgatgacgattccgaaaataccaaacatttagttgaacttgagttcatacccgcaggtatcactctgaatggaaaattaactgtaaattcagccatacccaacgacttacgtgtgttagtggatgctttagtggggtttggcgaaaaaccttaccttggcgctcaacgtgctcgtggttgtggggaagttgcacttgaagcaacatttaagaatgcagatggtgatgtactcgctacggtagcctttgctgagggcgagggttctaatgttcaatggactgaggcagggactacttttttaaatgctgaaacaactaccacatgatttaccgcagccctgaacagacacaatatgcgaaattaattgagggtgctattaaaccgggggcaccacttctggcaggagcagcagcaggtctgggtaaaacgcacggctttagcattcctctaattacttcaggaaaacgcattgcgatttgtttaagtactcggcagttgattgatcagtatttaaaaagtgatgcgttgcaggtggcttgcggtggaagatccgtttcggttgtggcgttgcaatcaaggcgagactttacacgtgactcagattatcgctcacacaaaaagcaggcgttagaagccgagttattaattaccacccatgcggcagcctttattgacagtttcaatccagagtatgcacagcttcgtagtcgtgatgttgtgctgtttgatgaggctgatttattagctgacgctgctgacctgagaagcacatttagtatttcggctgaagcacttaaagattgtggcgctatgttaggtaatgcgttgagtgcggctaaattagttaaggcaaatgccgttgacgcagaagaccgtggtgctgccagttctatcctatatgccttagagaacccagcttggtacaaagtagttggatatgaggaggatggcgctttaactttaaaacatcgtttgccgggcagaatgcttaagcggcttgtggcagatgtaccacgctgtatttttacaagcggaacacttcaggtatctgggcggtttgattactttgctaaagcacttgggctcacagctatagcaccagagagtaggcacattgatccagtcatgcacggcagcctagatgttcaagttgcatctgatgaaatgtctattaatgaaatggctgaaaagattaaagctgcgaagcggccaacattggttcttacaacaagccacaaaacaacatttgagttgggtcaattactaccagaggccactattagagagtccggagaacctttgactgatgcggttgcgcggtgccccgatgacggcattctaatcgcagcaggtgcttggtctgggctagatgcgccaaggttacgatggaaaacattagtgattccaaaaacaccttatggtgtaagaaacgttttagatggtcatgatgtcgggcgttatatcgatagtaaggttgttgctattcgtcgaactaatcagggactgcatcgtgggcttagaacgcccgacgctcaatgcactttactgctactagacccgcgcagtagtaggtcagaactaagagaggcaataccgtcaaggtttaaagttgattgggttggcttcgaagaggggggccgtgaacttgttgagcacatgaaagctgaacgaaatgaaagccttcgtaaagctgcgctaaagcattatggtgagcaatgcatgtgggtgggctgtacggtgacattacctcacctgctcgatgtgcatcactgcaaccctatttcacttgggcaacgacgaacaacgatgtcagatgttaaagttttatgtaaaaatcatcatgctgaggagcatcataggatgcgaatgagcagtttagatgctctagacaatgatttaaatcaaatagaatcaaagggttgaagaatatcagggtcaagctgccatgtaaatgagcagttactagaact

SEQ ID NO: 255 - DNA, 11647 bp, Artificial Sequence
  Synthetic Oligonucleotide
  misc_feature (1)..(7312): n is a, c, g, or t
nnnnnnnnnnnnnnnnnnnnnnnnnnnnnnnnnnnnnnnnnnnnnnnnnnnnnnnnnnnnnnnnnnnnnnnnnnnnnnnnnnnnnnnnnnnnnnnnnnnnnnnnnnnnnnnnnnnnnnnnnnnnnnnnnnnnnnnnnnnnnnnnnnnnnnnnnnnnnnnnnnnnnnnnnnnnnnnnnnnnnnnnnnnnnnnnnnnnnnnnnnnnnnnnnnnnnnnnnnnnnnnnnnnnnnnnnnnnnnnnnnnnnnnnnnnnnnnnnnnnnnnnnnnnnnnnnnnnnnnnnnnnnnnnnnnnnnnnnnnnnnnnnnnnnnnnnnnnnnnnnnnnnnnnnnnnnnnnnnnnnnnnnnnnnnnnnnnnnnnnnnnnnnnnnnnnnnnnnnnnnnnnnnnnnnnnnnnnnnnnnnnnnnnnnnnnnnnnnnnnnnnnnnnnnnnnnnnnnnnnnnnnnnnnnnnnnnnnnnnnnnnnnnnnnnnnnnnnnnnnnnnnnnnnnnnnnnnnnnnnnnnnnnnnnnnnnnnnnnnnnnnnnnnnnnnnnnnnnnnnnnnnnnnnnnnnnnnnnnnnnnnnnnnnnnnnnnnnnnnnnnnnnnnnnnnnnnnnnnnnnnnnnnnnnnnnnnnnnnnnnnnnnnnnnnnnnnnnnnnnnnnnnnnnnnnnnnnnnnnnnnnnnnnnnnnnnnnnnnnnnnnnnnnnnnnnnnnnnnnnnnnnnnnnnnnnnnnnnnnnnnnnnnnnnnnnnnnnnnnnnnnnnnnnnnnnnnnnnnnnnnnnnnnnnnnnnnnnnnnnnnnnnnnnnnnnnnnnnnnnnnnnnnnnnnnnnnnnnnnnnnnnnnnnnnnnnnnnnnnnnnnnnnnnnnnnnnnnnnnnnnnnnnnnnnnnnnnnnnnnnnnnnnnnnnnnnnnnnnnnnnnnnnnnnnnnnnnnnnnnnnnnnnnnnnnnnnnnnnnnnnnnnnnnnnnnnnnnnnnnnnnnnnnnnnnnnnnnnnnnnnnnnnnnnnnnnnnnnnnnnnnnnnnnnnnnnnnnnnnnnnnnnnnnnnnnnnnnnnnnnnnnnnnnnnnnnnnnnnnnnnnnnnnnnnnnnnnnnnnnnnnnnnnnnnnnnnnnnnnnnnnnnnnnnnnnnnnnnnnnnnnnnnnnnnnnnnnnnnnnnnnnnnnnnnnnnnnnnnnnnnnnnnnnnnnnnnnnnnnnnnnnnnnnnnnnnnnnnnnnnnnnnnnnnnnnnnnnnnnnnnnnnnnnnnnnnnnnnnnnnnnnnnnnnnnnnnnnnnnnnnnnnnnnnnnnnnnnnnnnnnnnnnnnnnnnnnnnnnnnnnnnnnnnnnnnnnnnnnnnnnnnnnnnnnnnnnnnnnnnnnnnnnnnnnnnnnnnnnnnnnnnnnnnnnnnnnnnnnnnnnnnnnnnnnnnnnnnnnnnnnnnnnnnnnnnnnnnnnnnnnnnnnnnnnnnnnnnnnnnnnnnnnnnnnnnnnnnnnnnnnnnnnnnnnnnnnnnnnnnnnnnnnnnnnnnnnnnnnnnnnnnnnnnnnnnnnnnnnnnnnnnnnnnnnnnnnnnnnnnnnnnnnnnnnnnnnnnnnnnnnnnnnnnnnnnnnnnnnnnnnnnnnnnnnnnnnnnnnnnnnnnnnnnnnnnnnnnnnnnnnnnnnnnnnnnnnnnnnnnnnnnnnnnnnnnnnnnnnnnnnnnnnnnnnnnnnnnnnnnnnnnnnnnnnnnnnnnnnnnnnnnnnnnnnnnnnnnnnnnnnnnnnnnnnnnnnnnnnnnnnnnnnnnnnnnnnnnnnnnnnnnnnnnnnnnnnnnnnnnnnnnnnnnnnnnnnnnnnnnnnnnnnnnnnnnnnnnnnnnnnnnnnnnnnnnnnnnnnnnnnnnnnnnnnnnnnnnnnnnnnnnnnnnnnnnnnnnnnnnnnnnnnnnnnnnnnnnnnnnnnnnnnnnnnnnnnnnnnnnnnnnnnnnnnnnnnnnnnnnnnnnnnnnnnnnnnnnnnnnnnnnnnnnnnnnnnnnnnnnnnnnnnnnnnnnnnnnnnnnnnnnnnnnnnnnnnnnnnnnnnnnnnnnnnnnnnnnnnnnnnnnnnnnnnnnnnnnnnnnnnnnnnnnnnnnnnnnnnnnnnnnnnnnnnnnnnnnnnnnnnnnnnnnnnnnnnnnnnnnnnnnnnnnnnnnnnnnnnnnnnnnnnnnnnnnnnnnnnnnnnnnnnnnnnnnnnnnnnnnnnnnnnnnnnnnnnnnnnnnnnnnnnnnnnnnnnnnnnnnnnnnnnnnnnnnnnnnnnnnnnnnnnnnnnnnnnnnnnnnnnnnnnnnnnnnnnnnnnnnnnnnnnnnnnnnnnnnnnnnnnnnnnnnnnnnnnnnnnnnnnnnnnnnnnnnnnnnnnnnnnnnnnnnnnnnnnnnnnnnnnnnnnnnnnnnnnnnnnnnnnnnnnnnnnnnnnnnnnnnnnnnnnnnnnnnnnnnnnnnnnnnnnnnnnnnnnnnnnnnnnnnnnnnnnnnnnnnnnnnnnnnnnnnnnnnnnnnnnnnnnnnnnnnnnnnnnnnnnnnnnnnnnnnnnnnnnnnnnnnnnnnnnnnnnnnnnnnnnnnnnnnnnnnnnnnnnnnnnnnnnnnnnnnnnnnnnnnnnnnnnnnnnnnnnnnnnnnnnnnnnnnnnnnnnnnnnnnnnnnnnnnnnnnnnnnnnnnnnnnnnnnnnnnnnnnnnnnnnnnnnnnnnnnnnnnnnnnnnnnnnnnnnnnnnnnnnnnnnnnnnnnnnnnnnnnnnnnnnnnnnnnnnnnnnnnnnnnnnnnnnnnnnnnnnnnnnnnnnnnnnnnnnnnnnnnnnnnnnnnnnnnnnnnnnnnnnnnnnnnnnnnnnnnnnnnnnnnnnnnnnnnnnnnnnnnnnnnnnnnnnnnnnnnnnnnnnnnnnnnnnnnnnnnnnnnnnnnnnnnnnnnnnnnnnnnnnnnnnnnnnnnnnnnnnnnnnnnnnnnnnnnnnnnnnnnnnnnnnnnnnnnnnnnnnnnnnnnnnnnnnnnnnnnnnnnnnnnnnnnnnnnnnnnnnnnnnnnnnnnnnnnnnnnnnnnnnnnnnnnnnnnnnnnnnnnnnnnnnnnnnnnnnnnnnnnnnnnnnnnnnnnnnnnnnnnnnnnnnnnnnnnnnnnnnnnnnnnnnnnnnnnnnnnnnnnnnnnnnnnnnnnnnnnnnnnnnnnnnnnnnnnnnnnnnnnnnnnnnnnnnnnnnnnnnnnnnnnnnnnnnnnnnnnnnnnnnnnnnnnnnnnnnnnnnnnnnnnnnnnnnnnnnnnnnnnnnnnnnnnnnnnnnnnnnnnnnnnnnnnnnnnnnnnnnnnnnnnnnnnnnnnnnnnnnnnnnnnnnnnnnnnnnnnnnnnnnnnnnnnnnnnnnnnnnnnnnnnnnnnnnnnnnnnnnnnnnnnnnnnnnnnnnnnnnnnnnnnnnnnnnnnnnnnnnnnnnnnnnnnnnnnnnnnnnnnnnnnnnnnnnnnnnnnnnnnnnnnnnnnnnnnnnnnnnnnnnnnnnnnnnnnnnnnnnnnnnnnnnnnnnnnnnnnnnnnnnnnnnnnnnnnnnnnnnnnnnnnnnnnnnnnnnnnnnnnnnnnnnnnnnnnnnnnnnnnnnnnnnnnnnnnnnnnnnnnnnnnnnnnnnnnnnnnnnnnnnnnnnnnnnnnnnnnnnnnnnnnnnnnnnnnnnnnnnnnnnnnnnnnnnnnnnnnnnnnnnnnnnnnnnnnnnnnnnnnnnnnnnnnnnnnnnnnnnnnnnnnnnnnnnnnnnnnnnnnnnnnnnnnnnnnnnnnnnnnnnnnnnnnnnnnnnnnnnnnnnnnnnnnnnnnnnnnnnnnnnnnnnnnnnnnnnnnnnnnnnnnnnnnnnnnnnnnnnnnnnnnnnnnnnnnnnnnnnnnnnnnnnnnnnnnnnnnnnnnnnnnnnnnnnnnnnnnnnnnnnnnnnnnnnnnnnnnnnnnnnnnnnnnnnnnnnnnnnnnnnnnnnnnnnnnnnnnnnnnnnnnnnnnnnnnnnnnnnnnnnnnnnnnnnnnnnnnnnnnnnnnnnnnnnnnnnnnnnnnnnnnnnnnnnnnnnnnnnnnnnnnnnnnnnnnnnnnnnnnnnnnnnnnnnnnnnnnnnnnnnnnnnnnnnnnnnnnnnnnnnnnnnnnnnnnnnnnnnnnnnnnnnnnnnnnnnnnnnnnnnnnnnnnnnnnnnnnnnnnnnnnnnnnnnnnnnnnnnnnnnnnnnnnnnnnnnnnnnnnnnnnnnnnnnnnnnnnnnnnnnnnnnnnnnnnnnnnnnnnnnnnnnnnnnnnnnnnnnnnnnnnnnnnnnnnnnnnnnnnnnnnnnnnnnnnnnnnnnnnnnnnnnnnnnnnnnnnnnnnnnnnnnnnnnnnnnnnnnnnnnnnnnnnnnnnnnnnnnnnnnnnnnnnnnnnnnnnnnnnnnnnnnnnnnnnnnnnnnnnnnnnnnnnnnnnnnnnnnnnnnnnnnnnnnnnnnnnnnnnnnnnnnnnnnnnnnnnnnnnnnnnnnnnnnnnnnnnnnnnnnnnnnnnnnnnnnnnnnnnnnnnnnnnnnnnnnnnnnnnnnnnnnnnnnnnnnnnnnnnnnnnnnnnnnnnnnnnnnnnnnnnnnnnnnnnnnnnnnnnnnnnnnnnnnnnnnnnnnnnnnnnnnnnnnnnnnnnnnnnnnnnnnnnnnnnnnnnnnnnnnnnnnnnnnnnnnnnnnnnnnnnnnnnnnnnnnnnnnnnnnnnnnnnnnnnnnnnnnnnnnnnnnnnnnnnnnnnnnnnnnnnnnnnnnnnnnnnnnnnnnnnnnnnnnnnnnnnnnnnnnnnnnnnnnnnnnnnnnnnnnnnnnnnnnnnnnnnnnnnnnnnnnnnnnnnnnnnnnnnnnnnnnnnnnnnnnnnnnnnnnnnnnnnnnnnnnnnnnnnnnnnnnnnnnnnnnnnnnnnnnnnnnnnnnnnnnnnnnnnnnnnnnnnnnnnnnnnnnnnnnnnnnnnnnnnnnnnnnnnnnnnnnnnnnnnnnnnnnnnnnnnnnnnnnnnnnnnnnnnnnnnnnnnnnnnnnnnnnnnnnnnnnnnnnnnnnnnnnnnnnnnnnnnnnnnnnnnnnnnnnnnnnnnnnnnnnnnnnnnnnnnnnnnnnnnnnnnnnnnnnnnnnnnnnnnnnnnnnnnnnnnnnnnnnnnnnnnnnnnnnnnnnnnnnnnnnnnnnnnnnnnnnnnnnnnnnnnnnnnnnnnnnnnnnnnnnnnnnnnnnnnnnnnnnnnnnnnnnnnnnnnnnnnnnnnnnnnnnnnnnnnnnnnnnnnnnnnnnnnnnnnnnnnnnnnnnnnnnnnnnnnnnnnnnnnnnnnnnnnnnnnnnnnnnnnnnnnnnnnnnnnnnnnnnnnnnnnnnnnnnnnnnnnnnnnnnnnnnnnnnnnnnnnnnnnnnnnnnnnnnnnnnnnnnnnnnnnnnnnnnnnnnnnnnnnnnnnnnnnnnnnnnnnnnnnnnnnnnnnnnnnnnnnnnnnnnnnnnnnnnnnnnnnnnnnnnnnnnnnnnnnnnnnnnnnnnnnnnnnnnnnnnnnnnnnnnnnnnnnnnnnnnnnnnnnnnnnnnnnnnnnnnnnnnnnnnnnnnnnnnnnnnnnnnnnnnnnnnnnnnnnnnnnnnnnnnnnnnnnnnnnnnnnnnnnnnnnnnnnnnnnnnnnnnnnnnnnnnnnnnnnnnnnnnnnnnnnnnnnnnnnnnnnnnnnnnnnnnnnnnnnnnnnnnnnnnnnnnnnnnnnnnnnnnnnnnnnnnnnnnnnnnnnnnnnnnnnnnnnnnnnnnnnnnnnnnnnnnnnnnnnnnnnnnnnnnnnnnnnnnnnnnnnnnnnnnnnnnnnnnnnnnnnnnnnnnnnnnnnnnnnnnnnnnnnnnnnnnnnnnnnnnnnnnnnnnnnnnnnnnnnnnnnnnnnnnnnnnnnnnnnnnnnnnnnnnnnnnnnnnnnnnnnnnnnnnnnnnnnnnnnnnnnnnnnnnnnnnnnnnnnnnnnnnnnnnnnnnnnnnnnnnnnnnnnnnnnnnnnnnnnnnnnnnnnnnnnnnnnnnnnnnnnnnnnnnnnnnnnnnnnnnnnnnnnnnnnnnnnnnnnnnnnnnnnnnnnnnnnnnnnnnnnnnnnnnnnnnnnnnnnnnnnnnnnnnnnnnnnnnnnnnnnnnnnnnnnnnnnnnnnnnnnnnnnnnnnnnnnnnnnnnnnnnnnnnnnnnnnnnnnnnnnnnnnnnnnnnnnnnnnnnnnnnnnnnnnnnnnnnnnnnnnnnnnnnnnnnnnnnnnnnnnnnnnnnnnnnnnnnnnnnnnnnnnnnnnnnnnnnnnnnnnnnnnnnnnnnnnnnnnnnnnnnnnnnnnnnnnnnnnnnnnnnnnnnnnnnnnnnnnnnnnnnnnnnnnnnnnnnnnnnnnnnnnnnnnnnnnnnnnnnnnnnnnnnnnnnnnnnnnnnnnnnnnnnnnnnnnnnnnnnnnnnnnnnnnnnnnnnnnnnnnnnnnnnnnnnnnnnnnnnnnnnnnnnnnnnnnnnnnnnnnnnnnnnnnnnnnnnnnnnnnnnnnnnnnnnnnnnnnnnnnnnnnnnnnnnnnnnnnnnnnnnnnnnnnnnnnnnnnnnnnnnnnnnnnnnnnnnnnnnnnnnnnnnnnnnnnnnnnnnnnnnnnnnnnnnnnnnnnnnnnnnnnnnnnnnnnnnnnnnnnnnnnnnnnnnnnnnnnnnnnnnnnnnnnnnnnnnnnnnnnnnnnnnnnnnnnnnnnnnnnnnnnnnnnnnnnnnnnnnnnnnnnnnnnnnnnnnnnnnnnnnnnnnnnnnnnnnnnnnnnnnnnnnnnnnnnnnnnnnnnnnnnnnnnnnnnnnnnnnnnnnnnnnnnnnnnnnnnnnnnnnnnnnnnnnnnnnnnnnnnnnnnnnnnnnnnnnnnnnnnnnnnnnnnnnnnnnnnnnnnnnnnnnnnnnnnnnnnnnnnnnnnnnnnnnnnnnnnnnnnnnnnnnnnnnnnnnnnnnnnnnnnnnnnnnnnnnnnnnnnnnnnnnnnnnnnnnnnnnnnnnnnnnnnnnnnnnnnnnnnnnnnnnnnnnnnnnnnnnnnnnnnnnnnnnnnnnnnnnnnnnnnnnnnnnnnnnnnnnnnnnnnnnnnnnnnnnnnnnnnnnnnnnnnnnnnnnnnnnnnnnnnnnnnnnnnnnnnnnnnnnnnnnnnnnnnnnnnnnnnnnnnnnnnnnnnnnnnnnnnnnnnnnnnnnnnnnnnnnnnnnnnnnnnnnnnnnnnnnnnnnnnnnnnnnnnnnnnnnnnnnnnnnnnnnnnnnnnnnnnnnnnnnnnnnnnnnnnnnnnnnnnnnnnnnnnnnnnnnnnnnnnnnnnnnnnnnnnnnnnnnnnnnnnnnnnnnnnnnnnnnnnnnnnnnnnnnnnnnnnnnnnnnnnnnnnnnnnnnnnnnnnnnnnnnnnattgatagcgttaatcgtttattatttgcagggcgaaaagcaaatcagttatttaatgatcagttaaaaccaaagcccctcaatagctgatatcgaaatatagtttcattgcatcattactgtcatcggttgtgtttcgttcctttgctttgcattaagtgtttggagagttgaatggagatgtttacgttacgtgcttacctaaacacgccgattattaaacgagggttcatgactcttgatgcattgcttatgtcaattttaggtaaaggggatgtcagtgatcttttgcgctgcgacgaagggctttattttgcgagcgcagggtttccagttgattcggtgtctgataaatttagagcatcttttgtagcaagtcttcgacccgagcacacccccgagtggttagaagtcattaaaaccaatacaaggtctgacgatttacaaatcggtttggctcgccagcgcgatgctggcaacatcatcaatagctacccaactcaagtagcaactgccatcgagtggtatgcaacggggcaaatgcttgatgttttagatgtcgttaaagatattgtggcaatcggtaagcgccgagttgttgggtacggcgaggtcaagttatgggaagctgagcttggtgaaattgacggcttagttggctttgctgatgaacctttacgcccagttccaaccgttcgctggcacttaagtcatgattttgttcctgtagaagctgcttggaaggccccttattgggatgttcgtaatcgaaccaagtgctttgtgccggagattgacttatgaatggccctgaattttttatgcagcatgctggttaccgtttgctccctgaagatgagaaaactgatgacgtagtcaaagatactgatcgtttatttagtattgcattgccgttaaacacgggtaaatttctaagactatcatcgtgttggtttgtggttactgcggattgggtagcaacaagctttaagaccctacccgaggcaggatttcgccacgatatagaccgtaaaacagcaatcgatttggcacttaaggcaggcaagccctgtgtattgcttggactaggtaaacgaaccacgacggcaaatgatatttacgtgacctacgacccaagagccgcacgtttgtgcgagcaaggtaaaaccaaaacttatgacgctacaaaggagaaagcatggacatcatgattgataagccacctcgtgtgcgcgggtacgcacttcaccgaattgtggaacaacttcaaaacggcaagcctgccttgtgggcagatgaagggtcaactgttcgtattaggcctcatgacgcgcaaccacctctgtacgagatcggaaagttattggcattcacgacaactgcatgtgttgcatttagtaagggccacaagcatgtctatctcccaacatctgattggcgagggcgaagggtatggctagataaacaagcagccaaacatggttttgaggttgttggcgtccacatctctgggggcatgcaaaaaattgaaacccataatggccgaaagttcaccattgatgccactgagtttaccgggcttctgcgcgtaagcgattcgactttattcggtcagtgtttgataaatggagtcggcaaagttggcaaggcatttggtttgaatttgatgatcgttcaataaaacaaaaaaaggcacatgaaatgactaaccagaaaatgaaaatagttgcacaaatcagcttgcattcagtacaaccgctaacgtttactcatcatagtgttgacgggttaccgcttttggcaagaggcatcgatcaagaggggcgccaccttcgcacggtctacatacctgcagcgcaatttagaggtcgagttcggcacgaagcggcgttgagtcagatgcgctctgagagcggcaaggtgaagcttgaagaagcctatatgctagcccttggccaagacctacgcccagcggaagatgacgctccagaacaagtcaggctcaaagagcagattgcggtccgtaaagaaaaccccttattggacttatttggcacatggaagttggctagtcgtttgtatgtctctcacttcatgccagaggtcaatgttctacccgcaaaaatcagccatataagaagggacctagacacgaacgaagatatgatggatgcgctgggttctgatgagcaagaccgtatgtacgatcgtcagagtaaacaaggtatggcctcacaagttggtcaattaattaagcttgccacgcgtgaactaatggctgcaaagaaagcaaaagatgtaaccaaggttgacgaaatagaagccaaaatcttagagttaaaagaacttaaaaaaacgcaaaagggtgatgacgattccgaaaataccaaacatttagttgaacttgagttcatacccgcaggtatcactctgaatggaaaattaactgtaaattcagccatacccaacgacttacgtgtgttagtggatgctttagtggggtttggcgaaaaaccttaccttggcgctcaacgtgctcgtggttgtggggaagttgcacttgaagcaacatttaagaatgcagatggtgatgtactcgctacggtagcctttgctgagggcgagggttctaatgttcaatggactgaggcagggactacttttttaaatgctgaaacaactaccacatgatttaccgcagccctgaacagacacaatatgcgaaattaattgagggtgctattaaaccgggggcaccacttctggcaggagcagcagcaggtctgggtaaaacgcacggctttagcattcctctaattacttcaggaaaacgcattgcgatttgtttaagtactcggcagttgattgatcagtatttaaaaagtgatgcgttgcaggtggcttgcggtggaagatccgtttcggttgtggcgttgcaatcaaggcgagactttacacgtgactcagattatcgctcacacaagaagcaggcgttagaagccgagttattaattaccacccatgcggcagcctttattgacagtttcaatccagagtatgcacagcttcgtagtcgtgatgttgtgctgtttgatgaggctgatttattagctgacgctgctgacctgagaagcacatttagtatttcggctgaagcacttaaagattgtggcgctatgttaggtaatgcgttgagtgcggctaaattagttaaggcaaatgccgttgacgcagaagaccgtggtgctgccagttctatcctatatgccttagagaacccagcttggtacaaagtagttggatatgaggaggatggcgctttaactttaaaacatcgtttgccgggcagaatgcttaagcggcttgtggcagatgtaccacgctgtatttttacaagcggaacacttcaggtatctgggcggtttgattactttgttaaagcacttgggctcacagctatagcaccagagagtaggcacattgatccagtcatgcacggcagcctagatgttcaagttgcatctgatgaaatgtctattaatgaaatggctgaaaagattaaagctgcgaagcggccaacattggttcttacaacaagccacaaaacaacatttgagttgggtcaattactaccagaggccactattagagagtccggagaacctttgactgatgcggttgcgcggtgccccgatgacggcattctaatcgcagcaggtgcttggtctgggctagatgcgccaaggttacgatggaaaacattagtgattccaaaaacaccttatggtgtaagaaacgttttagatggtcatgatgtcgggcgttatatcgatagtaaggttgttgctattcgtcgaactaatcagggactgcatcgtgggcttagaacgcccgacgctcaatgcactttactgctactagacccgcgcagtagtaggtcagaactaagagaggcaataccgtcaaggtttaaagttgattgggttggcttcgaagaggggggccgtgaacttgttgagcacatgaaagctgaacgaaatgaaagccttcgtaaagctgcgctaaagcattatggtgagcaatgcatgtgggtgggctgtacggtgacattacctcacctgctcgatgtgcatcactgcaaccctatttcacttgggcaacgacgaacaacgatgtcagatgttaaagttttatgtaaaaatcatcatgctgaggagcatcataggatgcgaatgagcagtttagatgctctagacaatgatttaaatcaaatagaatcaaagggttgaagaatatcaggtcaagctgccatgtaaatgagcagttactagaact

SEQ ID NO: 256 - DNA, 11647 bp, Artificial Sequence; identical to SEQ ID NO: 255
  Synthetic Oligonucleotide
  misc_feature (1)..(7312): n is a, c, g, or t

SEQ ID NO: 257 - DNA, 11647 bp, Artificial Sequence
  Synthetic Oligonucleotide
  misc_feature (1)..(7439): n is a, c, g, or t
nnnnnnnnnnnnnnnnnnnnnnnnnnnnnnnnnnnnnnnnnnnnnnnnnnnnnnnnnnnnnnnnnnnnnnnnnnnnnnnnnnnnnnnnnnnnnnnnnnnnnnnnnnnnnnnnnnnnnnnnnnnnnnnnnnnnnnnnnnnnnnnnnnnnnnnnnnnnnnnnnnnnnnnnnnnnnnnnnnnnnnnnnnnnnnnnnnnnnnnnnnnnnnnnnnnnnnnnnnnnnnnnnnnnnnnnnnnnnnnnnnnnnnnnnnnnnnnnnnnnnnnnnnnnnnnnnnnnnnnnnnnnnnnnnnnnnnnnnnnnnnnnnnnnnnnnnnnnnnnnnnnnnnnnnnnnnnnnnnnnnnnnnnnnnnnnnnnnnnnnnnnnnnnnnnnnnnnnnnnnnnnnnnnnnnnnnnnnnnnnnnnnnnnnnnnnnnnnnnnnnnnnnnnnnnnnnnnnnnnnnnnnnnnnnnnnnnnnnnnnnnnnnnnnnnnnnnnnnnnnnnnnnnnnnnnnnnnnnnnnnnnnnnnnnnnnnnnnnnnnnnnnnnnnnnnnnnnnnnnnnnnnnnnnnnnnnnnnnnnnnnnnnnnnnnnnnnnnnnnnnnnnnnnnnnnnnnnnnnnnnnnnnnnnnnnnnnnnnnnnnnnnnnnnnnnnnnnnnnnnnnnnnnnnnnnnnnnnnnnnnnnnnnnnnnnnnnnnnnnnnnnnnnnnnnnnnnnnnnnnnnnnnnnnnnnnnnnnnnnnnnnnnnnnnnnnnnnnnnnnnnnnnnnnnnnnnnnnnnnnnnnnnnnnnnnnnnnnnnnnnnnnnnnnnnnnnnnnnnnnnnnnnnnnnnnnnnnnnnnnnnnnnnnnnnnnnnnnnnnnnnnnnnnnnnnnnnnnnnnnnnnnnnnnnnnnnnnnnnnnnnnnnnnnnnnnnnnnnnnnnnnnnnnnnnnnnnnnnnnnnnnnnnnnnnnnnnnnnnnnnnnnnnnnnnnnnnnnnnnnnnnnnnnnnnnnnnnnnnnnnnnnnnnnnnnnnnnnnnnnnnnnnnnnnnnnnnnnnnnnnnnnnnnnnnnnnnnnnnnnnnnnnnnnnnnnnnnnnnnnnnnnnnnnnnnnnnnnnnnnnnnnnnnnnnnnnnnnnnnnnnnnnnnnnnnnnnnnnnnnnnnnnnnnnnnnnnnnnnnnnnnnnnnnnnnnnnnnnnnnnnnnnnnnnnnnnnnnnnnnnnnnnnnnnnnnnnnnnnnnnnnnnnnnnnnnnnnnnnnnnnnnnnnnnnnnnnnnnnnnnnnnnnnnnnnnnnnnnnnnnnnnnnnnnnnnnnnnnnnnnnnnnnnnnnnnnnnnnnnnnnnnnnnnnnnnnnnnnnnnnnnnnnnnnnnnnnnnnnnnnnnnnnnnnnnnnnnnnnnnnnnnnnnnnnnnnnnnnnnnnnnnnnnnnnnnnnnnnnnnnnnnnnnnnnnnnnnnnnnnnnnnnnnnnnnnnnnnnnnnnnnnnnnnnnnnnnnnnnnnnnnnnnnnnnnnnnnnnnnnnnnnnnnnnnnnnnnnnnnnnnnnnnnnnnnnnnnnnnnnnnnnnnnnnnnnnnnnnnnnnnnnnnnnnnnnnnnnnnnnnnnnnnnnnnnnnnnnnnnnnnnnnnnnnnnnnnnnnnnnnnnnnnnnnnnnnnnnnnnnnnnnnnnnnnnnnnnnnnnnnnnnnnnnnnnnnnnnnnnnnnnnnnnnnnnnnnnnnnnnnnnnnnnnnnnnnnnnnnnnnnnnnnnnnnnnnnnnnnnnnnnnnnnnnnnnnnnnnnnnnnnnnnnnnnnnnnnnnnnnnnnnnnnnnnnnnnnnnnnnnnnnnnnnnnnnnnnnnnnnnnnnnnnnnnnnnnnnnnnnnnnnnnnnnnnnnnnnnnnnnnnnnnnnnnnnnnnnnnnnnnnnnnnnnnnnnnnnnnnnnnnnnnnnnnnnnnnnnnnnnnnnnnnnnnnnnnnnnnnnnnnnnnnnnnnnnnnnnnnnnnnnnnnnnnnnnnnnnnnnnnnnnnnnnnnnnnnnnnnnnnnnnnnnnnnnnnnnnnnnnnnnnnnnnnnnnnnnnnnnnnnnnnnnnnnnnnnnnnnnnnnnnnnnnnnnnnnnnnnnnnnnnnnnnnnnnnnnnnnnnnnnnnnnnnnnnnnnnnnnnnnnnnnnnnnnnnnnnnnnnnnnnnnnnnnnnnnnnnnnnnnnnnnnnnnnnnnnnnnnnnnnnnnnnnnnnnnnnnnnnnnnnnnnnnnnnnnnnnnnnnnnnnnnnnnnnnnnnnnnnnnnnnnnnnnnnnnnnnnnnnnnnnnnnnnnnnnnnnnnnnnnnnnnnnnnnnnnnnnnnnnnnnnnnnnnnnnnnnnnnnnnnnnnnnnnnnnnnnnnnnnnnnnnnnnnnnnnnnnnnnnnnnnnnnnnnnnnnnnnnnnnnnnnnnnnnnnnnnnnnnnnnnnnnnnnnnnnnnnnnnnnnnnnnnnnnnnnnnnnnnnnnnnnnnnnnnnnnnnnnnnnnnnnnnnnnnnnnnnnnnnnnnnnnnnnnnnnnnnnnnnnnnnnnnnnnnnnnnnnnnnnnnnnnnnnnnnnnnnnnnnnnnnnnnnnnnnnnnnnnnnnnnnnnnnnnnnnnnnnnnnnnnnnnnnnnnnnnnnnnnnnnnnnnnnnnnnnnnnnnnnnnnnnnnnnnnnnnnnnnnnnnnnnnnnnnnnnnnnnnnnnnnnnnnnnnnnnnnnnnnnnnnnnnnnnnnnnnnnnnnnnnnnnnnnnnnnnnnnnnnnnnnnnnnnnnnnnnnnnnnnnnnnnnnnnnnnnnnnnnnnnnnnnnnnnnnnnnnnnnnnnnnnnnnnnnnnnnnnnnnnnnnnnnnnnnnnnnnnnnnnnnnnnnnnnnnnnnnnnnnnnnnnnnnnnnnnnnnnnnnnnnnnnnnnnnnnnnnnnnnnnnnnnnnnnnnnnnnnnnnnnnnnnnnnnnnnnnnnnnnnnnnnnnnnnnnnnnnnnnnnnnnnnnnnnnnnnnnnnnnnnnnnnnnnnnnnnnnnnnnnnnnnnnnnnnnnnnnnnnnnnnnnnnnnnnnnnnnnnnnnnnnnnnnnnnnnnnnnnnnnnnnnnnnnnnnnnnnnnnnnnnnnnnnnnnnnnnnnnnnnnnnnnnnnnnnnnnnnnnnnnnnnnnnnnnnnnnnnnnnnnnnnnnnnnnnnnnnnnnnnnnnnnnnnnnnnnnnnnnnnnnnnnnnnnnnnnnnnnnnnnnnnnnnnnnnnnnnnnnnnnnnnnnnnnnnnnnnnnnnnnnnnnnnnnnnnnnnnnnnnnnnnnnnnnnnnnnnnnnnnnnnnnnnnnnnnnnnnnnnnnnnnnnnnnnnnnnnnnnnnnnnnnnnnnnnnnnnnnnnnnnnnnnnnnnnnnnnnnnnnnnnnnnnnnnnnnnnnnnnnnnnnnnnnnnnnnnnnnnnnnnnnnnnnnnnnnnnnnnnnnnnnnnnnnnnnnnnnnnnnnnnnnnnnnnnnnnnnnnnnnnnnnnnnnnnnnnnnnnnnnnnnnnnnnnnnnnnnnnnnnnnnnnnnnnnnnnnnnnnnnnnnnnnnnnnnnnnnnnnnnnnnnnnnnnnnnnnnnnnnnnnnnnnnnnnnnnnnnnnnnnnnnnnnnnnnnnnnnnnnnnnnnnnnnnnnnnnnnnnnnnnnnnnnnnnnnnnnnnnnnnnnnnnnnnnnnnnnnnnnnnnnnnnnnnnnnnnnnnnnnnnnnnnnnnnnnnnnnnnnnnnnnnnnnnnnnnnnnnnnnnnnnnnnnnnnnnnnnnnnnnnnnnnnnnnnnnnnnnnnnnnnnnnnnnnnnnnnnnnnnnnnnnnnnnnnnnnnnnnnnnnnnnnnnnnnnnnnnnnnnnnnnnnnnnnnnnnnnnnnnnnnnnnnnnnnnnnnnnnnnnnnnnnnnnnnnnnnnnnnnnnnnnnnnnnnnnnnnnnnnnnnnnnnnnnnnnnnnnnnnnnnnnnnnnnnnnnnnnnnnnnnnnnnnnnnnnnnnnnnnnnnnnnnnnnnnnnnnnnnnnnnnnnnnnnnnnnnnnnnnnnnnnnnnnnnnnnnnnnnnnnnnnnnnnnnnnnnnnnnnnnnnnnnnnnnnnnnnnnnnnnnnnnnnnnnnnnnnnnnnnnnnnnnnnnnnnnnnnnnnnnnnnnnnnnnnnnnnnnnnnnnnnnnnnnnnnnnnnnnnnnnnnnnnnnnnnnnnnnnnnnnnnnnnnnnnnnnnnnnnnnnnnnnnnnnnnnnnnnnnnnnnnnnnnnnnnnnnnnnnnnnnnnnnnnnnnnnnnnnnnnnnnnnnnnnnnnnnnnnnnnnnnnnnnnnnnnnnnnnnnnnnnnnnnnnnnnnnnnnnnnnnnnnnnnnnnnnnnnnnnnnnnnnnnnnnnnnnnnnnnnnnnnnnnnnnnnnnnnnnnnnnnnnnnnnnnnnnnnnnnnnnnnnnnnnnnnnnnnnnnnnnnnnnnnnnnnnnnnnnnnnnnnnnnnnnnnnnnnnnnnnnnnnnnnnnnnnnnnnnnnnnnnnnnnnnnnnnnnnnnnnnnnnnnnnnnnnnnnnnnnnnnnnnnnnnnnnnnnnnnnnnnnnnnnnnnnnnnnnnnnnnnnnnnnnnnnnnnnnnnnnnnnnnnnnnnnnnnnnnnnnnnnnnnnnnnnnnnnnnnnnnnnnnnnnnnnnnnnnnnnnnnnnnnnnnnnnnnnnnnnnnnnnnnnnnnnnnnnnnnnnnnnnnnnnnnnnnnnnnnnnnnnnnnnnnnnnnnnnnnnnnnnnnnnnnnnnnnnnnnnnnnnnnnnnnnnnnnnnnnnnnnnnnnnnnnnnnnnnnnnnnnnnnnnnnnnnnnnnnnnnnnnnnnnnnnnnnnnnnnnnnnnnnnnnnnnnnnnnnnnnnnnnnnnnnnnnnnnnnnnnnnnnnnnnnnnnnnnnnnnnnnnnnnnnnnnnnnnnnnnnnnnnnnnnnnnnnnnnnnnnnnnnnnnnnnnnnnnnnnnnnnnnnnnnnnnnnnnnnnnnnnnnnnnnnnnnnnnnnnnnnnnnnnnnnnnnnnnnnnnnnnnnnnnnnnnnnnnnnnnnnnnnnnnnnnnnnnnnnnnnnnnnnnnnnnnnnnnnnnnnnnnnnnnnnnnnnnnnnnnnnnnnnnnnnnnnnnnnnnnnnnnnnnnnnnnnnnnnnnnnnnnnnnnnnnnnnnnnnnnnnnnnnnnnnnnnnnnnnnnnnnnnnnnnnnnnnnnnnnnnnnnnnnnnnnnnnnnnnnnnnnnnnnnnnnnnnnnnnnnnnnnnnnnnnnnnnnnnnnnnnnnnnnnnnnnnnnnnnnnnnnnnnnnnnnnnnnnnnnnnnnnnnnnnnnnnnnnnnnnnnnnnnnnnnnnnnnnnnnnnnnnnnnnnnnnnnnnnnnnnnnnnnnnnnnnnnnnnnnnnnnnnnnnnnnnnnnnnnnnnnnnnnnnnnnnnnnnnnnnnnnnnnnnnnnnnnnnnnnnnnnnnnnnnnnnnnnnnnnnnnnnnnnnnnnnnnnnnnnnnnnnnnnnnnnnnnnnnnnnnnnnnnnnnnnnnnnnnnnnnnnnnnnnnnnnnnnnnnnnnnnnnnnnnnnnnnnnnnnnnnnnnnnnnnnnnnnnnnnnnnnnnnnnnnnnnnnnnnnnnnnnnnnnnnnnnnnnnnnnnnnnnnnnnnnnnnnnnnnnnnnnnnnnnnnnnnnnnnnnnnnnnnnnnnnnnnnnnnnnnnnnnnnnnnnnnnnnnnnnnnnnnnnnnnnnnnnnnnnnnnnnnnnnnnnnnnnnnnnnnnnnnnnnnnnnnnnnnnnnnnnnnnnnnnnnnnnnnnnnnnnnnnnnnnnnnnnnnnnnnnnnnnnnnnnnnnnnnnnnnnnnnnnnnnnnnnnnnnnnnnnnnnnnnnnnnnnnnnnnnnnnnnnnnnnnnnnnnnnnnnnnnnnnnnnnnnnnnnnnnnnnnnnnnnnnnnnnnnnnnnnnnnnnnnnnnnnnnnnnnnnnnnnnnnnnnnnnnnnnnnnnnnnnnnnnnnnnnnnnnnnnnnnnnnnnnnnnnnnnnnnnnnnnnnnnnnnnnnnnnnnnnnnnnnnnnnnnnnnnnnnnnnnnnnnnnnnnnnnnnnnnnnnnnnnnnnnnnnnnnnnnnnnnnnnnnnnnnnnnnnnnnnnnnnnnnnnnnnnnnnnnnnnnnnnnnnnnnnnnnnnnnnnnnnnnnnnnnnnnnnnnnnnnnnnnnnnnnnnnnnnnnnnnnnnnnnnnnnnnnnnnnnnnnnnnnnnnnnnnnnnnnnnnnnnnnnnnnnnnnnnnnnnnnnnnnnnnnnnnnnnnnnnnnnnnnnnnnnnnnnnnnnnnnnnnnnnnnnnnnnnnnnnnnnnnnnnnnnnnnnnnnnnnnnnnnnnnnnnnnnnnnnnnnnnnnnnnnnnnnnnnnnnnnnnnnnnnnnnnnnnnnnnnnnnnnnnnnnnnnnnnnnnnnnnnnnnnnnnnnnnnnnnnnnnnnnnnnnnnnnnnnnnnnnnnnnnnnnnnnnnnnnnnnnnnnnnnnnnnnnnnnnnnnnnnnnnnnnnnnnnnnnnnnnnnnnnnnnnnnnnnnnnnnnnnnnnnnnnnnnnnnnnnnnnnnnnnnnnnnnnnnnnnnnnnnnnnnnnnnnnnnnnnnnnnnnnnnnnnnnnnnnnnnnnnnnnnnnnnnnnnnnnnnnnnnnnnnnnnnnnnnnnnnnnnnnnnnnnnnnnnnnnnnnnnnnnnnnnnnnnnnnnnnnnnnnnnnnnnnnnnnnnnnnnnnnnnnnnnnnnnnnnnnnnnnnnnnnnnnnnnnnnnnnnnnnnnnnnnnnnnnnnnnnnnnnnnnnnnnnnnnnnnnnnnnnnnnnnnnnnnnnnnnnnnnnnnnnnnnnnnnnnnnnnnnnnnnnnnnnnnnnnnnnnnnnnnnnnnnnnnnnnnnnnnnnnnnnnnnnnnnnnnnnnnnnnnnnnnnnnnnnnnnnnnnnnnnnnnnnnnnnnnnnnnnnnnnnnnnnnnnnnnnnnnnnnnnnnnnnnnnnnnnnnnnnnnnnnnnnnnnnnnnnnnnnnnnnnnnnnnnnnnnnnnnnnnnnnnnnnnnnnnnnnnnnnnnnnnnnnnnnnnnnnnnnnnnnnnnnnnnnnnnnnnnnnnnnnnnnnnnnnnnnnnnnnnnnnnnnnnnnnnnnnnnnnnnnnnnnnnnnnnnnnnnnnnnnnnnnnnnnnnnnnnnnnnnnnnnnnnnnnnnnnnnnnnnnnnnnnnnnnnnnnnnnnnnnnnnnnnnnnnnnnnnnnnnnnnnnnnnnnnnnnnnnnnnnnnnnnnnnnnnnnnnnnnnnnnnnnnnnnnnnnnnnnnnnnnnnnnnnnnnnnnnnnnnnnnnnnnnnnnnnnnnnnnnnnnnnnnnnnnnnnnnnnnnnnnnnnnnnnnnnnnnnnnnnnnnnnnnnnnnnnnnnnnnnnnnnnnnnnnnnnnnnnnnnnnnnnnnnnnnnnnnnnnnnnnnnnnnnnnnnnnnnnnnnnnnnnnnnnnnnnnnnnnnnnnnnnnnnnnnnnnnnnnnnnnnnnnnnnnnnnnnnnnnnnnnnnnnnnnnnnnnggttgtgtttcgttcctttgctttgcattaagtgtttggagagttgaatggagatgtttacgttacgtgcttacctaaacacgccgattattaaacgagggttcatgactcttgatgcattgcttatgtcaattttaggtaaaggggatgtcagtgatcttttgcgctgcgacgaagggctttattttgcgagcgcagggtttccagttgattcggtgtctgataaatttagagcatcttttgtagcaagtcttcgacccgagcacacccccgagtggttagaagtcattaaaaccaatacaaggtctgacgatttacaaatcggtttggctcgccagcgcgatgctggcaacatcatcaatagctacccaactcaagtagcaactgccatcgagtggtatgcaacggggcaaatgcttgatgttttagatgtcgttaaagatattgtggcaatcggtaagcgccgagttgttgggtacggcgaggtcaagttatgggaagctgagcttggtgaaattgacggtttagttggctttgctgatgaacctttacgcccagttccaaccgatcgctggcacttaagtcatgattttgttcctgtagaagccgcttggaaggccccttattgggatgttcgtaatcgaaccaagtgctttgtgccggagattgacttatgaatggccctgaattttttatgcagtatgctggttaccgtttgcttcctgcgaatgagaaaactgatgacgtagtcaaagatactgatcgtttatttagtattgcattgccgttaaacacgggtaaatttctaagactatcatcgtgttggtttgtggttactgcggattgggtagcaacaagctttaagaccctacccgaggcaggatttcgccacgatatagaccgtaaaacagcaatcgatttggcacttaaggcaggcaagccctgtgtattgcttggactaggtaaacgaaccacgacggcaaatgatatttacgtgacctacgacccaagagccgcacgtttgtgcgagcaaggtaaaaccaaaacttatgacgctacaaaggagaaagcatggacatcatgattgataagccacctcgtgtgcgcgggtacgcacttcaccgaattgtggaacaacttcaaaacggcaagcctgccttgtgggcagatgaagggtcaactgttcgtattaggcctcatgacgcgcaaccacctctgtacgagatcggaaagttattggcattcacgacaactgcatgtgttgcatttagtaagggccacaagcatgtctatctcccaacatctgattggcgagggcgaagggtatggctagataaacaagcagccaaacatggttttgaggttgttggcgtccacatctctgggggcatgcaaaaaattgaaacccataatggccgaaagttcaccattgatgccactgagtttaccgggcttctgcgcgtaagcgattcgactttattcggtcagtgtttgataaatggagtcggcaaagttggcaaggcatttggtttgaatttgatgatcgttcaataaaacaaaaaaaggcacatgaaatgactaaccagaaaatgaaaatagttgcacaaatcagcttgcattcagtacaaccgctaacgtttactcatcatagtgttgacgggttaccgcttttggcaagaggcatcgatcaagaggggcgccaccttcgcacggtctacatacctgcagcgcaatttagaggtcgagttcggcacgaagcggcgttgagtcagatgcgctctgagagcggcaaggtgaagcttgaagaagcctatatgctagcccttggccaagacctacgcccagcggaagatgacgctccagaacaagtcaggctcaaagagcagattgcggtccgtaaagaaaaccccttattggacttatttggcacatggaagttggctagtcgtttgtatgtctctcacttcatgccagaggtcaatgttctacccgcaaaaatcagccatataagaagggacctagacacgaacgaagatatgatggatgcgctgggttctgatgagcaagaccgtatgtacgatcgtcagagtaaacaaggtatggcctcacaagttggtcaattaattaagcttgccacgcgtgaactaatggctgcaaagaaagcaaaagatgtaaccaaggttgacgaaatagaagccaaaatcttagagttaaaagaacttaaaaaaacgcaaaagggtgatgacgattccgaaaataccaaacatttagttgaacttgagttcatacccgcaggtatcactctgaatggaaaattaactgtaaattcagccatacccaacgacttacgtgtgttagtggatgctttagtggggtttggcgaaaaaccttaccttggcgctcaacgtgctcgtggttgtggggaagttgcacttgaagcaacatttaagaatgcagatggtgatgtactcgctacggtagcctttgctgagggcgagggttctaatgttcaatggactgaggcagggactacttttttaaatgctgaaacaactaccacatgatttaccgcagccctgaacagacacaatatgcgaaattaattgagggtgctattaaaccgggggcaccacttctggcaggagcagcagcaggtctgggtaaaacgcacggctttagcattcctctaattacttcaggaaaacgtattgcgatttgtttaagtactcggcagttgattgatcagtatttaaaaagtgatgcgttgcaggtggcttgcggtggaagatccgtttcggttgtggcgttgcaatcaaggcgagactttacacgtgactcagattatcgctcacacaagaagcaggcgttagaagccgagttattaattaccacccatgcggcagcctttattgacagtttcaatccagagtatgcacagcttcgtagtcgtgatgttgtgctgtttgatgaggctgatttattagccgacgctgctgacttgagaagcacatttagtatttcggctgaagcacttaaagattgtggcgctatgttaagtaatgcgttgagtgcggctaaattagttaaggcaaatgccgttgacgcagaagaccgcggtgctgccagttctatcctacatgccttagagaacccagcttggtacaaagtagttggatatgaggaggatggcgctttaactttaaaacatcgtttgccgggcagaatgcttaagcggcttgtggcagatgtaccacgctgtatttttacaagcggaacacttcaggtatctgggcggtttgattactttgttaaagcacttgggctcacagctatagcaccagagagtaggcacattgatccagtcatgcacggcagcctagatgttcaagttgcatctgatgaaatgtctattaatgaaatggctgaaaagattaaagctgcgaagcggccaacattggttcttacaacaagccacaaaacaacatttgagttgggtcaattactaccagaggccactattagagagtccggagaacctttgactgatgcggttgcgcggtgccccgatgacggtattctaatcgcagcaggtgcttggtctgggctagatgcgccaaggttacgatggaaaacattagtgattccaaaaacaccttatggtgtaagaaacgttttagatggtcatgatgtcgggcgttatatcgatagtaaggttgttgctattcgtcgaactaatcagggactgcatcgtgggcttcggacgcccgacgctcaatgcactttactgctactagacccgcgcagtagtaggtcagaactaagagaggcaataccgtcaaggtttaaagttgattgggttggcttcgaagaggggggccgtgaacttgttgagcacatgaaagctgaacgaaatgaaagccttcgtaaagctgcgctaaagcattatggtgagcaatgcatgtgggtgggctgtacggtgacattacctcacctgctcgatgtgcatcactgcaaccctatttcacttgggcaacgacgaacaacgatgtcagatgttaaagttttatgtaaaaatcatcatgctgaggagcatcataggatgcgaatgagcagtttagatgctctagacaatgatttaaatcaaatagaatcaaagggttgaagaatatcaggtcaagctgccatgtaaatgagcagttactagaact

SEQ ID NO: 258 - DNA, 11646 bp, Artificial Sequence
  Synthetic Oligonucleotide
  misc_feature (1)..(7316): n is a, c, g, or t
nnnnnnnnnnnnnnnnnnnnnnnnnnnnnnnnnnnnnnnnnnnnnnnnnnnnnnnnnnnnnnnnnnnnnnnnnnnnnnnnnnnnnnnnnnnnnnnnnnnnnnnnnnnnnnnnnnnnnnnnnnnnnnnnnnnnnnnnnnnnnnnnnnnnnnnnnnnnnnnnnnnnnnnnnnnnnnnnnnnnnnnnnnnnnnnnnnnnnnnnnnnnnnnnnnnnnnnnnnnnnnnnnnnnnnnnnnnnnnnnnnnnnnnnnnnnnnnnnnnnnnnnnnnnnnnnnnnnnnnnnnnnnnnnnnnnnnnnnnnnnnnnnnnnnnnnnnnnnnnnnnnnnnnnnnnnnnnnnnnnnnnnnnnnnnnnnnnnnnnnnnnnnnnnnnnnnnnnnnnnnnnnnnnnnnnnnnnnnnnnnnnnnnnnnnnnnnnnnnnnnnnnnnnnnnnnnnnnnnnnnnnnnnnnnnnnnnnnnnnnnnnnnnnnnnnnnnnnnnnnnnnnnnnnnnnnnnnnnnnnnnnnnnnnnnnnnnnnnnnnnnnnnnnnnnnnnnnnnnnnnnnnnnnnnnnnnnnnnnnnnnnnnnnnnnnnnnnnnnnnnnnnnnnnnnnnnnnnnnnnnnnnnnnnnnnnnnnnnnnnnnnnnnnnnnnnnnnnnnnnnnnnnnnnnnnnnnnnnnnnnnnnnnnnnnnnnnnnnnnnnnnnnnnnnnnnnnnnnnnnnnnnnnnnnnnnnnnnnnnnnnnnnnnnnnnnnnnnnnnnnnnnnnnnnnnnnnnnnnnnnnnnnnnnnnnnnnnnnnnnnnnnnnnnnnnnnnnnnnnnnnnnnnnnnnnnnnnnnnnnnnnnnnnnnnnnnnnnnnnnnnnnnnnnnnnnnnnnnnnnnnnnnnnnnnnnnnnnnnnnnnnnnnnnnnnnnnnnnnnnnnnnnnnnnnnnnnnnnnnnnnnnnnnnnnnnnnnnnnnnnnnnnnnnnnnnnnnnnnnnnnnnnnnnnnnnnnnnnnnnnnnnnnnnnnnnnnnnnnnnnnnnnnnnnnnnnnnnnnnnnnnnnnnnnnnnnnnnnnnnnnnnnnnnnnnnnnnnnnnnnnnnnnnnnnnnnnnnnnnnnnnnnnnnnnnnnnnnnnnnnnnnnnnnnnnnnnnnnnnnnnnnnnnnnnnnnnnnnnnnnnnnnnnnnnnnnnnnnnnnnnnnnnnnnnnnnnnnnnnnnnnnnnnnnnnnnnnnnnnnnnnnnnnnnnnnnnnnnnnnnnnnnnnnnnnnnnnnnnnnnnnnnnnnnnnnnnnnnnnnnnnnnnnnnnnnnnnnnnnnnnnnnnnnnnnnnnnnnnnnnnnnnnnnnnnnnnnnnnnnnnnnnnnnnnnnnnnnnnnnnnnnnnnnnnnnnnnnnnnnnnnnnnnnnnnnnnnnnnnnnnnnnnnnnnnnnnnnnnnnnnnnnnnnnnnnnnnnnnnnnnnnnnnnnnnnnnnnnnnnnnnnnnnnnnnnnnnnnnnnnnnnnnnnnnnnnnnnnnnnnnnnnnnnnnnnnnnnnnnnnnnnnnnnnnnnnnnnnnnnnnnnnnnnnnnnnnnnnnnnnnnnnnnnnnnnnnnnnnnnnnnnnnnnnnnnnnnnnnnnnnnnnnnnnnnnnnnnnnnnnnnnnnnnnnnnnnnnnnnnnnnnnnnnnnnnnnnnnnnnnnnnnnnnnnnnnnnnnnnnnnnnnnnnnnnnnnnnnnnnnnnnnnnnnnnnnnnnnnnnnnnnnnnnnnnnnnnnnnnnnnnnnnnnnnnnnnnnnnnnnnnnnnnnnnnnnnnnnnnnnnnnnnnnnnnnnnnnnnnnnnnnnnnnnnnnnnnnnnnnnnnnnnnnnnnnnnnnnnnnnnnnnnnnnnnnnnnnnnnnnnnnnnnnnnnnnnnnnnnnnnnnnnnnnnnnnnnnnnnnnnnnnnnnnnnnnnnnnnnnnnnnnnnnnnnnnnnnnnnnnnnnnnnnnnnnnnnnnnnnnnnnnnnnnnnnnnnnnnnnnnnnnnnnnnnnnnnnnnnnnnnnnnnnnnnnnnnnnnnnnnnnnnnnnnnnnnnnnnnnnnnnnnnnnnnnnnnnnnnnnnnnnnnnnnnnnnnnnnnnnnnnnnnnnnnnnnnnnnnnnnnnnnnnnnnnnnnnnnnnnnnnnnnnnnnnnnnnnnnnnnnnnnnnnnnnnnnnnnnnnnnnnnnnnnnnnnnnnnnnnnnnnnnnnnnnnnnnnnnnnnnnnnnnnnnnnnnnnnnnnnnnnnnnnnnnnnnnnnnnnnnnnnnnnnnnnnnnnnnnnnnnnnnnnnnnnnnnnnnnnnnnnnnnnnnnnnnnnnnnnnnnnnnnnnnnnnnnnnnnnnnnnnnnnnnnnnnnnnnnnnnnnnnnnnnnnnnnnnnnnnnnnnnnnnnnnnnnnnnnnnnnnnnnnnnnnnnnnnnnnnnnnnnnnnnnnnnnnnnnnnnnnnnnnnnnnnnnnnnnnnnnnnnnnnnnnnnnnnnnnnnnnnnnnnnnnnnnnnnnnnnnnnnnnnnnnnnnnnnnnnnnnnnnnnnnnnnnnnnnnnnnnnnnnnnnnnnnnnnnnnnnnnnnnnnnnnnnnnnnnnnnnnnnnnnnnnnnnnnnnnnnnnnnnnnnnnnnnnnnnnnnnnnnnnnnnnnnnnnnnnnnnnnnnnnnnnnnnnnnnnnnnnnnnnnnnnnnnnnnnnnnnnnnnnnnnnnnnnnnnnnnnnnnnnnnnnnnnnnnnnnnnnnnnnnnnnnnnnnnnnnnnnnnnnnnnnnnnnnnnnnnnnnnnnnnnnnnnnnnnnnnnnnnnnnnnnnnnnnnnnnnnnnnnnnnnnnnnnnnnnnnnnnnnnnnnnnnnnnnnnnnnnnnnnnnnnnnnnnnnnnnnnnnnnnnnnnnnnnnnnnnnnnnnnnnnnnnnnnnnnnnnnnnnnnnnnnnnnnnnnnnnnnnnnnnnnnnnnnnnnnnnnnnnnnnnnnnnnnnnnnnnnnnnnnnnnnnnnnnnnnnnnnnnnnnnnnnnnnnnnnnnnnnnnnnnnnnnnnnnnnnnnnnnnnnnnnnnnnnnnnnnnnnnnnnnnnnnnnnnnnnnnnnnnnnnnnnnnnnnnnnnnnnnnnnnnnnnnnnnnnnnnnnnnnnnnnnnnnnnnnnnnnnnnnnnnnnnnnnnnnnnnnnnnnnnnnnnnnnnnnnnnnnnnnnnnnnnnnnnnnnnnnnnnnnnnnnnnnnnnnnnnnnnnnnnnnnnnnnnnnnnnnnnnnnnnnnnnnnnnnnnnnnnnnnnnnnnnnnnnnnnnnnnnnnnnnnnnnnnnnnnnnnnnnnnnnnnnnnnnnnnnnnnnnnnnnnnnnnnnnnnnnnnnnnnnnnnnnnnnnnnnnnnnnnnnnnnnnnnnnnnnnnnnnnnnnnnnnnnnnnnnnnnnnnnnnnnnnnnnnnnnnnnnnnnnnnnnnnnnnnnnnnnnnnnnnnnnnnnnnnnnnnnnnnnnnnnnnnnnnnnnnnnnnnnnnnnnnnnnnnnnnnnnnnnnnnnnnnnnnnnnnnnnnnnnnnnnnnnnnnnnnnnnnnnnnnnnnnnnnnnnnnnnnnnnnnnnnnnnnnnnnnnnnnnnnnnnnnnnnnnnnnnnnnnnnnnnnnnnnnnnnnnnnnnnnnnnnnnnnnnnnnnnnnnnnnnnnnnnnnnnnnnnnnnnnnnnnnnnnnnnnnnnnnnnnnnnnnnnnnnnnnnnnnnnnnnnnnnnnnnnnnnnnnnnnnnnnnnnnnnnnnnnnnnnnnnnnnnnnnnnnnnnnnnnnnnnnnnnnnnnnnnnnnnnnnnnnnnnnnnnnnnnnnnnnnnnnnnnnnnnnnnnnnnnnnnnnnnnnnnnnnnnnnnnnnnnnnnnnnnnnnnnnnnnnnnnnnnnnnnnnnnnnnnnnnnnnnnnnnnnnnnnnnnnnnnnnnnnnnnnnnnnnnnnnnnnnnnnnnnnnnnnnnnnnnnnnnnnnnnnnnnnnnnnnnnnnnnnnnnnnnnnnnnnnnnnnnnnnnnnnnnnnnnnnnnnnnnnnnnnnnnnnnnnnnnnnnnnnnnnnnnnnnnnnnnnnnnnnnnnnnnnnnnnnnnnnnnnnnnnnnnnnnnnnnnnnnnnnnnnnnnnnnnnnnnnnnnnnnnnnnnnnnnnnnnnnnnnnnnnnnnnnnnnnnnnnnnnnnnnnnnnnnnnnnnnnnnnnnnnnnnnnnnnnnnnnnnnnnnnnnnnnnnnnnnnnnnnnnnnnnnnnnnnnnnnnnnnnnnnnnnnnnnnnnnnnnnnnnnnnnnnnnnnnnnnnnnnnnnnnnnnnnnnnnnnnnnnnnnnnnnnnnnnnnnnnnnnnnnnnnnnnnnnnnnnnnnnnnnnnnnnnnnnnnnnnnnnnnnnnnnnnnnnnnnnnnnnnnnnnnnnnnnnnnnnnnnnnnnnnnnnnnnnnnnnnnnnnnnnnnnnnnnnnnnnnnnnnnnnnnnnnnnnnnnnnnnnnnnnnnnnnnnnnnnnnnnnnnnnnnnnnnnnnnnnnnnnnnnnnnnnnnnnnnnnnnnnnnnnnnnnnnnnnnnnnnnnnnnnnnnnnnnnnnnnnnnnnnnnnnnnnnnnnnnnnnnnnnnnnnnnnnnnnnnnnnnnnnnnnnnnnnnnnnnnnnnnnnnnnnnnnnnnnnnnnnnnnnnnnnnnnnnnnnnnnnnnnnnnnnnnnnnnnnnnnnnnnnnnnnnnnnnnnnnnnnnnnnnnnnnnnnnnnnnnnnnnnnnnnnnnnnnnnnnnnnnnnnnnnnnnnnnnnnnnnnnnnnnnnnnnnnnnnnnnnnnnnnnnnnnnnnnnnnnnnnnnnnnnnnnnnnnnnnnnnnnnnnnnnnnnnnnnnnnnnnnnnnnnnnnnnnnnnnnnnnnnnnnnnnnnnnnnnnnnnnnnnnnnnnnnnnnnnnnnnnnnnnnnnnnnnnnnnnnnnnnnnnnnnnnnnnnnnnnnnnnnnnnnnnnnnnnnnnnnnnnnnnnnnnnnnnnnnnnnnnnnnnnnnnnnnnnnnnnnnnnnnnnnnnnnnnnnnnnnnnnnnnnnnnnnnnnnnnnnnnnnnnnnnnnnnnnnnnnnnnnnnnnnnnnnnnnnnnnnnnnnnnnnnnnnnnnnnnnnnnnnnnnnnnnnnnnnnnnnnnnnnnnnnnnnnnnnnnnnnnnnnnnnnnnnnnnnnnnnnnnnnnnnnnnnnnnnnnnnnnnnnnnnnnnnnnnnnnnnnnnnnnnnnnnnnnnnnnnnnnnnnnnnnnnnnnnnnnnnnnnnnnnnnnnnnnnnnnnnnnnnnnnnnnnnnnnnnnnnnnnnnnnnnnnnnnnnnnnnnnnnnnnnnnnnnnnnnnnnnnnnnnnnnnnnnnnnnnnnnnnnnnnnnnnnnnnnnnnnnnnnnnnnnnnnnnnnnnnnnnnnnnnnnnnnnnnnnnnnnnnnnnnnnnnnnnnnnnnnnnnnnnnnnnnnnnnnnnnnnnnnnnnnnnnnnnnnnnnnnnnnnnnnnnnnnnnnnnnnnnnnnnnnnnnnnnnnnnnnnnnnnnnnnnnnnnnnnnnnnnnnnnnnnnnnnnnnnnnnnnnnnnnnnnnnnnnnnnnnnnnnnnnnnnnnnnnnnnnnnnnnnnnnnnnnnnnnnnnnnnnnnnnnnnnnnnnnnnnnnnnnnnnnnnnnnnnnnnnnnnnnnnnnnnnnnnnnnnnnnnnnnnnnnnnnnnnnnnnnnnnnnnnnnnnnnnnnnnnnnnnnnnnnnnnnnnnnnnnnnnnnnnnnnnnnnnnnnnnnnnnnnnnnnnnnnnnnnnnnnnnnnnnnnnnnnnnnnnnnnnnnnnnnnnnnnnnnnnnnnnnnnnnnnnnnnnnnnnnnnnnnnnnnnnnnnnnnnnnnnnnnnnnnnnnnnnnnnnnnnnnnnnnnnnnnnnnnnnnnnnnnnnnnnnnnnnnnnnnnnnnnnnnnnnnnnnnnnnnnnnnnnnnnnnnnnnnnnnnnnnnnnnnnnnnnnnnnnnnnnnnnnnnnnnnnnnnnnnnnnnnnnnnnnnnnnnnnnnnnnnnnnnnnnnnnnnnnnnnnnnnnnnnnnnnnnnnnnnnnnnnnnnnnnnnnnnnnnnnnnnnnnnnnnnnnnnnnnnnnnnnnnnnnnnnnnnnnnnnnnnnnnnnnnnnnnnnnnnnnnnnnnnnnnnnnnnnnnnnnnnnnnnnnnnnnnnnnnnnnnnnnnnnnnnnnnnnnnnnnnnnnnnnnnnnnnnnnnnnnnnnnnnnnnnnnnnnnnnnnnnnnnnnnnnnnnnnnnnnnnnnnnnnnnnnnnnnnnnnnnnnnnnnnnnnnnnnnnnnnnnnnnnnnnnnnnnnnnnnnnnnnnnnnnnnnnnnnnnnnnnnnnnnnnnnnnnnnnnnnnnnnnnnnnnnnnnnnnnnnnnnnnnnnnnnnnnnnnnnnnnnnnnnnnnnnnnnnnnnnnnnnnnnnnnnnnnnnnnnnnnnnnnnnnnnnnnnnnnnnnnnnnnnnnnnnnnnnnnnnnnnnnnnnnnnnnnnnnnnnnnnnnnnnnnnnnnnnnnnnnnnnnnnnnnnnnnnnnnnnnnnnnnnnnnnnnnnnnnnnnnnnnnnnnnnnnnnnnnnnnnnnnnnnnnnnnnnnnnnnnnnnnnnnnnnnnnnnnnnnnnnnnnnnnnnnnnnnnnnnnnnnnnnnnnnnnnnnnnnnnnnnnnnnnnnnnnnnnnnnnnnnnnnnnnnnnnnnnnnnnnnnnnnnnnnnnnnnnnnnnnnnnnnnnnnnnnnnnnnnnnnnnnnnnnnnnnnnnnnnnnnnnnnnnnnnnnnnnnnnnnnnnnnnnnnnnnnnnnnnnnnnnnnnnnnnnnnnnnnnnnnnnnnnnnnnnnnnnnnnnnnnnnnnnnnnnnnnnnnnnnnnnnnnnnnnnnnnnnnnnnnnnnnnnnnnnnnnnnnnnnnnnnnnnnnnnnnnnnnnnnnnnnnnnnnnnnnnnnnnnnnnnnnnnnnnnnnnnnnnnnnnnnnnnnnnnnnnnnnnnnnnnnnnnnnnnnnnnnnnnnnnnnnnnnnnnnnnnnnnnnnnnnnnnnnnnnnnnnnnnnnnnnnnnnnnnnnnnnnnnnnnnnnnnnnnnnnnnnnnnnnnnnnnnnnnnnnnnnnnnnnnnnnnnnnnnnnnnnnnnnnnnnnnnnnnnnnnnnnnnnnnnnnnnnnnnnnnnnnnnnnnnnnnnnnnnnnnnnnnnnnnnnnnnnnnnnnnnnnnnnnnnnnnnnnnnnnnnnnnnnnnnnnnnnnnnnnnnnnnnnnnnnnnnnnnnnnnnnnnnnnnnnnnnnnnnnnnnnnnnnnnnnnnnnnnnnnnnnnnnnnnnnnnnnnnnnnnnnnnnnnnnnnnnnnnnnnnnnnnnnnnnnnnnnnnnnnnnnnnnnnnnnnnnnnnnnnnnnnnnnnnnnnnnnnnnnnnnnatagcgttaatcgtttattatttgcagggcgaaaagcaaatcagttatttaatgatcagttaaaaccaaagcccctcaatagctgatatcgaaatatagtttcattgcatcattactgtcatcggttgtgtttcgttcctttgctttgcattaagtgtttggagagttgaatggagatgtttacgttacgtgcttacctaaacacgccgattattaaacgagggttcatgactcttgatgcattgcttatgtcaattttaggtaaaggggatgtcagtgatcttttgcgctgcgacgaagggctttattttgcgagcgcagggtttccagttgattcggtgtctgataaatttagagcatcttttgtagcaagtcttcgacccgagcacacccccgagtggttagaagtcattaaaaccaatacaaggtctgacgatttacaaatcggtttggctcgccagcgcgatgctggcaacatcatcaatagctacccaactcaagtagcaactgccatcgagtggtatgcaacggggcaaatgcttgatgttttagatgtcgttaaagatattgtggcaatcggtaagcgccgagttgttgggtacggcgaggtcaagttatgggaagctgagcttggtgaaattgacggcttagttggctttgctgatgaacctttacgcccagttccaaccgttcgctggcacttaagtcatgattttgttcctgtagaagctgcttggaaggccccttattgggatgttcgtaatcgaaccaagtgctttgtgccggagattgacttatgaatggccctgaattttttatgcagcatgctggttaccgtttgctccctgaagatgagaaaactgatgacgtagtcaaagatactgatcgtttatttagtattgcattgccgttaaacacgggtaaatttctaagactatcatcgtgttggtttgtggttactgcggattgggtagcaacaagctttaagaccctacccgaggcaggatttcgccacgatatagaccgtaaaacagcaatcgatttggcacttaaggcaggcaagccctgtgtattgcttggactaggtaaacgaaccacgacggcaaatgatatttacgtgacctacgacccaagagccgcacgtttgtgcgagcaaggtaaaaccaaaacttatgacgctacaaaggagaaagcatggacatcatgattgataagccacctcgtgtgcgcgggtacgcacttcaccgaattgtggaacaacttcaaaacggcaagcctgccttgtgggcagatgaagggtcaactgttcgtattaggcctcatgacgcgcaaccacctctgtacgagatcggaaagttattggcattcacgacaactgcatgtgttgcatttagtaagggccacaagcatgtctatctcccaacatctgattggcgagggcgaagggtatggctagataaacaagcagccaaacatggttttgaggttgttggcgtccacatctctgggggcatgcaaaaaattgaaacccataatggccgaaagttcaccattgatgccactgagtttaccgggcttctgcgcgtaagcgattcgactttattcggtcagtgtttgataaatggagtcggcaaagttggcaaggcatttggtttgaatttgatgatcgttcaataaaacaaaaaaaggcacatgaaatgactaaccagaaaatgaaaatagttgcacaaatcagcttgcattcagtacaaccgctaacgtttactcatcatagtgttgacgggttaccgcttttggcaagaggcatcgatcaagaggggcgccaccttcgcacggtctacatacctgcagcgcaatttagaggtcgagttcggcacgaagcggcgttgagtcagatgcgctctgagagcggcaaggtgaagcttgaagaagcctatatgctagcccttggccaagacctacgcccagcggaagatgacgctccagaacaagtcaggctcaaagagcagattgcggtccgtaaagaaaaccccttattggacttatttggcacatggaagttggctagtcgtttgtatgtctctcacttcatgccagaggtcaatgttctacccgcaaaaatcagccatataagaagggacctagacacgaacgaagatatgatggatgcgctgggttctgatgagcaagaccgtatgtacgatcgtcagagtaaacaaggtatggcctcacaagttggtcaattaattaagcttgccacgcgtgaactaatggctgcaaagaaagcaaaagatgtaaccaaggttgacgaaatagaagccaaaatcttagagttaaaagaacttaaaaaaacgcaaaagggtgatgacgattccgaaaataccaaacatttagttgaacttgagttcatacccgcaggtatcactctgaatggaaaattaactgtaaattcagccatacccaacgacttacgtgtgttagtggatgctttagtggggtttggcgaaaaaccttaccttggcgctcaacgtgctcgtggttgtggggaagttgcacttgaagcaacatttaagaatgcagatggtgatgtactcgctacggtagcctttgctgagggcgagggttctaatgttcaatggactgaggcagggactacttttttaaatgctgaaacaactaccacatgatttaccgcagccctgaacagacacaatatgcgaaattaattgagggtgctattaaaccgggggcaccacttctggcaggagcagcagcaggtctgggtaaaacgcacggctttagcattcctctaattacttcaggaaaacgcattgcgatttgtttaagtactcggcagttgattgatcagtatttaaaaagtgatgcgttgcaggtggcttgcggtggaagatccgtttcggttgtggcgttgcaatcaaggcgagactttacacgtgactcagattatcgctcacacaagaagcaggctttagaagccgagttattaattaccacccatgcggcagcctttattgacagtttcaatccagagtatgcacagcttcgtagtcgtgatgttgtgctgtttgatgaggctgatttattagctgacgctgctgacctgagaagcacatttagtatttcggctgaagcacttaaagattgtggcgctatgttaggtaatgcgttgagtgcggctaaattagttaaggcaaatgccgttgacgcagaagaccgtggtgctgccagttctatcctatatgccttagagaacccagcttggtacaaagtagttggatatgaggaggatggcgctttaactttaaaacatcgtttgccgggcagaatgcttaagcggcttgtggcagatgtaccacgctgtatttttacaagcggaacacttcaggtatctgggcggtttgattactttgttaaagcacttgggctcacagctatagcaccagagagtaggcacattgatccagtcatgcacggcagcctagatgttcaagttgcatctgatgaaatgtctattaatgaaatggctgaaaagattaaagctgcgaagcggccaacattggttcttacaacaagccacaaaacaacatttgagttgggtcaattactaccagaggccactattagagagtccggagaacctttgactgatgcggttgcgcggtgccccgatgacggcattctaatcgcagcaggtgcttggtctgggctagatgcgccaaggttacgatggaaaacattagtgattccaaaaacaccttatggtgtaagaaacgttttagatggtcatgatgtcgggcgttatatcgatagtaaggttgttgctattcgtcgaactaatcagggactgcatcgtgggcttagaacgcccgacgctcaatgcactttactgctactagacccgcgcagtagtaggtcagaactaagagaggcaataccgtcaaggtttaaagttgattgggttggcttcgaagaggggggccgtgaacttgttgagcacatgaaagctgaacgaaatgaaagccttcgtaaagctgcgctaaagcattatggtgagcaatgcatgtgggtgggctgtacggtgacattacctcacctgctcgatgtgcatcactgcaaccctatttcacttgggcaacgacgaacaacgatgtcagatgttaaagttttatgtaaaaatcatcatgctgaggagcatcataggatgcgaatgagcagtttagatgctctagacaatgatttaaatcaaatagaatcaaagggttgaagaatatcaggtcaagctgccatgtaaatgagcagttactagaac

SEQ ID NO: 259 - DNA, 11633 bp, Artificial Sequence
  Synthetic Oligonucleotide
  misc_feature (1)..(4498): n is a, c, g, or t
nnnnnnnnnnnnnnnnnnnnnnnnnnnnnnnnnnnnnnnnnnnnnnnnnnnnnnnnnnnnnnnnnnnnnnnnnnnnnnnnnnnnnnnnnnnnnnnnnnnnnnnnnnnnnnnnnnnnnnnnnnnnnnnnnnnnnnnnnnnnnnnnnnnnnnnnnnnnnnnnnnnnnnnnnnnnnnnnnnnnnnnnnnnnnnnnnnnnnnnnnnnnnnnnnnnnnnnnnnnnnnnnnnnnnnnnnnnnnnnnnnnnnnnnnnnnnnnnnnnnnnnnnnnnnnnnnnnnnnnnnnnnnnnnnnnnnnnnnnnnnnnnnnnnnnnnnnnnnnnnnnnnnnnnnnnnnnnnnnnnnnnnnnnnnnnnnnnnnnnnnnnnnnnnnnnnnnnnnnnnnnnnnnnnnnnnnnnnnnnnnnnnnnnnnnnnnnnnnnnnnnnnnnnnnnnnnnnnnnnnnnnnnnnnnnnnnnnnnnnnnnnnnnnnnnnnnnnnnnnnnnnnnnnnnnnnnnnnnnnnnnnnnnnnnnnnnnnnnnnnnnnnnnnnnnnnnnnnnnnnnnnnnnnnnnnnnnnnnnnnnnnnnnnnnnnnnnnnnnnnnnnnnnnnnnnnnnnnnnnnnnnnnnnnnnnnnnnnnnnnnnnnnnnnnnnnnnnnnnnnnnnnnnnnnnnnnnnnnnnnnnnnnnnnnnnnnnnnnnnnnnnnnnnnnnnnnnnnnnnnnnnnnnnnnnnnnnnnnnnnnnnnnnnnnnnnnnnnnnnnnnnnnnnnnnnnnnnnnnnnnnnnnnnnnnnnnnnnnnnnnnnnnnnnnnnnnnnnnnnnnnnnnnnnnnnnnnnnnnnnnnnnnnnnnnnnnnnnnnnnnnnnnnnnnnnnnnnnnnnnnnnnnnnnnnnnnnnnnnnnnnnnnnnnnnnnnnnnnnnnnnnnnnnnnnnnnnnnnnnnnnnnnnnnnnnnnnnnnnnnnnnnnnnnnnnnnnnnnnnnnnnnnnnnnnnnnnnnnnnnnnnnnnnnnnnnnnnnnnnnnnnnnnnnnnnnnnnnnnnnnnnnnnnnnnnnnnnnnnnnnnnnnnnnnnnnnnnnnnnnnnnnnnnnnnnnnnnnnnnnnnnnnnnnnnnnnnnnnnnnnnnnnnnnnnnnnnnnnnnnnnnnnnnnnnnnnnnnnnnnnnnnnnnnnnnnnnnnnnnnnnnnnnnnnnnnnnnnnnnnnnnnnnnnnnnnnnnnnnnnnnnnnnnnnnnnnnnnnnnnnnnnnnnnnnnnnnnnnnnnnnnnnnnnnnnnnnnnnnnnnnnnnnnnnnnnnnnnnnnnnnnnnnnnnnnnnnnnnnnnnnnnnnnnnnnnnnnnnnnnnnnnnnnnnnnnnnnnnnnnnnnnnnnnnnnnnnnnnnnnnnnnnnnnnnnnnnnnnnnnnnnnnnnnnnnnnnnnnnnnnnnnnnnnnnnnnnnnnnnnnnnnnnnnnnnnnnnnnnnnnnnnnnnnnnnnnnnnnnnnnnnnnnnnnnnnnnnnnnnnnnnnnnnnnnnnnnnnnnnnnnnnnnnnnnnnnnnnnnnnnnnnnnnnnnnnnnnnnnnnnnnnnnnnnnnnnnnnnnnnnnnnnnnnnnnnnnnnnnnnnnnnnnnnnnnnnnnnnnnnnnnnnnnnnnnnnnnnnnnnnnnnnnnnnnnnnnnnnnnnnnnnnnnnnnnnnnnnnnnnnnnnnnnnnnnnnnnnnnnnnnnnnnnnnnnnnnnnnnnnnnnnnnnnnnnnnnnnnnnnnnnnnnnnnnnnnnnnnnnnnnnnnnnnnnnnnnnnnnnnnnnnnnnnnnnnnnnnnnnnnnnnnnnnnnnnnnnnnnnnnnnnnnnnnnnnnnnnnnnnnnnnnnnnnnnnnnnnnnnnnnnnnnnnnnnnnnnnnnnnnnnnnnnnnnnnnnnnnnnnnnnnnnnnnnnnnnnnnnnnnnnnnnnnnnnnnnnnnnnnnnnnnnnnnnnnnnnnnnnnnnnnnnnnnnnnnnnnnnnnnnnnnnnnnnnnnnnnnnnnnnnnnnnnnnnnnnnnnnnnnnnnnnnnnnnnnnnnnnnnnnnnnnnnnnnnnnnnnnnnnnnnnnnnnnnnnnnnnnnnnnnnnnnnnnnnnnnnnnnnnnnnnnnnnnnnnnnnnnnnnnnnnnnnnnnnnnnnnnnnnnnnnnnnnnnnnnnnnnnnnnnnnnnnnnnnnnnnnnnnnnnnnnnnnnnnnnnnnnnnnnnnnnnnnnnnnnnnnnnnnnnnnnnnnnnnnnnnnnnnnnnnnnnnnnnnnnnnnnnnnnnnnnnnnnnnnnnnnnnnnnnnnnnnnnnnnnnnnnnnnnnnnnnnnnnnnnnnnnnnnnnnnnnnnnnnnnnnnnnnnnnnnnnnnnnnnnnnnnnnnnnnnnnnnnnnnnnnnnnnnnnnnnnnnnnnnnnnnnnnnnnnnnnnnnnnnnnnnnnnnnnnnnnnnnnnnnnnnnnnnnnnnnnnnnnnnnnnnnnnnnnnnnnnnnnnnnnnnnnnnnnnnnnnnnnnnnnnnnnnnnnnnnnnnnnnnnnnnnnnnnnnnnnnnnnnnnnnnnnnnnnnnnnnnnnnnnnnnnnnnnnnnnnnnnnnnnnnnnnnnnnnnnnnnnnnnnnnnnnnnnnnnnnnnnnnnnnnnnnnnnnnnnnnnnnnnnnnnnnnnnnnnnnnnnnnnnnnnnnnnnnnnnnnnnnnnnnnnnnnnnnnnnnnnnnnnnnnnnnnnnnnnnnnnnnnnnnnnnnnnnnnnnnnnnnnnnnnnnnnnnnnnnnnnnnnnnnnnnnnnnnnnnnnnnnnnnnnnnnnnnnnnnnnnnnnnnnnnnnnnnnnnnnnnnnnnnnnnnnnnnnnnnnnnnnnnnnnnnnnnnnnnnnnnnnnnnnnnnnnnnnnnnnnnnnnnnnnnnnnnnnnnnnnnnnnnnnnnnnnnnnnnnnnnnnnnnnnnnnnnnnnnnnnnnnnnnnnnnnnnnnnnnnnnnnnnnnnnnnnnnnnnnnnnnnnnnnnnnnnnnnnnnnnnnnnnnnnnnnnnnnnnnnnnnnnnnnnnnnnnnnnnnnnnnnnnnnnnnnnnnnnnnnnnnnnnnnnnnnnnnnnnnnnnnnnnnnnnnnnnnnnnnnnnnnnnnnnnnnnnnnnnnnnnnnnnnnnnnnnnnnnnnnnnnnnnnnnnnnnnnnnnnnnnnnnnnnnnnnnnnnnnnnnnnnnnnnnnnnnnnnnnnnnnnnnnnnnnnnnnnnnnnnnnnnnnnnnnnnnnnnnnnnnnnnnnnnnnnnnnnnnnnnnnnnnnnnnnnnnnnnnnnnnnnnnnnnnnnnnnnnnnnnnnnnnnnnnnnnnnnnnnnnnnnnnnnnnnnnnnnnnnnnnnnnnnnnnnnnnnnnnnnnnnnnnnnnnnnnnnnnnnnnnnnnnnnnnnnnnnnnnnnnnnnnnnnnnnnnnnnnnnnnnnnnnnnnnnnnnnnnnnnnnnnnnnnnnnnnnnnnnnnnnnnnnnnnnnnnnnnnnnnnnnnnnnnnnnnnnnnnnnnnnnnnnnnnnnnnnnnnnnnnnnnnnnnnnnnnnnnnnnnnnnnnnnnnnnnnnnnnnnnnnnnnnnnnnnnnnnnnnnnnnnnnnnnnnnnnnnnnnnnnnnnnnnnnnnnnnnnnnnnnnnnnnnnnnnnnnnnnnnnnnnnnnnnnnnnnnnnnnnnnnnnnnnnnnnnnnnnnnnnnnnnnnnnnnnnnnnnnnnnnnnnnnnnnnnnnnnnnnnnnnnnnnnnnnnnnnnnnnnnnnnnnnnnnnnnnnnnnnnnnnnnnnnnnnnnnnnnnnnnnnnnnnnnnnnnnnnnnnnnnnnnnnnnnnnnnnnnnnnnnnnnnnnnnnnnnnnnnnnnnnnnnnnnnnnnnnnnnnnnnnnnnnnnnnnnnnnnnnnnnnnnnnnnnnnnnnnnnnnnnnnnnnnnnnnnnnnnnnnnnnnnnnnnnnnnnnnnnnnnnnnnnnnnnnnnnnnnnnnnnnnnnnnnnnnnnnnnnnnnnnnnnnnnnnnnnnnnnnnnnnnnnnnnnnnnnnnnnnnnnnnnnnnnnnnnnnnnnnnnnnnnnnnnnnnnnnnnnnnnnnnnnnnnnnnnnnnnnnnnnnnnnnnnnnnnnnnnnnnnnnnnnnnnnnnnnnnnnnnnnnnnnnnnnnnnnnnnnnnnnnnnnnnnnnnnnnnnnnnnnnnnnnnnnnnnnnnnnnnnnnnnnnnnnnnnnnnnnnnnnnnnnnnnnnnnnnnnnnnnnnnnnnnnnnnnnnnnnnnnnnnnnnnnnnnnnnnnnnnnnnnnnnnnnnnnnnnnnnnnnnnnnnnnnnnnnnnnnnnnnnnnnnnnnnnnnnnnnnnnnnnnnnnnnnnnnnnnnnnnnnnnnnnnnnnnnnnnnnnnnnnnnnnnnnnnnnnnnnnnnnnnnnnnnnnnnnnnnnnnnnnnnnnnnnnnnnnnnnnnnnnnnnnnnnnnnnnnnnnnnnnnnnnnnnnnnnnnnnnnnnnnnnnnnnnnnnnnnnnnnnnnnnnnnnnnnnnnnnnnnnnnnnnnnnnnnnnnnnnnnnnnnnnnnnnnactgtgattttgctgaatcgcttcttattaagtctttatgccacggcgacatttcgtagctagctgaactgtcctgtaggccatatgctatagggttaagcctcaatacaacttgaagatagctaccataaccatcatactgcgtgtaattcataccaaaggttgtgcttggcaaggcaatatcattattaattaagtaagcacgcatacccgcggtcaatctattgccaccggttcctagccaattagaaacatgagaaacatataaacacctttgatcccaaacaccacccccgtaagcgttcttgtgcataacgtcgtttgctttacacagttcattagaatagcgtttgtgaccatagccatattccatgaaatatcccaatcgggaagaaaattgctcctgcaatcagaaaaccccaagctgcattggcaaaacaataaaaaatatggttaaaccaagctgctagacaaactaatccgattagccattgcataattttcttcctattttagttgtctaactgcgtcagcaattgttcgcatatttttagcggcgtcagcgcagctgattttggccgtttttttataggcatctatgccttgaagtgtgaataatgttagattttgactgacccgttcggtatcgctgtcatgcaagcgattcctatatccgtacccaataatctcgttaactgtttcatcagcgagcccatacattggggttaagttgcaagcctttatcacagtcatataagtaaaagaagccatgaatatttgctgaaactcaccttttgacaaaactttattagcttgggataagcccgtggtcatcatgaaaagtaaaacagttatgtttacccattttttcattttcgaaacctctgaattttgggtaagtttatctatttattagactaagcttaccctatccggttcaattacccaaaagcgtttcggtaacttaattactcgaaaacactagtagtctttttttgttgtcacacagctggtgcaaggtctggagttctagggcacaccgttggttgttcgcagacgatatctttgattttttgttcatgcttgagaagattgtttttcttctgatctggtgcgattcgccttaggcagcagtcaggccacatacccctactaacttggtagagctcaccgttgcaacgctcataccaaatcaaccttgccccagtcactttaacttgccacgtgggcctaataccgcactcgctccaactaataagtccctcaaacttcaataccttgactatcagccctaaattttctttttcgccgccatcatcaacaataattgcaaggtcaccgactcttacgtttctcatcacatgctcctgtttagccatttcgacgttgtcgggcatggcaattcggaataactccgccccttaattcaaccttccgtactagtaataaaaaaagccccatcaaggggcttgtagtcgtttagttatctgagcaacttaccagatcacattcgctataagcgtaagcacctttgcctttatgggcgggttgctgtggactttcgtcccctcttaatgtttttaaatattaccactaaaaacgcggtagcccaccctttttattaacgctgtacctatctttgctattgcctcctaagaacgtgcacaaaactcttttgcattctgattttggcgtcaaaaatgtcctacctaaactgaatcgagccctatctcttggcttaagagtgttcaatattgatctgtataagaccgcatctactaactaatcgaacacgatatcggggtaccagtatttgaacgagcgtgaccggcacttagggcaacgatgcagtccatgtaacaagctgccacttggaattactggttctacccaacagccaccgcaggaacagtcgccaaggaatgaaagtaacgtctgccactcaccatctcgccagctgtctccttgactaacccaacgctgctgatcacgcttttcgaagtatgctcttaactgttcctcagacaaatctggaacttggttcgactgagtggaaagacctgaaaccagtgagccaaccgcccgactcagtttttttagtggtgttacggcaggctcaggctttgaacgcggggcatagcgagggagcgactttgtttcgccgcaaccatcacaacacacatgaacgaagctaaatcctcctccctgtacgaccttgaattcgtggtcacagtctttacagcgacaatcaaatactgcacccatgtcttattcccccaagttaccttcctgtatcaggcgttaaccattttttcactgtagcgtctaaattgtaagtaccgagtttacggtaactggttttaaagagaaaaaagttagttggtatctcactttacgatacagtagttgactcatacttatttttaactaatggaggtttgtatggcaagcacaactcaacccatcacggtagaacggcaagataagcaagaaaaagtcgtttgtgatgaaataaaaagagcctacgagtttcttgctgaagagggttttaggccgtcatatgaagaagatgacacagttaaatttcgcgtagaaggtgtgactgcaaggttagaccgattagacgctggctatcgaatctacatatgggtgctcggtgagttgccggaggagcagcgtcccgtctcttattggacagctaactatattaatttgacccagccgtttgttcgtgcaggtgttactgaagataactccctaatagtttcttactcaatgatgggttcagatatttcgcagtttcttgagactctaattgatagcgttaatcgtttattatttgcagggcgaaaagcaaatcagttatttaatgatcagttaaaaccaaagcccctcaatagctgatatcgaaatatagtttcattgcatcattactgtcatcggttgtgtttcgttcctttgctttgcattaagtgtttggagagttgaatggagatgtttacgttacgtgcttacctaaacacgccgattattaaacgagggttcatgactcttgatgcattgcttatgtcaattttaggtaaaggggatgtcagtgatcttttgcgctgcgacgaagggctttattttgcgagcgcagggtttccagttgattcggtgtctgataaatttagagcatcttttgtagcaagtcttcgacccgagcacacccccgagtggttagaagtcattaaaaccaatacaaggtctgacgatttacaaatcggtttggctcgccagcgcgatgctggcaacatcatcaatagctacccaactcaagtagcaactgccatcgagtggtatgcaacggggcaaatgcttgatgttttagatgtcgttaaagatattgtggcaatcggtaagcgccgagttgttgggtacggcgaggtcaagttatgggaagctgagcttggtgaaattgacggcttagttggctttgctgatgaacctttacgcccagttccaaccgttcgctggcacttaagtcatgattttgttcctgtagaagctgcttggaaggccccttattgggatgttcgtaatcgaaccaagtgctttgtgccggagattgacttatgaatggccctgaattttttatgcagcatgctggttaccgtttgctccctgaagatgagaaaactgatgacgtagtcaaagatactgatcgtttatttagtattgcattgccgttaaacacgggtaaatttctaagactatcatcgtgttggtttgtggttactgcggattgggtagcaacaagctttaagaccctacccgaggcaggatttcgccacgatatagaccgtaaaacagcaatcgatttggcacttaaggcaggcaagccctgtgtattgcttggactaggtaaacgaaccacgacggcaaatgatatttacgtgacctacgacccaagagccgcacgtttgtgcgagcaaggtaaaaccaaaacttatgacgctacaaaggagaaagcatggacatcatgattgataagccacctcgtgtgcgcgggtacgcacttcaccgaattgtggaacaacttcaaaacggcaagcctgccttgtgggcagatgaagggtcaactgttcgtattaggcctcatgacgcgcaaccacctctgtacgagatcggaaagttattggcattcacgacaactgcatgtgttgcatttagtaagggccacaagcatgtctatctcccaacatctgattggcgagggcgaagggtatggctagataaacaagcagccaaacatggttttgaggttgttggcgtccacatctctgggggcatgcaaaaaattgaaacccataatggccgaaagttcaccattgatgccactgagtttaccgggcttctgcgcgtaagcgattcgactttattcggtcagtgtttgataaatggagtcggcaaagttggcaaggcatttggtttgaatttgatgatcgttcaataaaacaaaaaaaggcacatgaaatgactaaccagaaaatgaaaatagttgcacaaatcagcttgcattcagtacaaccgctaacgtttactcatcatagtgttgacgggttaccgcttttggcaagaggcatcgatcaagaggggcgccaccttcgcacggtctacatacctgcagcgcaatttagaggtcgagttcggcacgaagcggcgttgagtcagatgcgctctgagagcggcaaggtgaagcttgaagaagcctatatgctagcccttggccaagacctacgcccagcggaagatgacgctccagaacaagtcaggctcaaagagcagattgcggtccgtaaagaaaaccccttattggacttatttggcacatggaagttggctagtcgtttgtatgtctctcacttcatgccagaggtcaatgttctacccgcaaaaatcagccatataagaagggacctagacacgaacgaagatatgatggatgcgctgggttctgatgagcaagaccgtatgtacgatcgtcagagtaaacaaggtatggcctcacaagttggtcaattaattaagcttgccacgcgtgaactaatggctgcaaagaaagcaaaagatgtaaccaaggttgacgaaatagaagccaaaatcttagagttaaaagaacttaaaaaaacgcaaaagggtgatgacgattccgaaaataccaaacatttagttgaacttgagttcatacccgcaggtatcactctgaatggaaaattaactgtaaattcagccatacccaacgacttacgtgtgttagtggatgctttagtggggtttggcgaaaaaccttaccttggcgctcaacgtgctcgtggttgtggggaagttgcacttgaagcaacatttaagaatgcagatggtgatgtactcgctacggtagcctttgctgagggcgagggttctaatgttcaatggactgaggcagggactacttttttaaatgctgaaacaactaccacatgatttaccgcagccctgaacagacacaatatgcgaaattaattgagggtgctattaaaccgggggcaccacttctggcaggagcagcagcaggtctgggtaaaacgcacggctttagcattcctctaattacttcaggaaaacgcattgcgatttgtttaagtactcggcagttgattgatcagtatttaaaaagtgatgcgttgcaggtggcttgcggtggaagatccgtttcggttgtggcgttgcaatcaaggcgagactttacacgtgactcagattatcgctcacacaagaagcaggcgttagaagccgagttattaattaccacccatgcggcagcctttattgacagtttcaatccagagtatgcacagcttcgtagtcgtgatgttgtgctgtttgatgaggctgatttattagctgacgctgctgacctgagaagcacatttagtatttcggctgaagcacttaaagattgtggcgctatgttaggtaatgcgttgagtgcggctaaattagttaaggcaaatgccgttgacgcagaagaccgtggtgctgccagttctatcctatatgccttagagaacccagcttggtacaaagtagttggatatgaggaggatggcgctttaactttaaaacatcgtttgccgggcagaatgcttaagcggcttgtggcagatgtaccacgctgtatttttacaagcggaacacttcaggtatctgggcggtttgattactttgttaaagcacttgggctcacagctatagcaccagagagtaggcacattgatccagtcatgcacggcagcctagatgttcaagttgcatctgatgaaatgtctattaatgaaatggctgaaaagattaaagctgcgaagcggccaacattggttcttacaacaagccacaaaacaacatttgagttgggtcaattactaccagaggccactattagagagtccggagaacctttgactgatgcggttgcgcggtgccccgatgacggcattctaatcgcagcaggtgcttggtctgggctagatgcgccaaggttacgatggaaaacattagtgattccaaaaacaccttatggtgtaagaaacgttttagatggtcatgatgtcgggcgttatatcgatagtaaggttgttgctattcgtcgaactaatcagggactgcatcgtgggcttagaacgcccgacgctcaatgcactttactgctactagacccgcgcagtagtaggtcagaactaagagaggcaataccgtcaaggtttaaagttgattgggttggcttcgaagaggggggccgtgaacttgttgagcacatgaaagctgaacgaaatgaaagccttcgtaaagctgcgctaaagcattatggtgagcaatgcatgtgggtgggctgtacggtgacattacctcacctgctcgatgtgcatcactgcaaccctatttcacttgggcaacgacgaacaacgatgtcagatgttaaagttttatgtaaaaatcatcatgctgaggagcatcataggatgcgaatgagcagtttagatgctctagacaatgatttaaatcaaatagaatcaaagggttgaagaatatcaggtcaagctgccatgtaaatgag

SEQ ID NO: 260 - DNA, 11618 bp, Artificial Sequence
  Synthetic Oligonucleotide
  misc_feature (1)..(6464): n is a, c, g, or t
nnnnnnnnnnnnnnnnnnnnnnnnnnnnnnnnnnnnnnnnnnnnnnnnnnnnnnnnnnnnnnnnnnnnnnnnnnnnnnnnnnnnnnnnnnnnnnnnnnnnnnnnnnnnnnnnnnnnnnnnnnnnnnnnnnnnnnnnnnnnnnnnnnnnnnnnnnnnnnnnnnnnnnnnnnnnnnnnnnnnnnnnnnnnnnnnnnnnnnnnnnnnnnnnnnnnnnnnnnnnnnnnnnnnnnnnnnnnnnnnnnnnnnnnnnnnnnnnnnnnnnnnnnnnnnnnnnnnnnnnnnnnnnnnnnnnnnnnnnnnnnnnnnnnnnnnnnnnnnnnnnnnnnnnnnnnnnnnnnnnnnnnnnnnnnnnnnnnnnnnnnnnnnnnnnnnnnnnnnnnnnnnnnnnnnnnnnnnnnnnnnnnnnnnnnnnnnnnnnnnnnnnnnnnnnnnnnnnnnnnnnnnnnnnnnnnnnnnnnnnnnnnnnnnnnnnnnnnnnnnnnnnnnnnnnnnnnnnnnnnnnnnnnnnnnnnnnnnnnnnnnnnnnnnnnnnnnnnnnnnnnnnnnnnnnnnnnnnnnnnnnnnnnnnnnnnnnnnnnnnnnnnnnnnnnnnnnnnnnnnnnnnnnnnnnnnnnnnnnnnnnnnnnnnnnnnnnnnnnnnnnnnnnnnnnnnnnnnnnnnnnnnnnnnnnnnnnnnnnnnnnnnnnnnnnnnnnnnnnnnnnnnnnnnnnnnnnnnnnnnnnnnnnnnnnnnnnnnnnnnnnnnnnnnnnnnnnnnnnnnnnnnnnnnnnnnnnnnnnnnnnnnnnnnnnnnnnnnnnnnnnnnnnnnnnnnnnnnnnnnnnnnnnnnnnnnnnnnnnnnnnnnnnnnnnnnnnnnnnnnnnnnnnnnnnnnnnnnnnnnnnnnnnnnnnnnnnnnnnnnnnnnnnnnnnnnnnnnnnnnnnnnnnnnnnnnnnnnnnnnnnnnnnnnnnnnnnnnnnnnnnnnnnnnnnnnnnnnnnnnnnnnnnnnnnnnnnnnnnnnnnnnnnnnnnnnnnnnnnnnnnnnnnnnnnnnnnnnnnnnnnnnnnnnnnnnnnnnnnnnnnnnnnnnnnnnnnnnnnnnnnnnnnnnnnnnnnnnnnnnnnnnnnnnnnnnnnnnnnnnnnnnnnnnnnnnnnnnnnnnnnnnnnnnnnnnnnnnnnnnnnnnnnnnnnnnnnnnnnnnnnnnnnnnnnnnnnnnnnnnnnnnnnnnnnnnnnnnnnnnnnnnnnnnnnnnnnnnnnnnnnnnnnnnnnnnnnnnnnnnnnnnnnnnnnnnnnnnnnnnnnnnnnnnnnnnnnnnnnnnnnnnnnnnnnnnnnnnnnnnnnnnnnnnnnnnnnnnnnnnnnnnnnnnnnnnnnnnnnnnnnnnnnnnnnnnnnnnnnnnnnnnnnnnnnnnnnnnnnnnnnnnnnnnnnnnnnnnnnnnnnnnnnnnnnnnnnnnnnnnnnnnnnnnnnnnnnnnnnnnnnnnnnnnnnnnnnnnnnnnnnnnnnnnnnnnnnnnnnnnnnnnnnnnnnnnnnnnnnnnnnnnnnnnnnnnnnnnnnnnnnnnnnnnnnnnnnnnnnnnnnnnnnnnnnnnnnnnnnnnnnnnnnnnnnnnnnnnnnnnnnnnnnnnnnnnnnnnnnnnnnnnnnnnnnnnnnnnnnnnnnnnnnnnnnnnnnnnnnnnnnnnnnnnnnnnnnnnnnnnnnnnnnnnnnnnnnnnnnnnnnnnnnnnnnnnnnnnnnnnnnnnnnnnnnnnnnnnnnnnnnnnnnnnnnnnnnnnnnnnnnnnnnnnnnnnnnnnnnnnnnnnnnnnnnnnnnnnnnnnnnnnnnnnnnnnnnnnnnnnnnnnnnnnnnnnnnnnnnnnnnnnnnnnnnnnnnnnnnnnnnnnnnnnnnnnnnnnnnnnnnnnnnnnnnnnnnnnnnnnnnnnnnnnnnnnnnnnnnnnnnnnnnnnnnnnnnnnnnnnnnnnnnnnnnnnnnnnnnnnnnnnnnnnnnnnnnnnnnnnnnnnnnnnnnnnnnnnnnnnnnnnnnnnnnnnnnnnnnnnnnnnnnnnnnnnnnnnnnnnnnnnnnnnnnnnnnnnnnnnnnnnnnnnnnnnnnnnnnnnnnnnnnnnnnnnnnnnnnnnnnnnnnnnnnnnnnnnnnnnnnnnnnnnnnnnnnnnnnnnnnnnnnnnnnnnnnnnnnnnnnnnnnnnnnnnnnnnnnnnnnnnnnnnnnnnnnnnnnnnnnnnnnnnnnnnnnnnnnnnnnnnnnnnnnnnnnnnnnnnnnnnnnnnnnnnnnnnnnnnnnnnnnnnnnnnnnnnnnnnnnnnnnnnnnnnnnnnnnnnnnnnnnnnnnnnnnnnnnnnnnnnnnnnnnnnnnnnnnnnnnnnnnnnnnnnnnnnnnnnnnnnnnnnnnnnnnnnnnnnnnnnnnnnnnnnnnnnnnnnnnnnnnnnnnnnnnnnnnnnnnnnnnnnnnnnnnnnnnnnnnnnnnnnnnnnnnnnnnnnnnnnnnnnnnnnnnnnnnnnnnnnnnnnnnnnnnnnnnnnnnnnnnnnnnnnnnnnnnnnnnnnnnnnnnnnnnnnnnnnnnnnnnnnnnnnnnnnnnnnnnnnnnnnnnnnnnnnnnnnnnnnnnnnnnnnnnnnnnnnnnnnnnnnnnnnnnnnnnnnnnnnnnnnnnnnnnnnnnnnnnnnnnnnnnnnnnnnnnnnnnnnnnnnnnnnnnnnnnnnnnnnnnnnnnnnnnnnnnnnnnnnnnnnnnnnnnnnnnnnnnnnnnnnnnnnnnnnnnnnnnnnnnnnnnnnnnnnnnnnnnnnnnnnnnnnnnnnnnnnnnnnnnnnnnnnnnnnnnnnnnnnnnnnnnnnnnnnnnnnnnnnnnnnnnnnnnnnnnnnnnnnnnnnnnnnnnnnnnnnnnnnnnnnnnnnnnnnnnnnnnnnnnnnnnnnnnnnnnnnnnnnnnnnnnnnnnnnnnnnnnnnnnnnnnnnnnnnnnnnnnnnnnnnnnnnnnnnnnnnnnnnnnnnnnnnnnnnnnnnnnnnnnnnnnnnnnnnnnnnnnnnnnnnnnnnnnnnnnnnnnnnnnnnnnnnnnnnnnnnnnnnnnnnnnnnnnnnnnnnnnnnnnnnnnnnnnnnnnnnnnnnnnnnnnnnnnnnnnnnnnnnnnnnnnnnnnnnnnnnnnnnnnnnnnnnnnnnnnnnnnnnnnnnnnnnnnnnnnnnnnnnnnnnnnnnnnnnnnnnnnnnnnnnnnnnnnnnnnnnnnnnnnnnnnnnnnnnnnnnnnnnnnnnnnnnnnnnnnnnnnnnnnnnnnnnnnnnnnnnnnnnnnnnnnnnnnnnnnnnnnnnnnnnnnnnnnnnnnnnnnnnnnnnnnnnnnnnnnnnnnnnnnnnnnnnnnnnnnnnnnnnnnnnnnnnnnnnnnnnnnnnnnnnnnnnnnnnnnnnnnnnnnnnnnnnnnnnnnnnnnnnnnnnnnnnnnnnnnnnnnnnnnnnnnnnnnnnnnnnnnnnnnnnnnnnnnnnnnnnnnnnnnnnnnnnnnnnnnnnnnnnnnnnnnnnnnnnnnnnnnnnnnnnnnnnnnnnnnnnnnnnnnnnnnnnnnnnnnnnnnnnnnnnnnnnnnnnnnnnnnnnnnnnnnnnnnnnnnnnnnnnnnnnnnnnnnnnnnnnnnnnnnnnnnnnnnnnnnnnnnnnnnnnnnnnnnnnnnnnnnnnnnnnnnnnnnnnnnnnnnnnnnnnnnnnnnnnnnnnnnnnnnnnnnnnnnnnnnnnnnnnnnnnnnnnnnnnnnnnnnnnnnnnnnnnnnnnnnnnnnnnnnnnnnnnnnnnnnnnnnnnnnnnnnnnnnnnnnnnnnnnnnnnnnnnnnnnnnnnnnnnnnnnnnnnnnnnnnnnnnnnnnnnnnnnnnnnnnnnnnnnnnnnnnnnnnnnnnnnnnnnnnnnnnnnnnnnnnnnnnnnnnnnnnnnnnnnnnnnnnnnnnnnnnnnnnnnnnnnnnnnnnnnnnnnnnnnnnnnnnnnnnnnnnnnnnnnnnnnnnnnnnnnnnnnnnnnnnnnnnnnnnnnnnnnnnnnnnnnnnnnnnnnnnnnnnnnnnnnnnnnnnnnnnnnnnnnnnnnnnnnnnnnnnnnnnnnnnnnnnnnnnnnnnnnnnnnnnnnnnnnnnnnnnnnnnnnnnnnnnnnnnnnnnnnnnnnnnnnnnnnnnnnnnnnnnnnnnnnnnnnnnnnnnnnnnnnnnnnnnnnnnnnnnnnnnnnnnnnnnnnnnnnnnnnnnnnnnnnnnnnnnnnnnnnnnnnnnnnnnnnnnnnnnnnnnnnnnnnnnnnnnnnnnnnnnnnnnnnnnnnnnnnnnnnnnnnnnnnnnnnnnnnnnnnnnnnnnnnnnnnnnnnnnnnnnnnnnnnnnnnnnnnnnnnnnnnnnnnnnnnnnnnnnnnnnnnnnnnnnnnnnnnnnnnnnnnnnnnnnnnnnnnnnnnnnnnnnnnnnnnnnnnnnnnnnnnnnnnnnnnnnnnnnnnnnnnnnnnnnnnnnnnnnnnnnnnnnnnnnnnnnnnnnnnnnnnnnnnnnnnnnnnnnnnnnnnnnnnnnnnnnnnnnnnnnnnnnnnnnnnnnnnnnnnnnnnnnnnnnnnnnnnnnnnnnnnnnnnnnnnnnnnnnnnnnnnnnnnnnnnnnnnnnnnnnnnnnnnnnnnnnnnnnnnnnnnnnnnnnnnnnnnnnnnnnnnnnnnnnnnnnnnnnnnnnnnnnnnnnnnnnnnnnnnnnnnnnnnnnnnnnnnnnnnnnnnnnnnnnnnnnnnnnnnnnnnnnnnnnnnnnnnnnnnnnnnnnnnnnnnnnnnnnnnnnnnnnnnnnnnnnnnnnnnnnnnnnnnnnnnnnnnnnnnnnnnnnnnnnnnnnnnnnnnnnnnnnnnnnnnnnnnnnnnnnnnnnnnnnnnnnnnnnnnnnnnnnnnnnnnnnnnnnnnnnnnnnnnnnnnnnnnnnnnnnnnnnnnnnnnnnnnnnnnnnnnnnnnnnnnnnnnnnnnnnnnnnnnnnnnnnnnnnnnnnnnnnnnnnnnnnnnnnnnnnnnnnnnnnnnnnnnnnnnnnnnnnnnnnnnnnnnnnnnnnnnnnnnnnnnnnnnnnnnnnnnnnnnnnnnnnnnnnnnnnnnnnnnnnnnnnnnnnnnnnnnnnnnnnnnnnnnnnnnnnnnnnnnnnnnnnnnnnnnnnnnnnnnnnnnnnnnnnnnnnnnnnnnnnnnnnnnnnnnnnnnnnnnnnnnnnnnnnnnnnnnnnnnnnnnnnnnnnnnnnnnnnnnnnnnnnnnnnnnnnnnnnnnnnnnnnnnnnnnnnnnnnnnnnnnnnnnnnnnnnnnnnnnnnnnnnnnnnnnnnnnnnnnnnnnnnnnnnnnnnnnnnnnnnnnnnnnnnnnnnnnnnnnnnnnnnnnnnnnnnnnnnnnnnnnnnnnnnnnnnnnnnnnnnnnnnnnnnnnnnnnnnnnnnnnnnnnnnnnnnnnnnnnnnnnnnnnnnnnnnnnnnnnnnnnnnnnnnnnnnnnnnnnnnnnnnnnnnnnnnnnnnnnnnnnnnnnnnnnnnnnnnnnnnnnnnnnnnnnnnnnnnnnnnnnnnnnnnnnnnnnnnnnnnnnnnnnnnnnnnnnnnnnnnnnnnnnnnnnnnnnnnnnnnnnnnnnnnnnnnnnnnnnnnnnnnnnnnnnnnnnnnnnnnnnnnnnnnnnnnnnnnnnnnnnnnnnnnnnnnnnnnnnnnnnnnnnnnnnnnnnnnnnnnnnnnnnnnnnnnnnnnnnnnnnnnnnnnnnnnnnnnnnnnnnnnnnnnnnnnnnnnnnnnnnnnnnnnnnnnnnnnnnnnnnnnnnnnnnnnnnnnnnnnnnnnnnnnnnnnnnnnnnnnnnnnnnnnnnnnnnnnnnnnnnnnnnnnnnnnnnnnnnnnnnnnnnnnnnnnnnnnnnnnnnnnnnnnnnnnnnnnnnnnnnnnnnnnnnnnnnnnnnnnnnnnnnnnnnnnnnnnnnnnnnnnnnnnnnnnnnnnnnnnnnnnnnnnnnnnnnnnnnnnnnnnnnnnnnnnnnnnnnnnnnnnnnnnnnnnnnnnnnnnnnnnnnnnnnnnnnnnnnnnnnnnnnnnnnnnnnnnnnnnnnnnnnnnnnnnnnnnnnnnnnnnnnnnnnnnnnnnnnnnnnnnnnnnnnnnnnnnnnnnnnnnnnnnnnnnnnnnnnnnnnnnnnnnnnnnnnnnnnnnnnnnnnnnnnnnnnnnnnnnnnnnnnnnnnnnnnnnnnnnnnnnnnnnnnnnnnnnnnnnnnnnnnnnnnnnnnnnnnnnnnnnnnnnnnnnnnnnnnnnnnnnnnnnnnnnnnnnnnnnnnnnnnnnnnnnnnnnnnnnnnnnnnnnnnnnnnnnnnnnnnnnnnnnnnnnnnnnnnnnnnnnnnnnnnnnnnnnnnnnnnnnnnnnnnnnnnnnnnnnnnnnnnnnnnnnnnnnnnnnnnnnnnnnnnnnnnnnnnnnnnnnnnnnnnnnnnnnnnnnnnnnnnnnnnnnnnnnnnnnnnnnnnnnnnnnnnnnnnnnnnnnnnnnnnnnnnnnnnnnnnccccgccattctcgtaggcaatatggcttggaagccaatacccatgcgggtttcaatcctatttgcgcttctaaaaacactaatatttatgatcctgcaccctcgctccgtgattaaaagaacaacgcccgcgcaaggcgggcgttgggtgaggtgtttcaacttttattgatcgcgcgcatacgagaagacactgcgcgcccgaagccatcagggggattatcaggcttgggtttacttgctacggcgggcggtgaatctgccgttgcgggagtttgcaaagcagagcaaggtatcgccttcacgtatatcgaaaatccagcggacgattgtccaggctacgtaatagattacgttacgctattgaagcgcgaggatgcggatagtccgagtaatatgcattggcagacgacgggggatcagctttttatttgtggaggcgtgatgcaaaagacattttcggtaacggcctatctttcctcgcctttcgtgacgggcggcggatatatgacgcttgacggcttgttagcggcgcggttgttcgaggaattgcaaaatgtcgaagccgcgcacgcggcggtgcctgtcaggtgtaatgcggggcttgcctgtgccagcggtgcgatttacgagccagtatcggtagaccgaatagcgttcgtcgcgcaacttcgggcggggcattccctgaatccagacctgatcaaaaagaataagcgtggagcattgcatagagacgtgaacgacacatcgttatgcaacgtgatgaatgcatacacgctagtcaccgcgcctaccatcacctggtatggggagggcgatggcaatgaggtgatgcgcctgctggctggcgttgaattcatcggcaagcggcgcgcgtccggttttgggcgggtcacgaggtgggaaattgctgacggcgatctggacggcataacgggctacgcgggagaaccattgcgccccgtgccggttgaaatgttttccggtgatgatgccaggccaatagtcgatgcggcgtggcgtttgccgtattggtcgcctgttaatcgcgctgcttgttacgtgccgaccggagcaataaatgcttgaattcttcaatagcaacttcggccgccacttcgccgagcaaacaggcgacgcaatggcggatgccaaggccgcgctatctggcggccatcccatgaagaaaggcggtatgcctcagcgcatttcgtcgggttgggcgatcgtgcgccctggcaagtccgtgatgcagatgaagttcgcggcgaagggggtggattacgcggttgaggacagatacacggcattcctctctgaactacaggcatgggatggaaagccgcgcattttcctcacattcgacaagaagccgatcccggttggcaatgtgtttgtaacgtatgacctgcgggcagttcgtatttgctctcccgccggggttgaaacttttgattttacggttccgccggagaaatccagcggcgtggctcataaggttatctggaaaaagaaagcggggaaaaaatgatagtcgattacgtgttgcccaagccagcaagcgcagggggttattctttgcatcggattgtcgaggggttaactggcggtgcgcgcccgttgttcgcggacatgggcgaccgccttttggtgcgtagcgcagtgccaataaacggtgtggaaaccttgccggtgcgcgaacttgctgcgggagatatggcggcattccagttgcgcgcctcggtcagcaagaaaacgcgcggtaaacgcagttactacccgacggctgattggtcaacccgtcacgactggctgcggcggcaaggcgagcggcatgggttcgaggtgctgaccgttcattgcaccgctgatttctcaaagattgaaaagacgggacagcgatttacagtggacaggacggacttcaccggggttttgaaagtcagggatacagagaaattcagcgcagcactgcgcgacggtattagcggatgcggtaaggcttttggttttggaatgttgttaatttgaatgcaaaggaaataacatgaaaaacagcaacagtatcctcatcaactctaccatcaccaccgtcggcccgttgtccatcaagatgccggtcgcgcaaggcggaatcgagaacaggttcgggaacttcccgctgttcacggtcggcgcaaaggaaatgcagggcaaggacggcgagagctacaccgcgaaggagcacaccggctaccttccctcgacaacggtccggggtttcctgcggcgcgccatcgtaacggatgcaatgacacgcgccgccgaggaaggtaaccactacacactgcaaagggcctacgccgacctgatcggccaagacgcggcatcggagaagtctgagaagattgacctgctggcggctcgcaagctgcgagatgagaacgaggttctcgacctattcgggtgcggcatcagcatgtcatcgcgtttacttgttagccacttcatgcccgcgggcggcgcagcgttgccggagtttgtaagtgtcgtcaggaaagacctcgaggacaccgagggcgtggttgaggctctgacgccctttgatcgcgatgcttactatgcccgcggcgattccaattcacgtcgggcagacgccgctgggttggccgctgacctgaagcggaagttgaaggctgcttccaagaaaggcgaagacgtaaaaggtcttgacgcgcagttgaaggaggccgaggcgttggttgcgaagttcgaggttcagatgggcgacatgcagaacagcagccgtacattggcgggctactacgcgctgcctcccggcaccgtgctgacaggcaagatcatcatcgagcgtccgcgtgaccgtgatttgccgatgattgagttggcgctggatgcgctgagccgccgcccgttgctcggcggtcaggtggctcgcggctgcggtgagattgccggcagcttcgatgtgttgaagggcggcgtattgctgaaaaaaatcaccatcggtggttttgcgcctgccgccgtggtcaattttggcgcggtggataatgagaaaaaatcagcgtaattgcagggatgcttgaagtcgggtcaagccacccgttatttgggtggttactagaaccggttaaaggtcagcttgaaccagcgcaccggtcaagccacccgttatttgggtggttactagaactgatttccctttcagtgctgcgcgggcttgggtcaagccacccgttatttgggtggttactagaacagtcaccagcttccagcgtctaacgggcgcggtcaagccacccgttatttcggtggttactagaacattgataaccgagtgaggccgaaatgacctggtcaagccacccgttatttgggtggttactggaacttgtggatgttctcgccgcatgccgggtagggtcaagccactcgttattcgggtggttactagaaccagatgatgacggggtaaatgtcgatgttcattcaagccatccgctattggagtggttcctaagagggaaaaatgtttcgcagcgcagaacaaaagaacttcgcaaacatcgtcgcggcacatatcgagcgccatgacgggccactgctcatagaaggcggcgtcgggttgggcaagactcgcgcatatttgtcggcagtgatgaacgcggctcgcagtgggaagcgcatcgcgctggcgttgccgactcatgcattgatagaccaattactcgcgtcgagcgaccttgccgctactggggaaggcgtgacggttgcggcattcagaccggcgcggatgtatgaaacgcgcagcgagtatcaagaggcgcgcaaatcggcaatggcagcgcaagtcatgctttgcactgcggcggccatcgtcatcgacaaccgcaacagcggggaatacagcggcgcgaccacacgcgactacctgctattcgacgaggccgatcagttgccatcagcagcggcgatgcaggttgacatggaaataccggcgcatacgtttagcgaatttcacatcaaggttgacacagccgagcaggctgcgcgtgatctgttgacgcgcaagctggctgaacctgaacacaaggcggcggcgaaattggtgctggagattcttggcgaccccgcgtggtatcacagtgcaggcgtgaccgaggacggcggagttgcggctcatcaccagatgccggggcttctgctcaaacgcgttgccaatcggggaaattcggccttcgtttctgccacccttacgctgggcggttcgttcgctgatttcaagcgcgcactgggtattggcaatgagtctacgctgtcatcaaccatcgaacccgcaaagcacggcgatctgcgtttcgtagtcaacgacgcacatgaggtagacacgcccgaatggatgacggcggtgctgggcgccattgccggtgctgcgcgtccggttctggtggtcaccccgtctcacgatctggcgcagaccatcggcgaggcagtgcccggtgctgtggtgcgcgcagatgacgaaaccacggctggcgctgcggcgcgtgttggtgacgatggtgtgctggtagccgctggtgcgtgggctgggttagacacaccgacccaatgggcgtcggtagtggtgccgaaggtgccgtatccgatgccgacgattttggatggtagaacggaaagcacctacctgtccgcgcgaggcgtcgccatccgcaggttgaggcaagtattcgggcgcgggttgcggacgccagattcggtctgcacgatctatttgcttgacccacgggcacgcaagctgtcgggcatagtgccttcacggttcgcgcagcaatggcaagagcgcgtgtatcaagaaggcacgcgtggggaggtggtgctgtcaaaggcagaacgcgatcccgcgctccggaaggctgcgctgcaaaagtttggatgcaaatgcgctgcctgcgggttcatgcctaaagtctcgcaacagatcgaaatacatcatctaaatccggtagcggacggggagcgcaagacaacactggcggacgttgtgccgctttgcgcaaattgtcaccggctcgcgcactcgaccacgccgccgatgccgcttgatgcactgcgtagggcagcggctgacaatactcaaatttaaaa

SEQ ID NO: 261 - DNA, 11587 bp, Artificial Sequence
  Synthetic Oligonucleotide
taccctcagccagcgcttcaagcgaggatcccaatcgttcactgataaaaaacgcagctgatatcgccgtgagcaaaaccaccaataacgacagcgtaagggtaatgccgtataaccgctttaatcccagcctggacagcgtcagctcctgataatcgcgataaaccgattgcaccatctccgcatcgtcttcgatttgtttggggacagcctgattgaattgcaaaatatagctcgcccctgaatagctatttgcattcaccaagaccagcacacgcaggctcattgccttgtttggcatcgcctcaattgccgagtactgccctttttcccgtacctgctgcattagtttgtcgcccggaatatcgggcaacagtgcattgtcgctggcagcaaaggcaagcaacttgccgccggggccaaatacggccgcctcctgagccatgccttcatctattaattgcgccagtgcattttgaaactgtacgggatttttttctgacagcaagagtgcaacaaactgggttttcttcgacagctccttcagactattatccagtccgcttctgcccagattaaggccgccttccagcgccttttccacgcggacgtcaaaccacgactcaatactcttcgacaaaaaattcaccgatacggcatagaccaatatgccgggcaaaacagctaccaggataaaaaacaacaccaggcgcaaggtaagtttagcgccgaacacctttttctttaacttgtcgcgcaggcgccaaaactgataaccaaccaggccagacaaacccagtgcaagcaagccggtcaatccgagtaaaccgtagtaactgacggaaaatacttcggtgttagcgctgctgctcgatagcagatacagcaagaccgtaaccgcaataacacttaaggtgatcagatatttcacggtcgcatcactccgctttgctgcgtgcagcgttttctgccggacgcatcacccagcgataccagcccgaatccagatcccagtccttgctggtcaacacattcacctgcatcaatttaggcagctgcctggtatccaggcgcaagcgcacagcggcaatatagttcgcctcttttttcatcgtttctgtagaaataaaagccgaattttgccgtgcaagaatacgcaacatttcatcgagactggcaaagttctgaaacagagcgccgcgtgaaatacggtactggcgggtgagtacgttgtaggaaagcttgactgattgttcgccttgaaatacttcttcatccagccaataccaccgcgaacgcgtcagggaaaattcgcctacaaaataaatcggcacgcccagcgacaaagcctgctgaaccgtataactcagattgacattgaaatctgccgcgagttgatagccatcctcgctcaagcgcatttctgccttgtttacgtctataccgtcagcaaaagccgtcgcggcaaacagccacattggcaaagcaaaccatagcaaggctttaagcaattttttgcagcaaggcataaaaaaatccatcatgctgatccgtcggcaacaactgtccttccggcaactctgtcggcaattgccgcgcttccggtgtttttttcagaaataattctataacatcttgattttcttgtttaaatacagagcaagtggcgtagagcagcagaccgtcttttgccagcagcgcccagagggattgcagaatatccgactgctgcgcagcaaaagaggcaatatccttcttgcggcgcaaccatttgatgtcggggtgacggcggaccacccccgtcgcggagcagggcacatcagccaggatgcgctcgaacggtttgccatcccaccagtcgtcaggtttggaggcatcgccaatcaaaagcgtgccgggtaattccagacgctgcaaattttctgccacgcgttgcaggcgtttttcatctttatccagcgccaccatctcaacgtcggccaactccagaatgtgcgcggtcttgccgcccggcgccgcgcacgcgtccagcacgcgcatgccattgtgggcatccagcaaacgcgcagcatactgcgcgccgacatcctgcaccgacaccaagccggcaaaaaatccgggcaacttgtccaccggcacaggtttatccaactgcaatgcatccggttcgatgagttgggcagagatattttgttcggtcagttgcgccaaatagtcttgcgtcgtgccgtgtcgctgattgacccgtaacgtcatcggcgggtgctgattgcctgctgcgagtatcgcatctgctcgttcaccatactgcgccctgagttcatctatccaccattggggatggctatattgtccttccggtttaagggctgcctgcgccagcaattcggcctgactgcgcaaaaagttgcgcaaaatcgcattgaccagccccctgattttcggattcagaatgtctgccgagcgcacggcatgatcgaccacagcatgctgtgccgccttactgtattgcagctgataaagcgccaccagcagcaaataggtaatccgatgatccgtcatatgcttgtgcagcaacaaatcaagtattgaatttaactgtccgtaaaaacgcaaggtgccgtagctcaaatcttgcagcgcggcacgctgtgcgggtgtccagacagatttcctgcgcagcgattcatccagcacctggttaagattgcgaccgtcctccaaaacctgctggacgatctgggttgccgctaactgaatgttatgcatttaaattaccgaaaaattgtcgccgacacgaaccggcatcgcttgcagaaactgcacggcaggctgtaccttaccgccggggcgttgcaatactgtaacaagcagcgcgtctttgccacaggcgaccgtgatgccttgtttatccaccgccaggacatcgcccggcttgccgcgtcggtctgtaaccgtacggacttcagcctgccatattttcagcgccacatcatgcagcctagactgacataccgggaaaggattataggcgcgaactgcgcgggcaatctgctccgcatcttgccgccaatcaatcaacgcctcatttttaagcagcttggcggcataacacgccgcatcgttatcctgttttacagctgtcagaccattggcttccagcaggcgcaacgcctcaagtatgccggcagcacccaacccggcgagtttgtcgtgcaaagtctgcgcattatcattggccgcaatcggacaagtctggcgcagcagcatgtcgccggtatccaggcctgcatccatctgcatgatcgtgatgcccgtctcgctgtcacccgccagaatcgcgcgctgtattggtgcagcccccctccagcgcggtaacagcgaagcgtgaatattaaggcaaccgtaacgcggcagttccagcaccgcttttggcaagatcagcccgtaagccgcaacgaccatcacatcggctttaagggttgcaatctcttgctgaacctgttctgactttaaagttatcggttgtaaaacagtcaggccgtgttgcagagccaactgtttgaccgggctggcggcaagttgcatgccgcgacccgaaggccggtccggttgcgtcagtactgcgacgatttggtgttccttgagcaatgcctcaagggcgctggccgcaaagtgcggggtaccggcaaagataattttcacatttaacctaacgggcatggccaaagccacccctaaattcatggggcgcgccatcttccctcaccccaaccctttcccgcaaacgggcgggcggggcaagcgaattgctgcgcgaattattcgttacagtgcttcacgcctgcgctttttcagcttggcgcgcagtctggtttgtttgagttgtgacagatattcgacgaacaccttgccccgcaaatgatccatttcatgctggatacaaacagccaggaagccctcggcgtccagcgtaaaggcatcccctttttcattcagcgcacgcactgtcagtttgtcggcgcgcttcaccgtttcataaatacccggcacggacaggcagccttcttcactttctgttgcgccgctgatgcaaagaatttccgggttgataaacacccgcaattcgtcatgcgtctcggaaatatccaccacgatgatttgttcatgcacatccacctgggttgctgccaaaccgacacccggtgcagcatacatggtttcagccatatcccgcaccagcttacgggtagcctcattaacttgtgccaccttttttgcgatggtgtgcaagcgttcatcggggtactgcaaaatttgtaggattgccatagtgcttgctaatttaattgactggatgcagaatttggcgcaccacgctaacgccgtgcgtccttatcattgactcttccgggattctacatgcgcaagattatatcgctgatttgctttttattgcctgtcctggcttttgccggacagcctgaaaaccacccacagattcgcagtgatgccccagatcagtacactgtcgtcaaaggcgacacgctatgggacatatccgggaagtttttcaaagacccgtggagatggccttacatctggggcataaacaaagactccatcaaagatccacactggatttatccgggagaaagtatcatgctggaccgtgccagcggcacgttaagcatggggacaacgacgaacaacgtaatcaagctgtcaccgaaaatccgctcggaaatcggcatgcaagatgcaattccaagtatcccatccggcgttattgagccattcctgagccagcctctggttgtagcgggcgaagctctggctggtgcgccaaccctggttggactgcctgaagggcgggttatactcggctcaggcgatattgcctacgcaaagggattgactgaagatcaaggtaaaaaatggcaagtttatcgtcccggcaaaaccttcatagacccggatacccgggaaattcttggccacgaagccatttatctcggcggaaccgaagtcagagaatttgcggatgtcagcacggtcgttgtcacaagcgcgaaacaggaaatcaaattaggtgaccgtttggtcgtgcccgccgccgccatatctcgcaactatctgccacgcgcaccagagagccacattagtgccagcgtgatttcaatgcatggcggcgtttctcaagccgggcagaacacggttattaccctcaacaaaggtgaacgcgatggcttgcaaagcggccacgtactggctttgtacagcaagggcagtgtcgtgcgacatgaaggtaaaaacctgactatgcccgatgagcgctacggcttgctattcgtgttccgcgtattcgacaaggtttcctacgcactggtgatgcagacccgtctgcccgtgcaaatcctggatcacgctgtcacaccctgagggcgtgttacccacgttccacgtgaaacatgtccgttgatgcatcgctcaaatcctggctggcactcagtctgatacgaggcttgggtggcgaaggggcgcgtcgtctgctccaggaattcggttcacccgatgctattctgacaacgccgctcggctcgctcaacgctttcgtcaaagctgatgttgctgccgcaatcggcagaggcatcaccgatgatgtactcgcgcccaccttaaactggctggaagacggcctcaatcatatcgtcaccctcggcgatagcgactatccgcaggcgctgctcaacatcactgacccgccgctattgctgtacgtcaaagggcgacgcaacttgctcaatgcgaccgcactcgccatcgtcggcagtcgcaatgccacaccacaaggcaacaacaacgctgaggaattttcaaagtcattaagtaatgccggattgtgcatcatcagcggcatggcgcacggtatagatgccgccgcccatcgcggcgcattgcgcggactgagcagcagcatcgcggtggttggaacggggctggacaaagtttaccccgccgccaaccgtgatttggcccacactctcgctgcgcaaggcgcgttaatctcggaatttccgctcggcacaccacctgtcgccaccaatttcccgcgccgaaaccgcattatcagcggcatgagtatcggctgcctggtagtagaagcctcactgcaaagcggttcgctgatcaccgcacggctggccatggagcagggcagggacgtgttcgccattcccggctccatccattcaccgcaaagcaaaggctgccacgcattaatcaagcaaggcgccaaactggctgagtcggcgcaggatattctggaagagctggcattccaactgactttatcggcgcctctgccggaaacggcttttcaggaaaacgaagcagacgggctgctggatttaatcggcttcgatccggtgagcgtggacaccctttgtacacgcagcggcttgacggttagccagctatccgccatgctgttgccgcttgaactggaaggtcgtgttactgcactgcccggcggtttgttccaacgaattcactaaacaacacgcaaataatgtttgaaatcttaatgtacttgttcgaaagctatattgatgcgggtagctaccctgcaccggataagctatcgcgcaaactttctgccgccggcttcgaaggcgatgacatagacgaggcattgacctggttgtcggggttgcaactacagaattccgacaattatcctgccactctggagcatgccggaatgcgtttttttgccgaactggagttccaacgcctcgacgacgaagctcgtcaattcatcctgtttgccgagcaacagaacatgatttcggctgtggaacgcgaaattattattgaccgggccgtagccctccaacaaaagtccctcgggctggataagctcaaacttatcatgttgatcgtgctatggaatcgtcaccaggatctcagcccgctggtgatcgaagagttgctcacccccgtacattccacccaattacattgaacaccacgcatggcaattaatcttctgatcgtagaatcaccggccaaggccaagacactcaaaaaatatctgggtaatgatttcgaggtgcttgcctcttatgggcatgtgcgcgatctcgtacccaagagtggcgcggtggataccgaaaacggcttcgccatgaactacgaaaccatcgcacgcaacagccgccatatggatgcgattgcgaaggcggcggctggtgctgaaaacatcctgctggcgcccgatccagaccgcgaaggggaggcgattgcctggcatatcgccgagttactcaaggcaaaaagaggctttaaaaacaagaatatgaagcgcgtggtgttctatgaaatcacgcaatcagccgtgcgcgaagcggttgcccacccgcgtgaaattgccatgccgctggtcaatgcgcaacaagcccggcgcgcgctggattatctggttggctttaatttgtcgcccttgttgtggcgcaaaattcgccccggcttatcggcagggcgcgtacaaagccccgccttgcgtctgattgtcgagcgcgaactgcaaatcgaggccttcaccagccaggaatactggaccgtgcatctggacagccagaaggatcaccagccgttttccgcacgcctcatccagtatcagggcaaaaaacttgagcagctctcgattggcagtcaggccgaatacgacgcaatctacgcaaaactgaacgacgcaaaactgccacccaaagtggtacgcgtggaaaagaaagccaagcagcgctacgccgcagcaccgttcaccacctccacgctgcaacaggaagccgtgcgcaagctgggcatgtccgccgaacgcaccatgcgcaccgcgcaatcgctctatgaaggcgtggatgtcggcggtcagaccgtcggtctgatttcctatatgcgtaccgactcggtgacactggcaaaagaggccgtgcaggaaatccgcgactacgttcaggcaaatttttccggcgactatctgcccagctctccgccgacctataagagcaagaccaaaaacgcccaggaatcccacgaagcaattcgtccgacttccatcacccgcacaccggacagcttgcgcgaccgtctgaccgtcgatcaggcgcgcctgtatgaaatgatctggaagcgcacgctggcctgtcagatggctccggcgcgctacgacaccgtcagcgccgacatccgtctgggcggcgacgacacgctgttccgtgcgaatgggcaagttcttgtttttgcagggtttattagcgtttacatggaagacgtggacgatgccgaagaagagcagggcagcaaattgccgccgctggccgagggcgatatattgccgatagacaagctgttcggcgagcagcacttcacccagccgccaccgcgcttcactgaagccagcttggtcaaatcgctggaagaatacggcatcggtcgcccctcgacttatgccaccatcatctccacactgcaaacccgcgagtatgccgttctcgacaagaagcgcttcgtgcccaccgatgtgggtcgcgtcgtcacgcgtttcctcaccgatcatttcacccgctatgtcgattacaacttcactgcctcgctggaagacgaactggacgaggtttccgatggcaagcgtgactggatcggcgtactggatgaattctggaagggattttccggcctgatcaaggaaaagaccaacatcgaacgtccgcaggaattgctggatgaagcatgcccggaatgcggcaagccactggccaaaaaactcagccgctacggcagcttcatcagttgcaccaactatcctgaatgcaaatacaagcgcagcgtaggcggcgaaacacaggaagacgtgcgcatcgaactaggcgttcatcctgaaaccgcacaaaccgtactgttactgcgtggaccttacggtcactacgtacaactcggcgaagtggtggagggcgagaaagccaagcccaagcgcgtttcctggcccaaggaaatgctactggagcaggccgacctgaccagcgccctgaagctgctgtcgctgccgcgcgacctcggtttacatccggaaaccaacaaaaaagtcatcgtcaatatcggtcgcttcggtccttacatcggccatgacggcaaattcaaatccatcccgcgctccgacagcatcttcgacgtcacactggaacgtgcagccgaactgctggcgcaagccaaggatggcaacaccgtgttgcgcacgctgggcgatcacccggaagacaagaccacggtcgagatttgcagcggacgctacggcccttacgcacgccacggcaaggtcaacgccacgctgcccaaggatgtatcacccgacgagatcacgctggaacaggcgctggaactgatcgccgccaaagccgcaaaaggtgacaccgggaaaaagaccaccagaaaagcggcagcgaaacccaaggcagcagccaagcccaaagctgctgcgaaacctaaagccgcagccaaaccaaaaacggccacaaccaaaatcgctgctaggaaaacgactaaagcctaacgattttccgggaaatgtttcacgtgaaacatttcccggattcccccgctgacccgttgcgaatttcgcactgccttttctgccctcacttaccccttgccgcatcgctttcaacgcgttatagcgcgttttgagcaacctcctctgcaagctccgtatttattgacttacaggggcggcactcaaaaactccgtacccattcaattatttttgacgaaaaacgaacccgggatagaaatttccgcctctataaaagtaaacgcctcaccggacaaaatcacgcgctcgcctgccagttcacaaccaagatcaccgccgcgttttgaaacttgccgggcaattagtttggtcttgccaagtctctctgcccaataaggagtcaacgcgcagtgtgccgagtttgcgtcaggtgataggccatggcttacgttcgccggatgcaatctgtagcgtttacatcctcgatggcagggctgaaaaattaactggctttgtaccggaacgtttttccgccgcatggtcatcacgcaaaacgtatttggagggggcgaagaaagagctgattttgagcaagtccgaacgcgatcccgccgtccgtcgtgccgcactcaatcactatggtcgaaaatgtatggcgtgtagctttgtgccgcgcgtggatgcacaactagacgtgcatcatctcgacccgattaccgaaggtgttcgccgcaccaagcttgatgatgtggtcgttttctgtgcaaactgccaccgtctggctcacgccacccatcccccgttagcactcgccgagctaattgcgctactcaacgcaactatatgattatccttagataattaacaattaaattccctttagctaacggctttccctagtggcgagtttcgtttgcttcaaccgttgcggccggtaaaaacatctgggcggcatcaatcttatcgaattcgtagcgttgattgcaaaactcacagagcacttcgatgagttgtcgctcggtcagaatcgagtcaacttcttcagcgccaagcatcctcagcatctgcgctacgttgtcacgcgaacaggagcattgaaatacaatcggctgcacttcaaataagcgcacatcttcctcgttgaataagcggtgcagcaattcctgcgtaggcagatgcaacaactcgtcgttatgcaaagtttccgtcagctgggtgacccgcgaccacgcatcaacatcgctatcgtcctcagcctgttccggtagtttctgtagcagcatgcccgaagccgaatgctcatcggacaccagccacagccgggtatccaattgttcggagcgggtcatgtagttctgcaaaatctccgcaatactttcaccttccaacgcaacgatgccctgataagcttgcttgccactctttggggcaagcgtgataacgaagcgtccattgccgacgagatcagacaaactgccatgcaattcgccttcccacttcgccgtggcacgaagcttcaggtcgccgccgcattccaccaccaacaacttgattgcaccagtgccttgaatttgtaacaccagtgagccatccagtttcaaggttgctgccaacaacacggcagcggcagtcagttcgcccatcatctgacgcaacacgggcgggtattcttgatgagtaagcacgctgtgccaagcggcatccagatgcacccgttcaccacggatcggggcatgctcgaagagaaatcgttgtaaagaatcaggttcagttttcatagcggacgataatatcacgcaacggcatttgctcaagcgatccctcagatgcctggagagaagaagttttaagttgagattgtttaaatttttgcaggaaatacctcatgctatttgcaatttgtgaacctacgctttgcttttttgcgtattccacgcaaactggacagccagtccacggcaaagtggacagtcggagcgtagcgacgcgggggttgtggt

SEQ ID NO: 262 - DNA, 11577 bp, Artificial Sequence
  Synthetic Oligonucleotide
  misc_feature (1)..(5464): n is a, c, g, or t
nnnnnnnnnnnnnnnnnnnnnnnnnnnnnnnnnnnnnnnnnnnnnnnnnnnnnnnnnnnnnnnnnnnnnnnnnnnnnnnnnnnnnnnnnnnnnnnnnnnnnnnnnnnnnnnnnnnnnnnnnnnnnnnnnnnnnnnnnnnnnnnnnnnnnnnnnnnnnnnnnnnnnnnnnnnnnnnnnnnnnnnnnnnnnnnnnnnnnnnnnnnnnnnnnnnnnnnnnnnnnnnnnnnnnnnnnnnnnnnnnnnnnnnnnnnnnnnnnnnnnnnnnnnnnnnnnnnnnnnnnnnnnnnnnnnnnnnnnnnnnnnnnnnnnnnnnnnnnnnnnnnnnnnnnnnnnnnnnnnnnnnnnnnnnnnnnnnnnnnnnnnnnnnnnnnnnnnnnnnnnnnnnnnnnnnnnnnnnnnnnnnnnnnnnnnnnnnnnnnnnnnnnnnnnnnnnnnnnnnnnnnnnnnnnnnnnnnnnnnnnnnnnnnnnnnnnnnnnnnnnnnnnnnnnnnnnnnnnnnnnnnnnnnnnnnnnnnnnnnnnnnnnnnnnnnnnnnnnnnnnnnnnnnnnnnnnnnnnnnnnnnnnnnnnnnnnnnnnnnnnnnnnnnnnnnnnnnnnnnnnnnnnnnnnnnnnnnnnnnnnnnnnnnnnnnnnnnnnnnnnnnnnnnnnnnnnnnnnnnnnnnnnnnnnnnnnnnnnnnnnnnnnnnnnnnnnnnnnnnnnnnnnnnnnnnnnnnnnnnnnnnnnnnnnnnnnnnnnnnnnnnnnnnnnnnnnnnnnnnnnnnnnnnnnnnnnnnnnnnnnnnnnnnnnnnnnnnnnnnnnnnnnnnnnnnnnnnnnnnnnnnnnnnnnnnnnnnnnnnnnnnnnnnnnnnnnnnnnnnnnnnnnnnnnnnnnnnnnnnnnnnnnnnnnnnnnnnnnnnnnnnnnnnnnnnnnnnnnnnnnnnnnnnnnnnnnnnnnnnnnnnnnnnnnnnnnnnnnnnnnnnnnnnnnnnnnnnnnnnnnnnnnnnnnnnnnnnnnnnnnnnnnnnnnnnnnnnnnnnnnnnnnnnnnnnnnnnnnnnnnnnnnnnnnnnnnnnnnnnnnnnnnnnnnnnnnnnnnnnnnnnnnnnnnnnnnnnnnnnnnnnnnnnnnnnnnnnnnnnnnnnnnnnnnnnnnnnnnnnnnnnnnnnnnnnnnnnnnnnnnnnnnnnnnnnnnnnnnnnnnnnnnnnnnnnnnnnnnnnnnnnnnnnnnnnnnnnnnnnnnnnnnnnnnnnnnnnnnnnnnnnnnnnnnnnnnnnnnnnnnnnnnnnnnnnnnnnnnnnnnnnnnnnnnnnnnnnnnnnnnnnnnnnnnnnnnnnnnnnnnnnnnnnnnnnnnnnnnnnnnnnnnnnnnnnnnnnnnnnnnnnnnnnnnnnnnnnnnnnnnnnnnnnnnnnnnnnnnnnnnnnnnnnnnnnnnnnnnnnnnnnnnnnnnnnnnnnnnnnnnnnnnnnnnnnnnnnnnnnnnnnnnnnnnnnnnnnnnnnnnnnnnnnnnnnnnnnnnnnnnnnnnnnnnnnnnnnnnnnnnnnnnnnnnnnnnnnnnnnnnnnnnnnnnnnnnnnnnnnnnnnnnnnnnnnnnnnnnnnnnnnnnnnnnnnnnnnnnnnnnnnnnnnnnnnnnnnnnnnnnnnnnnnnnnnnnnnnnnnnnnnnnnnnnnnnnnnnnnnnnnnnnnnnnnnnnnnnnnnnnnnnnnnnnnnnnnnnnnnnnnnnnnnnnnnnnnnnnnnnnnnnnnnnnnnnnnnnnnnnnnnnnnnnnnnnnnnnnnnnnnnnnnnnnnnnnnnnnnnnnnnnnnnnnnnnnnnnnnnnnnnnnnnnnnnnnnnnnnnnnnnnnnnnnnnnnnnnnnnnnnnnnnnnnnnnnnnnnnnnnnnnnnnnnnnnnnnnnnnnnnnnnnnnnnnnnnnnnnnnnnnnnnnnnnnnnnnnnnnnnnnnnnnnnnnnnnnnnnnnnnnnnnnnnnnnnnnnnnnnnnnnnnnnnnnnnnnnnnnnnnnnnnnnnnnnnnnnnnnnnnnnnnnnnnnnnnnnnnnnnnnnnnnnnnnnnnnnnnnnnnnnnnnnnnnnnnnnnnnnnnnnnnnnnnnnnnnnnnnnnnnnnnnnnnnnnnnnnnnnnnnnnnnnnnnnnnnnnnnnnnnnnnnnnnnnnnnnnnnnnnnnnnnnnnnnnnnnnnnnnnnnnnnnnnnnnnnnnnnnnnnnnnnnnnnnnnnnnnnnnnnnnnnnnnnnnnnnnnnnnnnnnnnnnnnnnnnnnnnnnnnnnnnnnnnnnnnnnnnnnnnnnnnnnnnnnnnnnnnnnnnnnnnnnnnnnnnnnnnnnnnnnnnnnnnnnnnnnnnnnnnnnnnnnnnnnnnnnnnnnnnnnnnnnnnnnnnnnnnnnnnnnnnnnnnnnnnnnnnnnnnnnnnnnnnnnnnnnnnnnnnnnnnnnnnnnnnnnnnnnnnnnnnnnnnnnnnnnnnnnnnnnnnnnnnnnnnnnnnnnnnnnnnnnnnnnnnnnnnnnnnnnnnnnnnnnnnnnnnnnnnnnnnnnnnnnnnnnnnnnnnnnnnnnnnnnnnnnnnnnnnnnnnnnnnnnnnnnnnnnnnnnnnnnnnnnnnnnnnnnnnnnnnnnnnnnnnnnnnnnnnnnnnnnnnnnnnnnnnnnnnnnnnnnnnnnnnnnnnnnnnnnnnnnnnnnnnnnnnnnnnnnnnnnnnnnnnnnnnnnnnnnnnnnnnnnnnnnnnnnnnnnnnnnnnnnnnnnnnnnnnnnnnnnnnnnnnnnnnnnnnnnnnnnnnnnnnnnnnnnnnnnnnnnnnnnnnnnnnnnnnnnnnnnnnnnnnnnnnnnnnnnnnnnnnnnnnnnnnnnnnnnnnnnnnnnnnnnnnnnnnnnnnnnnnnnnnnnnnnnnnnnnnnnnnnnnnnnnnnnnnnnnnnnnnnnnnnnnnnnnnnnnnnnnnnnnnnnnnnnnnnnnnnnnnnnnnnnnnnnnnnnnnnnnnnnnnnnnnnnnnnnnnnnnnnnnnnnnnnnnnnnnnnnnnnnnnnnnnnnnnnnnnnnnnnnnnnnnnnnnnnnnnnnnnnnnnnnnnnnnnnnnnnnnnnnnnnnnnnnnnnnnnnnnnnnnnnnnnnnnnnnnnnnnnnnnnnnnnnnnnnnnnnnnnnnnnnnnnnnnnnnnnnnnnnnnnnnnnnnnnnnnnnnnnnnnnnnnnnnnnnnnnnnnnnnnnnnnnnnnnnnnnnnnnnnnnnnnnnnnnnnnnnnnnnnnnnnnnnnnnnnnnnnnnnnnnnnnnnnnnnnnnnnnnnnnnnnnnnnnnnnnnnnnnnnnnnnnnnnnnnnnnnnnnnnnnnnnnnnnnnnnnnnnnnnnnnnnnnnnnnnnnnnnnnnnnnnnnnnnnnnnnnnnnnnnnnnnnnnnnnnnnnnnnnnnnnnnnnnnnnnnnnnnnnnnnnnnnnnnnnnnnnnnnnnnnnnnnnnnnnnnnnnnnnnnnnnnnnnnnnnnnnnnnnnnnnnnnnnnnnnnnnnnnnnnnnnnnnnnnnnnnnnnnnnnnnnnnnnnnnnnnnnnnnnnnnnnnnnnnnnnnnnnnnnnnnnnnnnnnnnnnnnnnnnnnnnnnnnnnnnnnnnnnnnnnnnnnnnnnnnnnnnnnnnnnnnnnnnnnnnnnnnnnnnnnnnnnnnnnnnnnnnnnnnnnnnnnnnnnnnnnnnnnnnnnnnnnnnnnnnnnnnnnnnnnnnnnnnnnnnnnnnnnnnnnnnnnnnnnnnnnnnnnnnnnnnnnnnnnnnnnnnnnnnnnnnnnnnnnnnnnnnnnnnnnnnnnnnnnnnnnnnnnnnnnnnnnnnnnnnnnnnnnnnnnnnnnnnnnnnnnnnnnnnnnnnnnnnnnnnnnnnnnnnnnnnnnnnnnnnnnnnnnnnnnnnnnnnnnnnnnnnnnnnnnnnnnnnnnnnnnnnnnnnnnnnnnnnnnnnnnnnnnnnnnnnnnnnnnnnnnnnnnnnnnnnnnnnnnnnnnnnnnnnnnnnnnnnnnnnnnnnnnnnnnnnnnnnnnnnnnnnnnnnnnnnnnnnnnnnnnnnnnnnnnnnnnnnnnnnnnnnnnnnnnnnnnnnnnnnnnnnnnnnnnnnnnnnnnnnnnnnnnnnnnnnnnnnnnnnnnnnnnnnnnnnnnnnnnnnnnnnnnnnnnnnnnnnnnnnnnnnnnnnnnnnnnnnnnnnnnnnnnnnnnnnnnnnnnnnnnnnnnnnnnnnnnnnnnnnnnnnnnnnnnnnnnnnnnnnnnnnnnnnnnnnnnnnnnnnnnnnnnnnnnnnnnnnnnnnnnnnnnnnnnnnnnnnnnnnnnnnnnnnnnnnnnnnnnnnnnnnnnnnnnnnnnnnnnnnnnnnnnnnnnnnnnnnnnnnnnnnnnnnnnnnnnnnnnnnnnnnnnnnnnnnnnnnnnnnnnnnnnnnnnnnnnnnnnnnnnnnnnnnnnnnnnnnnnnnnnnnnnnnnnnnnnnnnnnnnnnnnnnnnnnnnnnnnnnnnnnnnnnnnnnnnnnnnnnnnnnnnnnnnnnnnnnnnnnnnnnnnnnnnnnnnnnnnnnnnnnnnnnnnnnnnnnnnnnnnnnnnnnnnnnnnnnnnnnnnnnnnnnnnnnnnnnnnnnnnnnnnnnnnnnnnnnnnnnnnnnnnnnnnnnnnnnnnnnnnnnnnnnnnnnnnnnnnnnnnnnnnnnnnnnnnnnnnnnnnnnnnnnnnnnnnnnnnnnnnnnnnnnnnnnnnnnnnnnnnnnnnnnnnnnnnnnnnnnnnnnnnnnnnnnnnnnnnnnnnnnnnnnnnnnnnnnnnnnnnnnnnnnnnnnnnnnnnnnnnnnnnnnnnnnnnnnnnnnnnnnnnnnnnnnnnnnnnnnnnnnnnnnnnnnnnnnnnnnnnnnnnnnnnnnnnnnnnnnnnnnnnnnnnnnnnnnnnnnnnnnnnnnnnnnnnnnnnnnnnnnnnnnnnnnnnnnnnnnnnnnnnnnnnnnnnnnnnnnnnnnnnnnnnnnnnnnnnnnnnnnnnnnnnnnnnnnnnnnnnnnnnnnnnnnnnnnnnnnnnnnnnnnnnnnnnnnnnnnnnnnnnnnnnnnnnnnnnnnnnnnnnnnnnnnnnnnnnnnnnnnnnnnnnnnnnnnnnnnnnnnnnnnnnnnnnnnnnnnnnnnnnnnnnnnnnnnnnnnnnnnnnnnnnnnnnnnnnnnnnnnnnnnnnnnnnnnnnnnnnnnnnnnnnnnnnnnnnnnnnnnnnnnnnnnnnnnnnnnnnnnnnnnnnnnnnnnnnnnnnnnnnnnnnnnnnnnnnnnnnnnnnnnnnnnnnnnnnnnnnnnnnnnnnnnnnnnnnnnnnnnnnnnnnnnnnnnnnnnnnnnnnnnnnnnnnnnnnnnnnnnnnnnnnnnnnnnnnnnnnnnnnnnnnnnnnnnnnnnnnnnnnnnnnnnnnnnnnnnnnnnnnnnnnnnnnnnnnnnnnnnnnnnnnnnnnnnnnnnnnnnnnnnnnnnnnnnnnnnnnnnnnnnnnnnnnnnnnnnnnnnnnnnnnnnnnnnnnnngaccccgacacagacgccgtcatcatgatcggcgaaatcggtggtcccgatgaagccgaagccgcccgttggtgcaaagaaaacatgaagaagccagtggtcggctttatcgctggtgtgaccgcaccggctggtaagcgcatgggccatgcgggtgccttaatctctggtggtgaagacaccgctgaggccaagctggccatcatggaagcttgcggtttcaccgtgacccgcaacccgtccgaaatgggtaagctgctgaagcgcttgctgtaaaccggatcggcagcgtcagcatgccgctggcgcgtgttcgtgcaaaaatggcaacgtgttccatgcgttgccattttttttgatacgttcaatcgaaagaaaataaccggtgcttgagtttttaacccctgaattctggatcgcggtgggtcaaattatcttgattgatattttgctcggcggcgataacgcggttgtcatcgctttggcctgtcgacagctgcctgaaaaccagcgcatgcagggcatcatgtggggcactgtgggcgcgattggtttgcgggtgttgcttatcgtttttgcgctaacacttctgaccatcccttatctgaaaatcgttggcggtttgttgctggtgtggattggtgtgaagctcatgatccccgatgaggaaggagaccatagcgtcgtcgatgccagtgacaagctctggtcagccgtcaaaacagtcatcttggccgacttggtcatgagcatcgacaacgtcatggccattgctggcgccgcgcagggtgctgccgagcatcaacaagtgccgctggtaatttttggcctgctggtcagcgtgcccatcatcgtatggggcagtcaattggttttgaaaatcatggacagcatgcccattgtcatcaccttgggtgcaatgttgttgggctggattgccggcatcatgatttggaccgacccggtgctggtcgatgtgctgccgtctgagcccctgatgggtttgtctttgcgccattgggcggggtttgtcggtgcttgcttggtgtgggtgattggtcgtgcggtcatcgcaaagcgccctaaacccttaggggcttgacgttatctctgagcgccttagataccgtgcatcgttggttcaactttggaaacaacccggacactcattcatgcaactttccagcaaccgtaaccttggcttcaccttgattgaattgatggtggtggtggccgtggtgggcatcttggctgcagtggccattccgcaatatcaaaactacacccaacgcgcgcggtgggccgccaacctcggcgccattgccgcgttacagggtacggtcagtgagtgcctcggccaacaagccaacgacatcacgttatgcgacacgtttggcgaacttggggtcaccagtggcctgaataccgacggcgtcatgccgttgccccatggcacggttgccgtgcaagccagcggtgatgccaccgcgattcgggttgttttaacgggcgctgccaatgcgggtaattgcatcatcacagccagcttgacgcccgcagaaggagcccaaatgctgcaatgggccctcacgcgggacaccacacaaactaaatgtaccgctgccaacacgggcgttgacgcagcaggctgattcgggcgtaagatgcggctttaatttttggagcccagcatggcaaaaggtcagcaaaaaacaaacaaggaatccaaaaagcccaagaaggccgccgccgccgccgcccctgctttgaacagtgcgcaagaacccgtgcgtgccgtggtcaccacatccgtgatgcccaaaggcaaggctaaaaataaaccggccttctaatatttattagctatttattttaaaaattaaacaataaaagagtacttattgactattatgttgtgaagtaatcgacttgccttccgcaagccgttgattcacacatggggcaggctctgcaaacattcactcgacgggcgacgctcaaaaccccggtcatcatgcgggggtacctcacgcttgatgcactgctgatggcggagttggtcactggcgacgtctcgcacttactcaagcgagatgcgcagttgtactacgccagcgccgcctttttggtggacccgcttgaggaaaagcaaaaggcatcatttgttgccagcatgcggcccgagcaccacccggagctccgcgagctcatcgcccccaacacgcacacacccaacgcgccaccgcttttgcacacgcatcggtcgcgtggcaatgtcaacgacgtggcaattggacgcgctcgccgcaaagaagcgggcaacatcctcaaccaatacgtggcccacgccgctgcagccgtcgagtggtatgccaccggccatgccgagcaggtctggcaggttgtgcaagacatcgcatttattggcaaaaagcgatcagcgggctacggcgaaatcgacgcatggcaggtgatccccggccaccttgatggcctcaccgatgacttcggagagcccttgcgccccgtgccggttgagcgatggccaacctccgcgacgcttattccctccgaggccgcatggtgcgccccgtattgggatattcgaaaccgaaccaaatgctacacgccggagccacgatgaacggcgccgacttcttaatgcaacacatcggttatcggttattgccgaaagcgatgcacaccggcgatgccgtcaccgatgccaacgcgctattcagcatcagtttgcccctacacaccggaaaaacactccggctttccagttgctggtgggtgatcacacccgatgcaacgtacaccagctttaaggccatccccgagaccggcgccattcaggggcagttgcggcaggccgtcatcttgtcatccctaaaaacgggattgcccctcttgatcctcgcgattggcaagagccccatgtacgcacgcgacctctttgtgacctacgacccacgcgcaacgcgctattgcagcgatcgcagtttgcgcaccgttgattcaactctggagaagtggtggacaccttaatcagcaagcccatccagctgtgcggctatgcgctgcaccgcttggttgcgcaacatcaaaacggtgcgccagcgctctggcgtgacgagggtgacaccgtgcgaattcgctcgcgtgacgcctgtccgcccacctacgtcgcagggcaactgttgggctttgtcacattggcgtgtgtgtcgtttggtagcaaacaccggtacctgccggtcgccgattggcgtggtcgcaaagcgtggctggaggcacagggcatcaaacacggtttcgaggtggttggggtgcacgcccagggtggcatgcaaaccgtgaccacccatgacggtcgccacttcaccattgatgccacgcaattcacgggcttgctgcgcgtcacccagcctgcgccattcaacgactgtctgctcaatggcatcggcaaagtaggtaaagcctttggcctcaacttactcgtcgttcattaacccaacgcttaaaaacgcttatccggagttcaccaccatgcaagacgttcgcatcgatatcgccatcaatacgattcaacccatcaccttcacccatcacggcatcgacgggttgcccaccatggctcgcggcgttgacatggagggtcatcccctgcgcaccgtttacattccagccgcgcagtttcgcggtcggctaaggcatgaggcggcgttggcaaaaatgcgtaccgcacacggccccatcaagttggcggaagcctacatgctggccttggggcaaaacatcgacaccaaagaagacgaggctgatgagaaagtgcggttgggcgagctactcgctttacgggcggccaaccccttcattgatctcttcggaacgtggcgcatggacagccggctttacgtgtcgcacctgatgccggtcgtcaacgtcaagcccgacacctttcaccacatccgccgcgatctagacaccaacgacgcgttgtttgccgagttatcccaagccgaaatcgacgtcttttacgaaaggcaagacggacagtcgcaagcctctcaagcggagagtctgattaaggtggccacccgcgaactgcgcaaagccaaaaaagaaaacgacctcgccaaatgcgacgagttcgaagccaagatcgaagaactcaaagccctcaagaaggcgcacaaagccggtgacgaatcgggaaacaccaaacacttggtggcgatggaggccgtccctgcgggaattcaattgttgtgcaaactcatcataaagcgggccacgccgctcgacctcagcatgctcacgggtgcgcttaacgcgatcagcgaattccccatgatgggtgcccagcgggcccgtggctgaggcaaggtgagtggcgccgcaaccgtctgccacacccagggtgaggtgttggcgcaaatcgccttcggtggttttttgccagctgcactggagtggaccgatgcgggcaccgcgttcatgactggcctcgaaacggttgccgtcgccgcgtgaaaggcccttaccgcagcccacagcaggcgcaatacgccaagctcatcgagcgcgctgtcagcaaacccggtgcgcccctgttggcgggtgctgcgcccgggctcggtaagacacacggctacgccatcccgttgttgtgcagtggcaaaaaagttgccatcgccatgagcacgcgccaactgatcgatcaatttatagcgagcgatgcactcgccgctgcgcaagccgcactagaggccgaggggcggcccgctgccaccgttgtcgccttgcaaccccgccgtcaatttgaaacggcggtggcctacagcgcgcacaaaacggcggcgcttgatgccgacgtcttggtgctcacacacatgggcgtgctcatcgatacccacatcccagcctacgcccagctgcgtcagcgcgctgtcttgttgtttgacgaagccgatcttttggccgatgccgccgacttgcgcagcacctatcgcattgaggctgaggccttagcccgcgcaggcgtcgaaaacgccacaccgacaaaggcggttgaaaccatcattaaaaaatccgatgaccccgaggaaaaagcagtcgccacagccatccaacgcgctttggcagagccggcttggtacaaagtgatcggtaaagaagacaacggcgatttggtgctgacccaccgcatgccggggcgcatgttgcgcaccctcatcaatgacatgccgcggtgcattttcaccagtggcaccctcacggtatcggggcgttttgaccactttgtcaaagccatcggcctgaccgcagtggcacccgaaagccagcacattgaccccgtgcaacacggccaactgcgcgttgaggtggccagtgaggccctcaccccagaagcacaagccgaacgcatcatgcacgcggcgacaccggtattggtgctgaccaccagccacgcgactacggcggcgttgggctctttgtgccccggtgccatctgccgcgcacccggtgaagccctcatggatgcggtggcgcgatgccctgatgatggcatcttgatcgccgctggcgcctggtctggcctcgatgcgccgcgcctgcggtggcaaaccgtggtcatccccaaaacaccgtacggcaaaccactcatccttgacgcccagcagataagcgcttacgtggacagcaaggttgttgccatcaggcgcaccaaccaagggttacaccgtgggctgcgcaccatcgatgccacttgcaccttgctgttactcgatccgtacagccgtcgtgccgatttacgccaagccattccccgtcgtttctgggtggattgggacagcgtggccgagggctcgctggttttgcgcacacacttcgtccgtgaacgaaaaaaaggtctgcgtgtagaaaccctgcgtcggcgcgggcagcactgcgaacaccccggctgcacgattacccaagaaaattggctggaggtgcaccacctgaacccgattgccaacggcccccgcggcacaggtgccgatgacctgcgggtactttgtaaacatcaccacgtggatgcccaccaagccatgcgagaagca

SEQ ID NO: 263 - DNA, 11544 bp, Artificial Sequence
  Synthetic Oligonucleotide
  misc_feature (1)..(7488): n is a, c, g, or t
nnnnnnnnnnnnnnnnnnnnnnnnnnnnnnnnnnnnnnnnnnnnnnnnnnnnnnnnnnnnnnnnnnnnnnnnnnnnnnnnnnnnnnnnnnnnnnnnnnnnnnnnnnnnnnnnnnnnnnnnnnnnnnnnnnnnnnnnnnnnnnnnnnnnnnnnnnnnnnnnnnnnnnnnnnnnnnnnnnnnnnnnnnnnnnnnnnnnnnnnnnnnnnnnnnnnnnnnnnnnnnnnnnnnnnnnnnnnnnnnnnnnnnnnnnnnnnnnnnnnnnnnnnnnnnnnnnnnnnnnnnnnnnnnnnnnnnnnnnnnnnnnnnnnnnnnnnnnnnnnnnnnnnnnnnnnnnnnnnnnnnnnnnnnnnnnnnnnnnnnnnnnnnnnnnnnnnnnnnnnnnnnnnnnnnnnnnnnnnnnnnnnnnnnnnnnnnnnnnnnnnnnnnnnnnnnnnnnnnnnnnnnnnnnnnnnnnnnnnnnnnnnnnnnnnnnnnnnnnnnnnnnnnnnnnnnnnnnnnnnnnnnnnnnnnnnnnnnnnnnnnnnnnnnnnnnnnnnnnnnnnnnnnnnnnnnnnnnnnnnnnnnnnnnnnnnnnnnnnnnnnnnnnnnnnnnnnnnnnnnnnnnnnnnnnnnnnnnnnnnnnnnnnnnnnnnnnnnnnnnnnnnnnnnnnnnnnnnnnnnnnnnnnnnnnnnnnnnnnnnnnnnnnnnnnnnnnnnnnnnnnnnnnnnnnnnnnnnnnnnnnnnnnnnnnnnnnnnnnnnnnnnnnnnnnnnnnnnnnnnnnnnnnnnnnnnnnnnnnnnnnnnnnnnnnnnnnnnnnnnnnnnnnnnnnnnnnnnnnnnnnnnnnnnnnnnnnnnnnnnnnnnnnnnnnnnnnnnnnnnnnnnnnnnnnnnnnnnnnnnnnnnnnnnnnnnnnnnnnnnnnnnnnnnnnnnnnnnnnnnnnnnnnnnnnnnnnnnnnnnnnnnnnnnnnnnnnnnnnnnnnnnnnnnnnnnnnnnnnnnnnnnnnnnnnnnnnnnnnnnnnnnnnnnnnnnnnnnnnnnnnnnnnnnnnnnnnnnnnnnnnnnnnnnnnnnnnnnnnnnnnnnnnnnnnnnnnnnnnnnnnnnnnnnnnnnnnnnnnnnnnnnnnnnnnnnnnnnnnnnnnnnnnnnnnnnnnnnnnnnnnnnnnnnnnnnnnnnnnnnnnnnnnnnnnnnnnnnnnnnnnnnnnnnnnnnnnnnnnnnnnnnnnnnnnnnnnnnnnnnnnnnnnnnnnnnnnnnnnnnnnnnnnnnnnnnnnnnnnnnnnnnnnnnnnnnnnnnnnnnnnnnnnnnnnnnnnnnnnnnnnnnnnnnnnnnnnnnnnnnnnnnnnnnnnnnnnnnnnnnnnnnnnnnnnnnnnnnnnnnnnnnnnnnnnnnnnnnnnnnnnnnnnnnnnnnnnnnnnnnnnnnnnnnnnnnnnnnnnnnnnnnnnnnnnnnnnnnnnnnnnnnnnnnnnnnnnnnnnnnnnnnnnnnnnnnnnnnnnnnnnnnnnnnnnnnnnnnnnnnnnnnnnnnnnnnnnnnnnnnnnnnnnnnnnnnnnnnnnnnnnnnnnnnnnnnnnnnnnnnnnnnnnnnnnnnnnnnnnnnnnnnnnnnnnnnnnnnnnnnnnnnnnnnnnnnnnnnnnnnnnnnnnnnnnnnnnnnnnnnnnnnnnnnnnnnnnnnnnnnnnnnnnnnnnnnnnnnnnnnnnnnnnnnnnnnnnnnnnnnnnnnnnnnnnnnnnnnnnnnnnnnnnnnnnnnnnnnnnnnnnnnnnnnnnnnnnnnnnnnnnnnnnnnnnnnnnnnnnnnnnnnnnnnnnnnnnnnnnnnnnnnnnnnnnnnnnnnnnnnnnnnnnnnnnnnnnnnnnnnnnnnnnnnnnnnnnnnnnnnnnnnnnnnnnnnnnnnnnnnnnnnnnnnnnnnnnnnnnnnnnnnnnnnnnnnnnnnnnnnnnnnnnnnnnnnnnnnnnnnnnnnnnnnnnnnnnnnnnnnnnnnnnnnnnnnnnnnnnnnnnnnnnnnnnnnnnnnnnnnnnnnnnnnnnnnnnnnnnnnnnnnnnnnnnnnnnnnnnnnnnnnnnnnnnnnnnnnnnnnnnnnnnnnnnnnnnnnnnnnnnnnnnnnnnnnnnnnnnnnnnnnnnnnnnnnnnnnnnnnnnnnnnnnnnnnnnnnnnnnnnnnnnnnnnnnnnnnnnnnnnnnnnnnnnnnnnnnnnnnnnnnnnnnnnnnnnnnnnnnnnnnnnnnnnnnnnnnnnnnnnnnnnnnnnnnnnnnnnnnnnnnnnnnnnnnnnnnnnnnnnnnnnnnnnnnnnnnnnnnnnnnnnnnnnnnnnnnnnnnnnnnnnnnnnnnnnnnnnnnnnnnnnnnnnnnnnnnnnnnnnnnnnnnnnnnnnnnnnnnnnnnnnnnnnnnnnnnnnnnnnnnnnnnnnnnnnnnnnnnnnnnnnnnnnnnnnnnnnnnnnnnnnnnnnnnnnnnnnnnnnnnnnnnnnnnnnnnnnnnnnnnnnnnnnnnnnnnnnnnnnnnnnnnnnnnnnnnnnnnnnnnnnnnnnnnnnnnnnnnnnnnnnnnnnnnnnnnnnnnnnnnnnnnnnnnnnnnnnnnnnnnnnnnnnnnnnnnnnnnnnnnnnnnnnnnnnnnnnnnnnnnnnnnnnnnnnnnnnnnnnnnnnnnnnnnnnnnnnnnnnnnnnnnnnnnnnnnnnnnnnnnnnnnnnnnnnnnnnnnnnnnnnnnnnnnnnnnnnnnnnnnnnnnnnnnnnnnnnnnnnnnnnnnnnnnnnnnnnnnnnnnnnnnnnnnnnnnnnnnnnnnnnnnnnnnnnnnnnnnnnnnnnnnnnnnnnnnnnnnnnnnnnnnnnnnnnnnnnnnnnnnnnnnnnnnnnnnnnnnnnnnnnnnnnnnnnnnnnnnnnnnnnnnnnnnnnnnnnnnnnnnnnnnnnnnnnnnnnnnnnnnnnnnnnnnnnnnnnnnnnnnnnnnnnnnnnnnnnnnnnnnnnnnnnnnnnnnnnnnnnnnnnnnnnnnnnnnnnnnnnnnnnnnnnnnnnnnnnnnnnnnnnnnnnnnnnnnnnnnnnnnnnnnnnnnnnnnnnnnnnnnnnnnnnnnnnnnnnnnnnnnnnnnnnnnnnnnnnnnnnnnnnnnnnnnnnnnnnnnnnnnnnnnnnnnnnnnnnnnnnnnnnnnnnnnnnnnnnnnnnnnnnnnnnnnnnnnnnnnnnnnnnnnnnnnnnnnnnnnnnnnnnnnnnnnnnnnnnnnnnnnnnnnnnnnnnnnnnnnnnnnnnnnnnnnnnnnnnnnnnnnnnnnnnnnnnnnnnnnnnnnnnnnnnnnnnnnnnnnnnnnnnnnnnnnnnnnnnnnnnnnnnnnnnnnnnnnnnnnnnnnnnnnnnnnnnnnnnnnnnnnnnnnnnnnnnnnnnnnnnnnnnnnnnnnnnnnnnnnnnnnnnnnnnnnnnnnnnnnnnnnnnnnnnnnnnnnnnnnnnnnnnnnnnnnnnnnnnnnnnnnnnnnnnnnnnnnnnnnnnnnnnnnnnnnnnnnnnnnnnnnnnnnnnnnnnnnnnnnnnnnnnnnnnnnnnnnnnnnnnnnnnnnnnnnnnnnnnnnnnnnnnnnnnnnnnnnnnnnnnnnnnnnnnnnnnnnnnnnnnnnnnnnnnnnnnnnnnnnnnnnnnnnnnnnnnnnnnnnnnnnnnnnnnnnnnnnnnnnnnnnnnnnnnnnnnnnnnnnnnnnnnnnnnnnnnnnnnnnnnnnnnnnnnnnnnnnnnnnnnnnnnnnnnnnnnnnnnnnnnnnnnnnnnnnnnnnnnnnnnnnnnnnnnnnnnnnnnnnnnnnnnnnnnnnnnnnnnnnnnnnnnnnnnnnnnnnnnnnnnnnnnnnnnnnnnnnnnnnnnnnnnnnnnnnnnnnnnnnnnnnnnnnnnnnnnnnnnnnnnnnnnnnnnnnnnnnnnnnnnnnnnnnnnnnnnnnnnnnnnnnnnnnnnnnnnnnnnnnnnnnnnnnnnnnnnnnnnnnnnnnnnnnnnnnnnnnnnnnnnnnnnnnnnnnnnnnnnnnnnnnnnnnnnnnnnnnnnnnnnnnnnnnnnnnnnnnnnnnnnnnnnnnnnnnnnnnnnnnnnnnnnnnnnnnnnnnnnnnnnnnnnnnnnnnnnnnnnnnnnnnnnnnnnnnnnnnnnnnnnnnnnnnnnnnnnnnnnnnnnnnnnnnnnnnnnnnnnnnnnnnnnnnnnnnnnnnnnnnnnnnnnnnnnnnnnnnnnnnnnnnnnnnnnnnnnnnnnnnnnnnnnnnnnnnnnnnnnnnnnnnnnnnnnnnnnnnnnnnnnnnnnnnnnnnnnnnnnnnnnnnnnnnnnnnnnnnnnnnnnnnnnnnnnnnnnnnnnnnnnnnnnnnnnnnnnnnnnnnnnnnnnnnnnnnnnnnnnnnnnnnnnnnnnnnnnnnnnnnnnnnnnnnnnnnnnnnnnnnnnnnnnnnnnnnnnnnnnnnnnnnnnnnnnnnnnnnnnnnnnnnnnnnnnnnnnnnnnnnnnnnnnnnnnnnnnnnnnnnnnnnnnnnnnnnnnnnnnnnnnnnnnnnnnnnnnnnnnnnnnnnnnnnnnnnnnnnnnnnnnnnnnnnnnnnnnnnnnnnnnnnnnnnnnnnnnnnnnnnnnnnnnnnnnnnnnnnnnnnnnnnnnnnnnnnnnnnnnnnnnnnnnnnnnnnnnnnnnnnnnnnnnnnnnnnnnnnnnnnnnnnnnnnnnnnnnnnnnnnnnnnnnnnnnnnnnnnnnnnnnnnnnnnnnnnnnnnnnnnnnnnnnnnnnnnnnnnnnnnnnnnnnnnnnnnnnnnnnnnnnnnnnnnnnnnnnnnnnnnnnnnnnnnnnnnnnnnnnnnnnnnnnnnnnnnnnnnnnnnnnnnnnnnnnnnnnnnnnnnnnnnnnnnnnnnnnnnnnnnnnnnnnnnnnnnnnnnnnnnnnnnnnnnnnnnnnnnnnnnnnnnnnnnnnnnnnnnnnnnnnnnnnnnnnnnnnnnnnnnnnnnnnnnnnnnnnnnnnnnnnnnnnnnnnnnnnnnnnnnnnnnnnnnnnnnnnnnnnnnnnnnnnnnnnnnnnnnnnnnnnnnnnnnnnnnnnnnnnnnnnnnnnnnnnnnnnnnnnnnnnnnnnnnnnnnnnnnnnnnnnnnnnnnnnnnnnnnnnnnnnnnnnnnnnnnnnnnnnnnnnnnnnnnnnnnnnnnnnnnnnnnnnnnnnnnnnnnnnnnnnnnnnnnnnnnnnnnnnnnnnnnnnnnnnnnnnnnnnnnnnnnnnnnnnnnnnnnnnnnnnnnnnnnnnnnnnnnnnnnnnnnnnnnnnnnnnnnnnnnnnnnnnnnnnnnnnnnnnnnnnnnnnnnnnnnnnnnnnnnnnnnnnnnnnnnnnnnnnnnnnnnnnnnnnnnnnnnnnnnnnnnnnnnnnnnnnnnnnnnnnnnnnnnnnnnnnnnnnnnnnnnnnnnnnnnnnnnnnnnnnnnnnnnnnnnnnnnnnnnnnnnnnnnnnnnnnnnnnnnnnnnnnnnnnnnnnnnnnnnnnnnnnnnnnnnnnnnnnnnnnnnnnnnnnnnnnnnnnnnnnnnnnnnnnnnnnnnnnnnnnnnnnnnnnnnnnnnnnnnnnnnnnnnnnnnnnnnnnnnnnnnnnnnnnnnnnnnnnnnnnnnnnnnnnnnnnnnnnnnnnnnnnnnnnnnnnnnnnnnnnnnnnnnnnnnnnnnnnnnnnnnnnnnnnnnnnnnnnnnnnnnnnnnnnnnnnnnnnnnnnnnnnnnnnnnnnnnnnnnnnnnnnnnnnnnnnnnnnnnnnnnnnnnnnnnnnnnnnnnnnnnnnnnnnnnnnnnnnnnnnnnnnnnnnnnnnnnnnnnnnnnnnnnnnnnnnnnnnnnnnnnnnnnnnnnnnnnnnnnnnnnnnnnnnnnnnnnnnnnnnnnnnnnnnnnnnnnnnnnnnnnnnnnnnnnnnnnnnnnnnnnnnnnnnnnnnnnnnnnnnnnnnnnnnnnnnnnnnnnnnnnnnnnnnnnnnnnnnnnnnnnnnnnnnnnnnnnnnnnnnnnnnnnnnnnnnnnnnnnnnnnnnnnnnnnnnnnnnnnnnnnnnnnnnnnnnnnnnnnnnnnnnnnnnnnnnnnnnnnnnnnnnnnnnnnnnnnnnnnnnnnnnnnnnnnnnnnnnnnnnnnnnnnnnnnnnnnnnnnnnnnnnnnnnnnnnnnnnnnnnnnnnnnnnnnnnnnnnnnnnnnnnnnnnnnnnnnnnnnnnnnnnnnnnnnnnnnnnnnnnnnnnnnnnnnnnnnnnnnnnnnnnnnnnnnnnnnnnnnnnnnnnnnnnnnnnnnnnnnnnnnnnnnnnnnnnnnnnnnnnnnnnnnnnnnnnnnnnnnnnnnnnnnnnnnnnnnnnnnnnnnnnnnnnnnnnnnnnnnnnnnnnnnnnnnnnnnnnnnnnnnnnnnnnnnnnnnnnnnnnnnnnnnnnnnnnnnnnnnnnnnnnnnnnnnnnnnnnnnnnnnnnnnnnnnnnnnnnnnnnnnnnnnnnnnnnnnnnnnnnnnnnnnnnnnnnnnnnnnnnnnnnnnnnnnnnnnnnnnnnnnnnnnnnnnnnnnnnnnnnnnnnnnnnnnnnnnnnnnnnnnnnnnnnnnnnnnnnnnnnnnnnnnnnnnnnnnnnnnnnnnnnnnnnnnnnnnnnnnnnnnnnnnnnnnnnnnnnnnnnnnnnnnnnnnnnnnnnnnnnnnnnnnnnnnnnnnnnnnnnnnnnnnnnnnnnnnnnnnnnnnnnnnnnnnnnnnnnnnnnnnnnnnnnnnnnnnnnnnnnnnnnnnnnnnnnnnnnnnnnnnnnnnnnnnnnnnnnnnnnnnnnnnnnnnnnnnnnnnnnnnnnnnnnnnnnnnnnnnnnnnnnnnnnnnnnnnnnnnnnnnnnnnnnnnnnnnnnnnnnnnnnnnnnnnnnnnnnnnnnnnnnnnnnnnnnnnnnnnnnnnnnnnnnnnnnnnnnnnnnnnnnnnnnnnnnnnnnnnnnnnnnnnnnnnnnnnnnnnnnnnnnnnnnnnnnnnnnnnnnnnnnnnnnnnnnnnnnnnnnnnnnnnnnnnnnnnnnnnnnnnnnnnnnnnnnnnnnnnnnnnnnnnnnnnnnnnnnnnnnnnnnnnnnnnnnnnnnnnnnnnnnnnnnnnnnnnnnnnnnnnnnnnnnnnnnnnnnnnnnnnnnnnnnnnnnnnnnnnnnnnnnnnnnnnnnnnnnnnnnnnnnnnnnnnnnnnnnnnnnnnnnnnnnnnnnnnnnnnnnnnnnnnnnnnnnnnnnnnnnnnnnnnnnnnnnnnnnnnnnnnnnnnnnnnnnnnnnnnnnnnnnnnnnnnnnnnnnnnnnnnnnnnnnnnnnnnnnnnnnnnnnnnnnnnnnnnnnnnnnnnnnnnnnnnnnnnnnnnnnnnnnnnnnnnnnnnnnnnnnnnnnnnnnnnnnnnnnnnnnnnnnnnnnnnnnnnnnnnnnnnnnnnnnnnnnnnnnnnnnnnnnnnnnnnnnnnnnnnnnnnnnnnnnnnnnnnnnnnnnnnnnnnnnnnnnnnnnnnnnnnnnnnnnnnnnnnnnnnnnnnnnnnnnnnnnnnnnnnnnnnnnnnnnnnnnnnnnnnnnnnnnnngacgacacccagttcgacggcgtgctcaaggtcaccgacgcggcgcggttcgaggccgcgctgcgcaccggcatcggcaacaagggcaaggccttcggcttcggcctgctgctcgtctgacaccgcatccctcacgaaagcgaccaccatgaacaagcacaccctgatcatcgaggccacgctgcgcaccgtcggcccgctgtcgatccgcctgccggtggccgagggcgccgccgagaaccgctgggcaaacttcccggtgctcacgcgcggcctggacgacgaaggcaatccgctgcagaccggctacctgcccgccaccacggtgcgcggcttcctgcgccgcgccatcgtgaccaacgccatggagcgcgccgccgccgagggcaagccctacactctgcagcgcgcctacgcggacctgatcggccaggacgcggcgagcgagaagtccgaggacgtggatctcgtgaagctcgccgcgcagcgcgacgcagagccggtggccgatctctttggcctgggcatgacgctcaagtctcggctcttcgtcagccacttcctgccgcgggtgaacgtactgcccgaggtgacctcgggcgtgcgcaaggaccttgaagacaccgagggcgtgctcgatgcgctcagccaggcggatcgcgacctgtatctcggccgctcggctgccaacagcgagcgggctgccgccgctgcggtggtgaccgacctgcgccgcaagctcaagaaggccgagcgcgcgggcgaggacaccgccgacctggccgccgccctcaaggccgccgaggagcgcgtcgcgggcttcgaggaccgcatgggcgagatgaagaactcctcgcgcacgctgaccagctacttcgccctgcccgcggggctcgatctgcttggccgcctggtgatcgagcgtgcacgcgagcgcgacttgccgatgattgaactcgcgctcgatgccctgagccgccgcccgctgctgggcgcgcaggtggcgcgcggctgcggcgaggtggcaggcagctttgacgtgctgcgcgacggcgtgctgatccggcgcatcagcgtgggcggctggaagccggcgcagatgaccgagttcgccgctgcggcgtgaggaaaattgcgacttcttgcgggcgcgaagagccgattgcgctaggcaatcagaggcttgcagcgcctcgggtcaagccacccctcgtttgggtggctactggaactccctgcaaaggactcccgcatcatggacaggtcaagccacccctcgtttgggtggctactggaacaacttctggaaacgaacggacacgttgcggggtcaagccacccctcgtttgggtggctactggaaccggatgccgaaggtccaagtgcccgccgccggtcaagccacctcgttcgggtggctactggaactcgccgcgtcttgctgcctgccgtctctggggtcaagccacccctcgtttgggtggctactggaacgacgccgaggtgcagtccctcatcctcaccggtcaagccacccctcgtttgggtggctactggaacaagctggctagcgaggaatggttgaagaacggtcaagccacccctcgtttgggtggctactggaaccgcgagcggatcgtccacggttcggcagcgggtcaagccacccctcgtttgggtggctactggaaccagttattgaagcgggtccgtggctcgcgcaatcaagccacctctcgtttaggtggctactggaactccatcaggccgacgtgcgtgaccgtgcccgatcaagccacccctcgtttgggtggctactggaactcgtcggcgagaatgacggtgatgctgttgagtcaagccacccctcgtttgggtggctactggaactacctgcaagaccgcaccgaggccccggccagtcaagccacccctcgtttgggtggctactggaactgggcgtactgaaacgcctcttgcgcctcgggtcaagccacccctcgtttgggtggctactggaacgacaagctcgccgccgccgctgaagcgcagggtcaagccacccctcgtttgggtggttactggaactgcacgatgcgttgccgctgctcttgctcgggtcaagccacccctcgtttgggtggctacttgaagttcgcttcggcgtcttcgtcggaggcatccgctcaagccacccctcgtttgggtggctactggaacgaggccaacgaactcatgcgtcacgtcgagggtcaagccacccctcgtttgggtggctactggaagaagggcgtcaactggttgcgccgcgcgaccgcctaagccaccgcattggtgcgtggctactgtgcacgtccggcttgctaacaggtgttagcaagtccgaaggcatcgctaggacgacgcccccgtgggcgcaccgcgcggtgatcactggccagccctacaacggccggcatgatcgggtagcgcaggacgctgcgcgatcaagggcaaggagactgggcatccgtgtttcgcaccactgagcaggccaacttcgcaaacgtgatggcggcgcatctgcccgcgcccgatgcacccctgctgctcgaagggggcgtgggcatcggcaagacgcgcgcctacctgcacgctgccgtgcagtcgggccagcggattgcggtcgtcgtgcccacgcaccagctcatcgaccagttgctcgcctcggccgacctgacagccgtgcgcggcgaggccacagtggcggccttccggccggcgcggatgttcgagcggcggcgcgagtacgaagagcagcgcgaggccgccgcccacgcgcagatcatggtgtgcacggcggcctcggtggtgatcgatcagcgcctcgccggcgaatacaacggctcgaccaccgcgcgcgactacctgatcttcgacgaggccgaccagttgcccgacatggcggcgctgcagtcggatctggcaatcagtcgcgccgacctcgacgccgccggcatccgctttaccacggtggaagacacactgcgccgcctggccgacaaggcgccgcgcaccgtcgagcccgaggtgcgcgccgcggcgcgcgtgatgatcgaggttctggccgagcctcgctggttccagaaggtggggctggacgaggacggcgccatcgtgctcacgcacaagctgccgggtcgcctgctcaagaaggtggccaaccggccgggcgtggcctttgtgtcggccacgctcacggtggcgggtcgcttcgacgacttccgcaacaccatgggcatcgggccgatctcgcggctctcgacggtgatcgagccgcagcagcacgggcgcctgagctttcgcatcgatccgcagaccgtggacacgcccgagtggatcgaggccacggtggcggccatcaaggcggcaccgcggccctgcctggtggcgaccaccagccacgacctgtcggcacggctaggggagagggtgcccggcgccatcgtgcgcgacgccgatgttcccgcccgcaccgccgccgagcaggccgagggcggggtgctgatcagcgccggcgcctgggcggggctggatacgccaacccgctggcgggccatcgtcgtgccgcgcgtgccctacggccagccggtggtcatcgatgggcagatcgagtcaagctacctcgacgcccgcaacaccgccgtgcgccggctaaggcaggtgatcggccgcggactgcgcacccccgatgcggtgtgcgaggtcaccctgctcgacgcgcgcgccgagcgcctgcccgagttcgtgccggtgcggttccgggcggcgtggagcactagagtgttcattgagggcgctcgcactgaggtcatgctcagcaaggccgagcgtgacccggcactgcgtcgggccgcgctgagtcggtacggccaccgttgtcaggcctgcagtttcgttcccaccgttctgggacagcttgacgtgcaccacaagagtcccatcaaggagggggaacgcaagacgcgccttgaggatgtggctgtgctgtgcgccaactgccaccggctggcgcat

SEQ ID NO: 264 - DNA, 11544 bp, Artificial Sequence; identical to SEQ ID NO: 263
  Synthetic Oligonucleotide
  misc_feature (1)..(7488): n is a, c, g, or t

SEQ ID NO: 265 - DNA, 11484 bp, Artificial Sequence
  Synthetic Oligonucleotide
  misc_feature (1)..(6506): n is a, c, g, or t
nnnnnnnnnnnnnnnnnnnnnnnnnnnnnnnnnnnnnnnnnnnnnnnnnnnnnnnnnnnnnnnnnnnnnnnnnnnnnnnnnnnnnnnnnnnnnnnnnnnnnnnnnnnnnnnnnnnnnnnnnnnnnnnnnnnnnnnnnnnnnnnnnnnnnnnnnnnnnnnnnnnnnnnnnnnnnnnnnnnnnnnnnnnnnnnnnnnnnnnnnnnnnnnnnnnnnnnnnnnnnnnnnnnnnnnnnnnnnnnnnnnnnnnnnnnnnnnnnnnnnnnnnnnnnnnnnnnnnnnnnnnnnnnnnnnnnnnnnnnnnnnnnnnnnnnnnnnnnnnnnnnnnnnnnnnnnnnnnnnnnnnnnnnnnnnnnnnnnnnnnnnnnnnnnnnnnnnnnnnnnnnnnnnnnnnnnnnnnnnnnnnnnnnnnnnnnnnnnnnnnnnnnnnnnnnnnnnnnnnnnnnnnnnnnnnnnnnnnnnnnnnnnnnnnnnnnnnnnnnnnnnnnnnnnnnnnnnnnnnnnnnnnnnnnnnnnnnnnnnnnnnnnnnnnnnnnnnnnnnnnnnnnnnnnnnnnnnnnnnnnnnnnnnnnnnnnnnnnnnnnnnnnnnnnnnnnnnnnnnnnnnnnnnnnnnnnnnnnnnnnnnnnnnnnnnnnnnnnnnnnnnnnnnnnnnnnnnnnnnnnnnnnnnnnnnnnnnnnnnnnnnnnnnnnnnnnnnnnnnnnnnnnnnnnnnnnnnnnnnnnnnnnnnnnnnnnnnnnnnnnnnnnnnnnnnnnnnnnnnnnnnnnnnnnnnnnnnnnnnnnnnnnnnnnnnnnnnnnnnnnnnnnnnnnnnnnnnnnnnnnnnnnnnnnnnnnnnnnnnnnnnnnnnnnnnnnnnnnnnnnnnnnnnnnnnnnnnnnnnnnnnnnnnnnnnnnnnnnnnnnnnnnnnnnnnnnnnnnnnnnnnnnnnnnnnnnnnnnnnnnnnnnnnnnnnnnnnnnnnnnnnnnnnnnnnnnnnnnnnnnnnnnnnnnnnnnnnnnnnnnnnnnnnnnnnnnnnnnnnnnnnnnnnnnnnnnnnnnnnnnnnnnnnnnnnnnnnnnnnnnnnnnnnnnnnnnnnnnnnnnnnnnnnnnnnnnnnnnnnnnnnnnnnnnnnnnnnnnnnnnnnnnnnnnnnnnnnnnnnnnnnnnnnnnnnnnnnnnnnnnnnnnnnnnnnnnnnnnnnnnnnnnnnnnnnnnnnnnnnnnnnnnnnnnnnnnnnnnnnnnnnnnnnnnnnnnnnnnnnnnnnnnnnnnnnnnnnnnnnnnnnnnnnnnnnnnnnnnnnnnnnnnnnnnnnnnnnnnnnnnnnnnnnnnnnnnnnnnnnnnnnnnnnnnnnnnnnnnnnnnnnnnnnnnnnnnnnnnnnnnnnnnnnnnnnnnnnnnnnnnnnnnnnnnnnnnnnnnnnnnnnnnnnnnnnnnnnnnnnnnnnnnnnnnnnnnnnnnnnnnnnnnnnnnnnnnnnnnnnnnnnnnnnnnnnnnnnnnnnnnnnnnnnnnnnnnnnnnnnnnnnnnnnnnnnnnnnnnnnnnnnnnnnnnnnnnnnnnnnnnnnnnnnnnnnnnnnnnnnnnnnnnnnnnnnnnnnnnnnnnnnnnnnnnnnnnnnnnnnnnnnnnnnnnnnnnnnnnnnnnnnnnnnnnnnnnnnnnnnnnnnnnnnnnnnnnnnnnnnnnnnnnnnnnnnnnnnnnnnnnnnnnnnnnnnnnnnnnnnnnnnnnnnnnnnnnnnnnnnnnnnnnnnnnnnnnnnnnnnnnnnnnnnnnnnnnnnnnnnnnnnnnnnnnnnnnnnnnnnnnnnnnnnnnnnnnnnnnnnnnnnnnnnnnnnnnnnnnnnnnnnnnnnnnnnnnnnnnnnnnnnnnnnnnnnnnnnnnnnnnnnnnnnnnnnnnnnnnnnnnnnnnnnnnnnnnnnnnnnnnnnnnnnnnnnnnnnnnnnnnnnnnnnnnnnnnnnnnnnnnnnnnnnnnnnnnnnnnnnnnnnnnnnnnnnnnnnnnnnnnnnnnnnnnnnnnnnnnnnnnnnnnnnnnnnnnnnnnnnnnnnnnnnnnnnnnnnnnnnnnnnnnnnnnnnnnnnnnnnnnnnnnnnnnnnnnnnnnnnnnnnnnnnnnnnnnnnnnnnnnnnnnnnnnnnnnnnnnnnnnnnnnnnnnnnnnnnnnnnnnnnnnnnnnnnnnnnnnnnnnnnnnnnnnnnnnnnnnnnnnnnnnnnnnnnnnnnnnnnnnnnnnnnnnnnnnnnnnnnnnnnnnnnnnnnnnnnnnnnnnnnnnnnnnnnnnnnnnnnnnnnnnnnnnnnnnnnnnnnnnnnnnnnnnnnnnnnnnnnnnnnnnnnnnnnnnnnnnnnnnnnnnnnnnnnnnnnnnnnnnnnnnnnnnnnnnnnnnnnnnnnnnnnnnnnnnnnnnnnnnnnnnnnnnnnnnnnnnnnnnnnnnnnnnnnnnnnnnnnnnnnnnnnnnnnnnnnnnnnnnnnnnnnnnnnnnnnnnnnnnnnnnnnnnnnnnnnnnnnnnnnnnnnnnnnnnnnnnnnnnnnnnnnnnnnnnnnnnnnnnnnnnnnnnnnnnnnnnnnnnnnnnnnnnnnnnnnnnnnnnnnnnnnnnnnnnnnnnnnnnnnnnnnnnnnnnnnnnnnnnnnnnnnnnnnnnnnnnnnnnnnnnnnnnnnnnnnnnnnnnnnnnnnnnnnnnnnnnnnnnnnnnnnnnnnnnnnnnnnnnnnnnnnnnnnnnnnnnnnnnnnnnnnnnnnnnnnnnnnnnnnnnnnnnnnnnnnnnnnnnnnnnnnnnnnnnnnnnnnnnnnnnnnnnnnnnnnnnnnnnnnnnnnnnnnnnnnnnnnnnnnnnnnnnnnnnnnnnnnnnnnnnnnnnnnnnnnnnnnnnnnnnnnnnnnnnnnnnnnnnnnnnnnnnnnnnnnnnnnnnnnnnnnnnnnnnnnnnnnnnnnnnnnnnnnnnnnnnnnnnnnnnnnnnnnnnnnnnnnnnnnnnnnnnnnnnnnnnnnnnnnnnnnnnnnnnnnnnnnnnnnnnnnnnnnnnnnnnnnnnnnnnnnnnnnnnnnnnnnnnnnnnnnnnnnnnnnnnnnnnnnnnnnnnnnnnnnnnnnnnnnnnnnnnnnnnnnnnnnnnnnnnnnnnnnnnnnnnnnnnnnnnnnnnnnnnnnnnnnnnnnnnnnnnnnnnnnnnnnnnnnnnnnnnnnnnnnnnnnnnnnnnnnnnnnnnnnnnnnnnnnnnnnnnnnnnnnnnnnnnnnnnnnnnnnnnnnnnnnnnnnnnnnnnnnnnnnnnnnnnnnnnnnnnnnnnnnnnnnnnnnnnnnnnnnnnnnnnnnnnnnnnnnnnnnnnnnnnnnnnnnnnnnnnnnnnnnnnnnnnnnnnnnnnnnnnnnnnnnnnnnnnnnnnnnnnnnnnnnnnnnnnnnnnnnnnnnnnnnnnnnnnnnnnnnnnnnnnnnnnnnnnnnnnnnnnnnnnnnnnnnnnnnnnnnnnnnnnnnnnnnnnnnnnnnnnnnnnnnnnnnnnnnnnnnnnnnnnnnnnnnnnnnnnnnnnnnnnnnnnnnnnnnnnnnnnnnnnnnnnnnnnnnnnnnnnnnnnnnnnnnnnnnnnnnnnnnnnnnnnnnnnnnnnnnnnnnnnnnnnnnnnnnnnnnnnnnnnnnnnnnnnnnnnnnnnnnnnnnnnnnnnnnnnnnnnnnnnnnnnnnnnnnnnnnnnnnnnnnnnnnnnnnnnnnnnnnnnnnnnnnnnnnnnnnnnnnnnnnnnnnnnnnnnnnnnnnnnnnnnnnnnnnnnnnnnnnnnnnnnnnnnnnnnnnnnnnnnnnnnnnnnnnnnnnnnnnnnnnnnnnnnnnnnnnnnnnnnnnnnnnnnnnnnnnnnnnnnnnnnnnnnnnnnnnnnnnnnnnnnnnnnnnnnnnnnnnnnnnnnnnnnnnnnnnnnnnnnnnnnnnnnnnnnnnnnnnnnnnnnnnnnnnnnnnnnnnnnnnnnnnnnnnnnnnnnnnnnnnnnnnnnnnnnnnnnnnnnnnnnnnnnnnnnnnnnnnnnnnnnnnnnnnnnnnnnnnnnnnnnnnnnnnnnnnnnnnnnnnnnnnnnnnnnnnnnnnnnnnnnnnnnnnnnnnnnnnnnnnnnnnnnnnnnnnnnnnnnnnnnnnnnnnnnnnnnnnnnnnnnnnnnnnnnnnnnnnnnnnnnnnnnnnnnnnnnnnnnnnnnnnnnnnnnnnnnnnnnnnnnnnnnnnnnnnnnnnnnnnnnnnnnnnnnnnnnnnnnnnnnnnnnnnnnnnnnnnnnnnnnnnnnnnnnnnnnnnnnnnnnnnnnnnnnnnnnnnnnnnnnnnnnnnnnnnnnnnnnnnnnnnnnnnnnnnnnnnnnnnnnnnnnnnnnnnnnnnnnnnnnnnnnnnnnnnnnnnnnnnnnnnnnnnnnnnnnnnnnnnnnnnnnnnnnnnnnnnnnnnnnnnnnnnnnnnnnnnnnnnnnnnnnnnnnnnnnnnnnnnnnnnnnnnnnnnnnnnnnnnnnnnnnnnnnnnnnnnnnnnnnnnnnnnnnnnnnnnnnnnnnnnnnnnnnnnnnnnnnnnnnnnnnnnnnnnnnnnnnnnnnnnnnnnnnnnnnnnnnnnnnnnnnnnnnnnnnnnnnnnnnnnnnnnnnnnnnnnnnnnnnnnnnnnnnnnnnnnnnnnnnnnnnnnnnnnnnnnnnnnnnnnnnnnnnnnnnnnnnnnnnnnnnnnnnnnnnnnnnnnnnnnnnnnnnnnnnnnnnnnnnnnnnnnnnnnnnnnnnnnnnnnnnnnnnnnnnnnnnnnnnnnnnnnnnnnnnnnnnnnnnnnnnnnnnnnnnnnnnnnnnnnnnnnnnnnnnnnnnnnnnnnnnnnnnnnnnnnnnnnnnnnnnnnnnnnnnnnnnnnnnnnnnnnnnnnnnnnnnnnnnnnnnnnnnnnnnnnnnnnnnnnnnnnnnnnnnnnnnnnnnnnnnnnnnnnnnnnnnnnnnnnnnnnnnnnnnnnnnnnnnnnnnnnnnnnnnnnnnnnnnnnnnnnnnnnnnnnnnnnnnnnnnnnnnnnnnnnnnnnnnnnnnnnnnnnnnnnnnnnnnnnnnnnnnnnnnnnnnnnnnnnnnnnnnnnnnnnnnnnnnnnnnnnnnnnnnnnnnnnnnnnnnnnnnnnnnnnnnnnnnnnnnnnnnnnnnnnnnnnnnnnnnnnnnnnnnnnnnnnnnnnnnnnnnnnnnnnnnnnnnnnnnnnnnnnnnnnnnnnnnnnnnnnnnnnnnnnnnnnnnnnnnnnnnnnnnnnnnnnnnnnnnnnnnnnnnnnnnnnnnnnnnnnnnnnnnnnnnnnnnnnnnnnnnnnnnnnnnnnnnnnnnnnnnnnnnnnnnnnnnnnnnnnnnnnnnnnnnnnnnnnnnnnnnnnnnnnnnnnnnnnnnnnnnnnnnnnnnnnnnnnnnnnnnnnnnnnnnnnnnnnnnnnnnnnnnnnnnnnnnnnnnnnnnnnnnnnnnnnnnnnnnnnnnnnnnnnnnnnnnnnnnnnnnnnnnnnnnnnnnnnnnnnnnnnnnnnnnnnnnnnnnnnnnnnnnnnnnnnnnnnnnnnnnnnnnnnnnnnnnnnnnnnnnnnnnnnnnnnnnnnnnnnnnnnnnnnnnnnnnnnnnnnnnnnnnnnnnnnnnnnnnnnnnnnnnnnnnnnnnnnnnnnnnnnnnnnnnnnnnnnnnnnnnnnnnnnnnnnnnnnnnnnnnnnnnnnnnnnnnnnnnnnnnnnnnnnnnnnnnnnnnnnnnnnnnnnnnnnnnnnnnnnnnnnnnnnnnnnnnnnnnnnnnnnnnnnnnnnnnnnnnnnnnnnnnnnnnnnnnnnnnnnnnnnnnnnnnnnnnnnnnnnnnnnnnnnnnnnnnnnnnnnnnnnnnnnnnnnnnnnnnnnnnnnnnnnnnnnnnnnnnnnnnnnnnnnnnnnnnnnnnnnnnnnnnnnnnnnnnnnnnnnnnnnnnnnnnnnnnnnnnnnnnnnnnnnnnnnnnnnnnnnnnnnnnnnnnnnnnnnnnnnnnnnnnnnnnnnnnnnnnnnnnnnnnnnnnnnnnnnnnnnnnnnnnnnnnnnnnnnnnnnnnnnnnnnnnnnnnnnnnnnnnnnnnnnnnnnnnnnnnnnnnnnnnnnnnnnnnnnnnnnnnnnnnnnnnnnnnnnnnnnnnnnnnnnnnnnnnnnnnnnnnnnnnnnnnnnnnnnnnnnnnnnnnnnnnnnnnnnnnnnnnnnnnnnnnnnnnnnnnnnnnnnnnnnnnnnnnnnnnnnnnnnnnnnnnnnnnnnnnnnnnnnnnnnnnnnnnnnnnnnnnnnnnnnnnnnnnnnnnnnnnnnnnnnnnnnnnnnnnnnnnnnnnnnnnnnnnnnnnnnnnnnnnnnnnnnnnnnnnnnnnnnnnnnnnnnnnnnnnnnnnnnnnnnnnnnnnnnnnnnnnnnnnnnnnnnnnnnnnnnnnnnnnnnnnnnnnnnnnnnnnnnnnnnnnnnnnnnnnnnnnnnnnnnnnnnnnnnnnnnnnnnnnnnnnnnnnnnnnnnnnnnnnnnnnnnnnnnnnnnnnnnnnnnnnnnnnnnnnnnnnnnnnnnnnnnnnnnnnnnnnnnnnnnnnnnnnnnnnntccggcctccgcctccctcaacaccccgatgatcttctcttccgtatatctcgtcgccttcatcgcctgctcctggtgaagcagactctgctcccgtccgggactaaactcgggtgtcaggtcggtggcgcaccaaaatcttggaaattgagtagaggacgagtaccttcaggtctatggatcgctttgctgtcacgttgcgtcttggttcccccttggttacaggtgggggatatatgaccctagacgcgcttttggctgcgattctgtttgattcgggggagagcatcgaagccgctcacactcacattcccctacaaaatactcaaggggtatggcacggaagtgctgcgatctacgaaaccttggaagtgggtcgccaagcctttgtagctaatctccgcgccaatcacgatctagacccaagtcttgtcaccaagaacaagcaagggcaaattcacaccaagctgagtttgcgtcggcgacaggaattcggcgcggtgatgaatgggtatcaatactttgtaacggaggctgtcacttggtatggagaaggcgatgcggtccaagtggaaagattgctccgctcggtgcggttcattggaaaacgcagagcgagtgggttcggcgaagtcaaagcgattgaaatatccgagtctgaaagcgatggggtggtgagccccttcggtgaacccttgcgccccgttccacttgagttgtttacgggtgacaagggttccattcgtggtgatgcggcgtggaagcctgcgtattggcgacctgagaaccgcgccatttgttacctacccgcgccaaactaatgaacacctacgaattctttatggagaactttggtcggcatttgatcaatgccgacggacttaccgccgcgcagggtgcggaaaaaaccttgagtaccaatcacacgaccatcaaaggaacaacaagccgactttgttcagggtgggcaattgttcgtcctggcacttcgtcgcttcaactcaagctgcgtgcgcaaggtatcgcttacgatgatcggactcgcgtggaagcctttatggacgagcttgaaacttgggatggcgagtcaccaagaatctttcttgagtttgacaagcttcctgtgtccatcgccaacctattcataacggttgatcgtcggttagtgcgcatttgttcacccaagggagtggcgtcgtttgatttgagtgtggagcctgatgcctcagcgagtgtgattcaacgcgccatttggaagcgacgaaagcaatgatccgcgactatcgcatctcaaagccaccaagccttggactctatgcggtccatcggtttgtcgctgagttgtgtggtgaggacccgtatctgttcgtagaccgtggggactatgtagaaattcgcattcggcgggaactgagtccacagttccgtgaaattgtgattccgacaaatggcgatgtgatcgcgttctctctacggtctgcggtgtcaaaacgacacaagggcaagaacacctacgcaagacttggcgattggcgagcgcgacacgagtggctttacaagcgcagtgagaaaaacggcttcacgattcttgcgcttcacgccactgacggaagcgtgaaggtggaaggacaaggtgcgaaaattttttcaatggatcggactgactttacaggggttctaaaggtttgtgaccaagcgctttttgcgcattgtctgactcacggaattggacgagtcggcaaaccttacggaatgggaatgctcgtgatctgaacgaacaaaggttggaggctctatgtcaaagcgagtgattgtcaaagtgacgctgcggaccaagggtccactgtcgctcaaaatgcctgtggttgaaggtgcgcggggaaacgagtttgacaactttcctgtgatgacaaagggagtggatgcggagggaaacaaactccgcacgggttatctccccgcaaccacagtgcgtggattcttgcgccgagcagtgacgctacaacgaatgcgcaaagccgccgaagcaggaaagccgtacaagctgcctcaaatctataacgagatgattggacagaacgccgacagcgaaaagaaagctgaagaaatagatctgctcgcgatcaagaaagcacgcgaaagcagccctgtagttgatctcttcggatcagggttgaatgtgaaatcgcgactcttggtcagccacttttatcctgcgaccaatgtgctgcctgaagctttcacaggagtgcgcaaagacattgatgacacggaagacgcactggaactgctggattcgcaggatataatagaattccagagacgcaccgagcgcaatcgtgagcgagcggctgctgctgcgagggtcaagcagatggaaagcaagattcggcgtgatgaacgcaaggacggtgcgtcggaagacgacaaaaaagccctagagatcgccaagaaacaagaggaagctgctgaacgtgagatgggtgagatgaaagtgagcactcgccaaatcactactcactttgcgctccctgcggagattgaacttcacggaaggctagtgattgagcgtgcgaaagaccaagaccttgaaatgcttgaggacggattgcgtgagttgagtcgttcgcctgtactcggagcgcaatccgcaagaggatgtggagagattgaaggcacctttgaattcaccgatgaggagggaaaattgatcaaaaatgtggtggtgggtggctacagcgacgcaaaagtgacgaatttttgagcggcgaaaggagtaggacatgtctccgaatcagcgacttacacggtctctgtcgcagctccactgaatttgtggagctactgaaacctggtcggtcgagtgatgccggcgcagttggtcgcagctccactgaatttgtggagctactgaaactgtgggttccccatcggctatcgcggttccgtcgcagctccactgaatttgtggagctactgaaacaaagagcagatcatgcgctggacgcggggtgtcgcagctccactgaatttgtggagctactgaaacttcacactggtggcgggttgatcgttttgagtcgcagctccactgaatttgtggagctactgaaactccacaccggagcagcggtcaaggtgctggtcgcagctccactgaatttgtggagctactgaaacttaaccattgatgcacaaacgctggtgctcggtcgcagctccactgaatttgtggagctactgaaaccagaacatctcgcaggcgatccggtctgggggtcgcagctccactgaatttgtggagctactgaaaccacgtacctcaaacggtttcgcccgccgtcgtcgcagctccactgaatttgtggagctactgaaacgaatcgcttgcggtcgggttgtcagaacggtcgcagctccactgaatttgtggagctatttcttcagcgccactctccgtggcgcttttcttttttttcgctagaatcggggtgtgtttcgctccgttgaacaagccaactttcattctcgacttgctgctcacattcagcgagcggacgcgccgttgttgcttgagggagcgacagggcttggaaagactcgtgcttatctagccgcactcaagggcgcagtggaacaaggcaagtctgtcgcgattgtcgttcccacacacgacctgatctcgcagctgcttgcttcctcagatctgacagcggtgattcctgcgaccatcactcgcgcagcctttcgcccacggtcaatgtacgactccaagcgcgagtacgaagaagcgaaagcaagcgcgatagacgcgcaaatactgatctgtacaagttcatcgatgatcattgattcacgaacgaagggcaagtatcacggcgctacactgcgcgactacattctgtttgacgaagcggatcagcttcctcagtacgcagcactctcacgtgaccaagagatccgtggaggcgaactgaagcacctcggtatccgtggttctaatgcgaggacaattgcgcaagcggtgattgatcacaagagtgcggaatttgaaactcgcgcagcagcagaactgattcttgacgcactagaggaacccgcttggtatcacagcgcagggatgacagacgatggtggcattgcgctttatcacaaaatgccaggacgattgctcaagcgagtttccaattcacccaatgtcgcttttgtgagcgcgactctttcaattggtggaaagtttgatgactttcggcgagcgatgggaatcaccacacaaagcgcattgtccgcgatcattgagccaagcgatcacggaacactgaagtttttttacgccgctcatgaggtttcttctgaggaatggctacccgccacacaggaagcgattagtaaggcgcggaagccttgtttggtagtcactccaagcaacgagttgtctcagatgttgggtgggttgtttcctcaagccattgttcgaacggctaaggagaagaccactgatgcgattctgcggctgacagatgaaagcaatattctcatcgcctcagcagcttgggcgggattagacacacccattgagtggaagagcattgtgatcccgcgtatccctttttcgcgcccacaagtgatcgacggaaatgtggagagcagcttctttgattcacgcaacagtgccattcgccgaatgcgacaggtgatcggtcgtgggctacgcaagcctgatgcggagtgtgaggtctacattcttgacgagcgattggcgatgatcgagtcgttcatcccgtctaggtttcagcaggcgtgggtggcgcgtaaaatagtggaaggcgcaagagttgaaaatacgctatcaaaggctgaacgggatccgctgacacgcaagtcagcactgcgacactttggtcggaaatgcatgtcctgtgagttcgtcccgcgagtagacagtcagctggaggtccatcatctttatccactcgct

SEQ ID NO: 266 - DNA, 11173 bp, Artificial Sequence
  Synthetic Oligonucleotide
  misc_feature (1)..(6967): n is a, c, g, or t
nnnnnnnnnnnnnnnnnnnnnnnnnnnnnnnnnnnnnnnnnnnnnnnnnnnnnnnnnnnnnnnnnnnnnnnnnnnnnnnnnnnnnnnnnnnnnnnnnnnnnnnnnnnnnnnnnnnnnnnnnnnnnnnnnnnnnnnnnnnnnnnnnnnnnnnnnnnnnnnnnnnnnnnnnnnnnnnnnnnnnnnnnnnnnnnnnnnnnnnnnnnnnnnnnnnnnnnnnnnnnnnnnnnnnnnnnnnnnnnnnnnnnnnnnnnnnnnnnnnnnnnnnnnnnnnnnnnnnnnnnnnnnnnnnnnnnnnnnnnnnnnnnnnnnnnnnnnnnnnnnnnnnnnnnnnnnnnnnnnnnnnnnnnnnnnnnnnnnnnnnnnnnnnnnnnnnnnnnnnnnnnnnnnnnnnnnnnnnnnnnnnnnnnnnnnnnnnnnnnnnnnnnnnnnnnnnnnnnnnnnnnnnnnnnnnnnnnnnnnnnnnnnnnnnnnnnnnnnnnnnnnnnnnnnnnnnnnnnnnnnnnnnnnnnnnnnnnnnnnnnnnnnnnnnnnnnnnnnnnnnnnnnnnnnnnnnnnnnnnnnnnnnnnnnnnnnnnnnnnnnnnnnnnnnnnnnnnnnnnnnnnnnnnnnnnnnnnnnnnnnnnnnnnnnnnnnnnnnnnnnnnnnnnnnnnnnnnnnnnnnnnnnnnnnnnnnnnnnnnnnnnnnnnnnnnnnnnnnnnnnnnnnnnnnnnnnnnnnnnnnnnnnnnnnnnnnnnnnnnnnnnnnnnnnnnnnnnnnnnnnnnnnnnnnnnnnnnnnnnnnnnnnnnnnnnnnnnnnnnnnnnnnnnnnnnnnnnnnnnnnnnnnnnnnnnnnnnnnnnnnnnnnnnnnnnnnnnnnnnnnnnnnnnnnnnnnnnnnnnnnnnnnnnnnnnnnnnnnnnnnnnnnnnnnnnnnnnnnnnnnnnnnnnnnnnnnnnnnnnnnnnnnnnnnnnnnnnnnnnnnnnnnnnnnnnnnnnnnnnnnnnnnnnnnnnnnnnnnnnnnnnnnnnnnnnnnnnnnnnnnnnnnnnnnnnnnnnnnnnnnnnnnnnnnnnnnnnnnnnnnnnnnnnnnnnnnnnnnnnnnnnnnnnnnnnnnnnnnnnnnnnnnnnnnnnnnnnnnnnnnnnnnnnnnnnnnnnnnnnnnnnnnnnnnnnnnnnnnnnnnnnnnnnnnnnnnnnnnnnnnnnnnnnnnnnnnnnnnnnnnnnnnnnnnnnnnnnnnnnnnnnnnnnnnnnnnnnnnnnnnnnnnnnnnnnnnnnnnnnnnnnnnnnnnnnnnnnnnnnnnnnnnnnnnnnnnnnnnnnnnnnnnnnnnnnnnnnnnnnnnnnnnnnnnnnnnnnnnnnnnnnnnnnnnnnnnnnnnnnnnnnnnnnnnnnnnnnnnnnnnnnnnnnnnnnnnnnnnnnnnnnnnnnnnnnnnnnnnnnnnnnnnnnnnnnnnnnnnnnnnnnnnnnnnnnnnnnnnnnnnnnnnnnnnnnnnnnnnnnnnnnnnnnnnnnnnnnnnnnnnnnnnnnnnnnnnnnnnnnnnnnnnnnnnnnnnnnnnnnnnnnnnnnnnnnnnnnnnnnnnnnnnnnnnnnnnnnnnnnnnnnnnnnnnnnnnnnnnnnnnnnnnnnnnnnnnnnnnnnnnnnnnnnnnnnnnnnnnnnnnnnnnnnnnnnnnnnnnnnnnnnnnnnnnnnnnnnnnnnnnnnnnnnnnnnnnnnnnnnnnnnnnnnnnnnnnnnnnnnnnnnnnnnnnnnnnnnnnnnnnnnnnnnnnnnnnnnnnnnnnnnnnnnnnnnnnnnnnnnnnnnnnnnnnnnnnnnnnnnnnnnnnnnnnnnnnnnnnnnnnnnnnnnnnnnnnnnnnnnnnnnnnnnnnnnnnnnnnnnnnnnnnnnnnnnnnnnnnnnnnnnnnnnnnnnnnnnnnnnnnnnnnnnnnnnnnnnnnnnnnnnnnnnnnnnnnnnnnnnnnnnnnnnnnnnnnnnnnnnnnnnnnnnnnnnnnnnnnnnnnnnnnnnnnnnnnnnnnnnnnnnnnnnnnnnnnnnnnnnnnnnnnnnnnnnnnnnnnnnnnnnnnnnnnnnnnnnnnnnnnnnnnnnnnnnnnnnnnnnnnnnnnnnnnnnnnnnnnnnnnnnnnnnnnnnnnnnnnnnnnnnnnnnnnnnnnnnnnnnnnnnnnnnnnnnnnnnnnnnnnnnnnnnnnnnnnnnnnnnnnnnnnnnnnnnnnnnnnnnnnnnnnnnnnnnnnnnnnnnnnnnnnnnnnnnnnnnnnnnnnnnnnnnnnnnnnnnnnnnnnnnnnnnnnnnnnnnnnnnnnnnnnnnnnnnnnnnnnnnnnnnnnnnnnnnnnnnnnnnnnnnnnnnnnnnnnnnnnnnnnnnnnnnnnnnnnnnnnnnnnnnnnnnnnnnnnnnnnnnnnnnnnnnnnnnnnnnnnnnnnnnnnnnnnnnnnnnnnnnnnnnnnnnnnnnnnnnnnnnnnnnnnnnnnnnnnnnnnnnnnnnnnnnnnnnnnnnnnnnnnnnnnnnnnnnnnnnnnnnnnnnnnnnnnnnnnnnnnnnnnnnnnnnnnnnnnnnnnnnnnnnnnnnnnnnnnnnnnnnnnnnnnnnnnnnnnnnnnnnnnnnnnnnnnnnnnnnnnnnnnnnnnnnnnnnnnnnnnnnnnnnnnnnnnnnnnnnnnnnnnnnnnnnnnnnnnnnnnnnnnnnnnnnnnnnnnnnnnnnnnnnnnnnnnnnnnnnnnnnnnnnnnnnnnnnnnnnnnnnnnnnnnnnnnnnnnnnnnnnnnnnnnnnnnnnnnnnnnnnnnnnnnnnnnnnnnnnnnnnnnnnnnnnnnnnnnnnnnnnnnnnnnnnnnnnnnnnnnnnnnnnnnnnnnnnnnnnnnnnnnnnnnnnnnnnnnnnnnnnnnnnnnnnnnnnnnnnnnnnnnnnnnnnnnnnnnnnnnnnnnnnnnnnnnnnnnnnnnnnnnnnnnnnnnnnnnnnnnnnnnnnnnnnnnnnnnnnnnnnnnnnnnnnnnnnnnnnnnnnnnnnnnnnnnnnnnnnnnnnnnnnnnnnnnnnnnnnnnnnnnnnnnnnnnnnnnnnnnnnnnnnnnnnnnnnnnnnnnnnnnnnnnnnnnnnnnnnnnnnnnnnnnnnnnnnnnnnnnnnnnnnnnnnnnnnnnnnnnnnnnnnnnnnnnnnnnnnnnnnnnnnnnnnnnnnnnnnnnnnnnnnnnnnnnnnnnnnnnnnnnnnnnnnnnnnnnnnnnnnnnnnnnnnnnnnnnnnnnnnnnnnnnnnnnnnnnnnnnnnnnnnnnnnnnnnnnnnnnnnnnnnnnnnnnnnnnnnnnnnnnnnnnnnnnnnnnnnnnnnnnnnnnnnnnnnnnnnnnnnnnnnnnnnnnnnnnnnnnnnnnnnnnnnnnnnnnnnnnnnnnnnnnnnnnnnnnnnnnnnnnnnnnnnnnnnnnnnnnnnnnnnnnnnnnnnnnnnnnnnnnnnnnnnnnnnnnnnnnnnnnnnnnnnnnnnnnnnnnnnnnnnnnnnnnnnnnnnnnnnnnnnnnnnnnnnnnnnnnnnnnnnnnnnnnnnnnnnnnnnnnnnnnnnnnnnnnnnnnnnnnnnnnnnnnnnnnnnnnnnnnnnnnnnnnnnnnnnnnnnnnnnnnnnnnnnnnnnnnnnnnnnnnnnnnnnnnnnnnnnnnnnnnnnnnnnnnnnnnnnnnnnnnnnnnnnnnnnnnnnnnnnnnnnnnnnnnnnnnnnnnnnnnnnnnnnnnnnnnnnnnnnnnnnnnnnnnnnnnnnnnnnnnnnnnnnnnnnnnnnnnnnnnnnnnnnnnnnnnnnnnnnnnnnnnnnnnnnnnnnnnnnnnnnnnnnnnnnnnnnnnnnnnnnnnnnnnnnnnnnnnnnnnnnnnnnnnnnnnnnnnnnnnnnnnnnnnnnnnnnnnnnnnnnnnnnnnnnnnnnnnnnnnnnnnnnnnnnnnnnnnnnnnnnnnnnnnnnnnnnnnnnnnnnnnnnnnnnnnnnnnnnnnnnnnnnnnnnnnnnnnnnnnnnnnnnnnnnnnnnnnnnnnnnnnnnnnnnnnnnnnnnnnnnnnnnnnnnnnnnnnnnnnnnnnnnnnnnnnnnnnnnnnnnnnnnnnnnnnnnnnnnnnnnnnnnnnnnnnnnnnnnnnnnnnnnnnnnnnnnnnnnnnnnnnnnnnnnnnnnnnnnnnnnnnnnnnnnnnnnnnnnnnnnnnnnnnnnnnnnnnnnnnnnnnnnnnnnnnnnnnnnnnnnnnnnnnnnnnnnnnnnnnnnnnnnnnnnnnnnnnnnnnnnnnnnnnnnnnnnnnnnnnnnnnnnnnnnnnnnnnnnnnnnnnnnnnnnnnnnnnnnnnnnnnnnnnnnnnnnnnnnnnnnnnnnnnnnnnnnnnnnnnnnnnnnnnnnnnnnnnnnnnnnnnnnnnnnnnnnnnnnnnnnnnnnnnnnnnnnnnnnnnnnnnnnnnnnnnnnnnnnnnnnnnnnnnnnnnnnnnnnnnnnnnnnnnnnnnnnnnnnnnnnnnnnnnnnnnnnnnnnnnnnnnnnnnnnnnnnnnnnnnnnnnnnnnnnnnnnnnnnnnnnnnnnnnnnnnnnnnnnnnnnnnnnnnnnnnnnnnnnnnnnnnnnnnnnnnnnnnnnnnnnnnnnnnnnnnnnnnnnnnnnnnnnnnnnnnnnnnnnnnnnnnnnnnnnnnnnnnnnnnnnnnnnnnnnnnnnnnnnnnnnnnnnnnnnnnnnnnnnnnnnnnnnnnnnnnnnnnnnnnnnnnnnnnnnnnnnnnnnnnnnnnnnnnnnnnnnnnnnnnnnnnnnnnnnnnnnnnnnnnnnnnnnnnnnnnnnnnnnnnnnnnnnnnnnnnnnnnnnnnnnnnnnnnnnnnnnnnnnnnnnnnnnnnnnnnnnnnnnnnnnnnnnnnnnnnnnnnnnnnnnnnnnnnnnnnnnnnnnnnnnnnnnnnnnnnnnnnnnnnnnnnnnnnnnnnnnnnnnnnnnnnnnnnnnnnnnnnnnnnnnnnnnnnnnnnnnnnnnnnnnnnnnnnnnnnnnnnnnnnnnnnnnnnnnnnnnnnnnnnnnnnnnnnnnnnnnnnnnnnnnnnnnnnnnnnnnnnnnnnnnnnnnnnnnnnnnnnnnnnnnnnnnnnnnnnnnnnnnnnnnnnnnnnnnnnnnnnnnnnnnnnnnnnnnnnnnnnnnnnnnnnnnnnnnnnnnnnnnnnnnnnnnnnnnnnnnnnnnnnnnnnnnnnnnnnnnnnnnnnnnnnnnnnnnnnnnnnnnnnnnnnnnnnnnnnnnnnnnnnnnnnnnnnnnnnnnnnnnnnnnnnnnnnnnnnnnnnnnnnnnnnnnnnnnnnnnnnnnnnnnnnnnnnnnnnnnnnnnnnnnnnnnnnnnnnnnnnnnnnnnnnnnnnnnnnnnnnnnnnnnnnnnnnnnnnnnnnnnnnnnnnnnnnnnnnnnnnnnnnnnnnnnnnnnnnnnnnnnnnnnnnnnnnnnnnnnnnnnnnnnnnnnnnnnnnnnnnnnnnnnnnnnnnnnnnnnnnnnnnnnnnnnnnnnnnnnnnnnnnnnnnnnnnnnnnnnnnnnnnnnnnnnnnnnnnnnnnnnnnnnnnnnnnnnnnnnnnnnnnnnnnnnnnnnnnnnnnnnnnnnnnnnnnnnnnnnnnnnnnnnnnnnnnnnnnnnnnnnnnnnnnnnnnnnnnnnnnnnnnnnnnnnnnnnnnnnnnnnnnnnnnnnnnnnnnnnnnnnnnnnnnnnnnnnnnnnnnnnnnnnnnnnnnnnnnnnnnnnnnnnnnnnnnnnnnnnnnnnnnnnnnnnnnnnnnnnnnnnnnnnnnnnnnnnnnnnnnnnnnnnnnnnnnnnnnnnnnnnnnnnnnnnnnnnnnnnnnnnnnnnnnnnnnnnnnnnnnnnnnnnnnnnnnnnnnnnnnnnnnnnnnnnnnnnnnnnnnnnnnnnnnnnnnnnnnnnnnnnnnnnnnnnnnnnnnnnnnnnnnnnnnnnnnnnnnnnnnnnnnnnnnnnnnnnnnnnnnnnnnnnnnnnnnnnnnnnnnnnnnnnnnnnnnnnnnnnnnnnnnnnnnnnnnnnnnnnnnnnnnnnnnnnnnnnnnnnnnnnnnnnnnnnnnnnnnnnnnnnnnnnnnnnnnnnnnnnnnnnnnnnnnnnnnnnnnnnnnnnnnnnnnnnnnnnnnnnnnnnnnnnnnnnnnnnnnnnnnnnnnnnnnnnnnnnnnnnnnnnnnnnnnnnnnnnnnnnnnnnnnnnnnnnnnnnnnnnnnnnnnnnnnnnnnnnnnnnnnnnnnnnnnnnnnnnnnnnnnnnnnnnnnnnnnnnnnnnnnnnnnnnnnnnnnnnnnnnnnnnnnnnnnnnnnnnnnnnnnnnnnnnnnnnnnnnnnnnnnnnnnnnnnnnnnnnnnnnnnnnnnnnnnnnnnnnnnnnnnnnnnnnnnnnnnnnnnnnnnnnnnnnnnnnnnnnnnnnnnnnnnnnnnnnnnnnnnnnnnnnnnnnnnnnnnnnnnnnnnnnnnnnnnnnnnnnnnnnnnnnnnnnnnnnnnnnnnnnnnnnnnnnnnnnnnnnnnnnnnnnnnnnnnnnnnnnnnnnnnnnnnnnnnnnnnnnnnnnnnnnnnnnnnnnnnnnnnnnnnnnnnnnnnnnnnnnnnnnnnnnnnnnnnnnnnnnnnnnnnnnnnnnnnnnnnnnnnnnnnnnnnnnnnnnnnnnnnnnnnnnnnnnnnnnnnnnnnnnnnnnnnnnnnnnnnnnnnnnnnnnnnnnnnnnnnnnnnnnnnnnnnnnnnnnnnnnnnnnnnnnnnnnnnnnnnnnnnnnnnnnnnnnnnnnnnnnnnnnnnnnnnnnnnnnnnnnnnnnnnnnnnnnnnnnnnnnnnnnnnnnnnnnnnnnnnnnnnnnnnnnnnnnnnnnnnnnnnnnnnnnnnnnnnnnnnnnnnnnnnnnnnnnnnnnnnnnnnnnnnnnnnnnnnnnnnnnnnnnnnnnnnnnnnnnnnnnnnnnnnnnnnnnnnnnnnnnnnnnnnnnnnnnnnnnnnnnnnnnnnnnnnnnnnnnnnnnnnnnnnnnnnnnnnnnnnnnnnnnnnnnnnnntgaacagcagcagcttgaacgcagcgtcgccgcccttaaacgacgcgctacagctttgggatttaccatcaccccagtcgcgtcgggggcttaaaaataaggctgaacgagttttgtttcttgtgagttgttctattgaccaagaaagcggtgaagtgggtcaagcaggcaagccgcacagcggcggctcgcaaatatgcgccgtccaggcgaattcccccggccacaccacccgaggacaagtgcagtagatttccttttagtccgacagactcctagaagccacccgtgaatccctctccttcatcgcctcactgcgtcccaatcacagcattgatcccgacctgattctgaaaaataaacacggcaagttacaccacaagttcgacacctcgctgaccaacgtaatgaacagttacacactactcaccgcgccgacggtgacctggtatgcagaaggcaatgccgagctcatttcatgcctgctatcgcccgtgcaatttattggcaagcggcgtgcctctggtttttggttgcgtctcgcattggcaagttgaagccgatgaactggatggtatcgaaggaatgttcggtgaagcgctgcgtccggtgccgattgacttgttcgagggcgacacttcccacccgattgttgatgccgcctggcagcctgcctactggaatcccaatcatcggacggcctgctatgcgccagtttaaggacgtgcaatgctgagttttttcaatgaaaattttggccgtcatctgctgttgcgcaccgatatcagcttgaaattgagcagcggccgcaacgcagcatcagcaccggagacattatcggtttcgagttgcgcgcctgtgtcagcaaaaaactcaaaggccgtcacatctactttcgcacctcggattggcaacgtcggcatagctggatggaacgaaagagggaggcgcatggatttacgcttatcaccgtacattgcagcgcctcgatgcaaaccgtgcagactggcgagagacaatttacggttgatcagacggtctacaccggggttctcaaagtaacggacactgaacgttttaacgcagccctcgccaatggcatcggcattaagacccgtgctttcggctttggcatgttggttatttaacagaaggaatcagtatgaaatctatcatcattaacgccacacttaccaccatcggctccttgtctatcgccttgtctatcgccttgccggtctctgaaggtcagcagggcaacaattcccatcgtcacgcgcggcattgatgtagcgggcaacaagcaacaaaccggctacctgccagccagcacgctacgcggatttttacgcgcgccatcgtggtcgaacaaatgacgcaagccgcccccgcagggcatcactacaccctgcaaaaagcctacgccgacttgattggacaggatgccacctccgaatccagtgacgatattgatctgctcaagttgcgtcaaacccgtgaggacaacgcagtactcgatttatttggctcaggtctaggcattaaatcgcgcctgctggtgtcgcatttcttaccgacacataacgtattaccggaagtcttcaccggcgtgcgcaaggatttggacgataccgacggcgtgctggagctgatttctgaagcggatcgcgcgcgttatccggggcgttccgacgcgaacagcaaacgcgcggccgctgtaacggtggtaaaaggactggaggcaaagttgcgcaaagccaaaaaggccggtgagtcactggtcgaattggaactcgcgcggcaagcggcacaggatattgtcgaacgctacgaatccgacatgggcgagatgaccaatttttcacgcacgctgaccaactattttgccctcccggcaggcatcaaactcaaaggccgattagtgattgagaaagcgcgtgagcgtgatctggccatgatcgaactcgcgctgaatagactttcacagcgtccgattcttggcgcgcaaagcgcgcgcggctgcggggaaattgccggcgtattggatgtattagtggatggcctgcttgccaaaaaaatcaccatctgcgcatggcaagcagcgattattagcaatttttctgctgtcgaatcttgaaaataggtttaataatcaatgcataacaacagattggatcaagccaccccttgtttgggtgcttactataaataaaaatctggcattgtttcacgtgaaacaatcggtttggtcgtttacgaaaaagggaagttgaatgttccgttctgccgagcaaggtaattttgccgctatcgtcgcccggcacatcgcctcggctgacgcaccgttattgctggaaggcggcacggggatcggtaaaactcgtgcctatctttccgcgctgattcaatccggtttgcgcgtcactatcgtgctgcctacccatcagttgattgaccagatgttggcctcaaacgacttggcggcgacgcgaagcgcggccagtattgccgcctttcgtccagcgcgactatttgaaaattggtcggactatgaagctaataagcgcgccgcaatggccgcaaccgtgatgttttgcacagcggccagcgtcatcattgatcagcgtctgggcggcgaatataacggcgcaacaaaccgcgactatttgttgtttgatgaagccgatcaactaccggacatggccgcattgcaaagcgacttcaccattacacaggcggaactgacagcgttgggcataacactcagctgcgtgactgaagccttgcaagccattttggtcaaagcgccaaacgtggttgagccggaaaccagagccgccgcacgcatcattctcgatgccatcgagcaaccagcgtggtatcagtccgctggtgtaagcgatgaaggcgacattatgctgacgcacagcttgcccggtcgtttactgaaataaatcagcaattcagcccatttcgcctttgtctctgccacgctaaccgtcgccagacagctcaaggattttcaaaattcgatgggcattgcgacggtaagtaacttgtcgggcgtgatagaaccggagcgtcacggtacgcttgatttccactttatgccggtggtggttgataccgaggaatggcgcagtgccgtcatccgaatggcgaacgaagcgcctaaaccggtgctgatcgcgaccacatcacaccgtttttccagcctgctcggcgaacaattatcaggtgcaacggtaaggtcggacagcgaatccaccgctcacgccgccgtgcgcgtttcagccaatgggttttttattgcagccggtgcctgggcagggctggatacgccgttgcgctggcgttcgatcatcgtgccgcgcgtgccatacggacaaccagtggtgatagacggcgaaaccaccacccgttatttcgatgcgcacaacacggcgattcgccgtttgcgccaggtgataggccgtggtttacgttcggcggatgcaatctgtagcgtttacatcctcgatggcagggctgaaaaattaacgggctttgtaccggagcgtttttccgccgcatgggcatcacgcaaaacgtatttggagggggcgaggcaagcgctgattttgagcaggaacgaacgctatcccgccgtccgtcgtgccgcactcaattactatggtcgaaaatgtatggcgtgtagctttgtgccgcgcgtggatgcacaactggacgtgcatcatctcgacccgattgccgaaggtgttcgctgcatcaggattgaggatgtggtcgttttgtgtgcaaactgtcaccgtctggttcacgctacccatccccctttagcactcaccgatctaattgcgctactcaacgcaacaatatgattatccttaacgtaaaactcgcgcagcgacgaactgtacccctcgccctctgggagaggggggacgggggtgagggaacgggcatggcgggttttatcatcaggggtggttacttttccatgcccgttagatttttttcaattaaattcccgttagctaacggttttccctagcagcctgtcggacatgatgttaaatcatccgactttcctggcaagccggaagaatttgttcccgatttcataaaaataaccttcaggttgtcataaaaatccatttttggcgttgaagagcggttgttttcgttctcagcatgctactttcc

SEQ ID NO: 267 - DNA, 11173 bp, Artificial Sequence
  Synthetic Oligonucleotide
  misc_feature (1)..(7101): n is a, c, g, or t
nnnnnnnnnnnnnnnnnnnnnnnnnnnnnnnnnnnnnnnnnnnnnnnnnnnnnnnnnnnnnnnnnnnnnnnnnnnnnnnnnnnnnnnnnnnnnnnnnnnnnnnnnnnnnnnnnnnnnnnnnnnnnnnnnnnnnnnnnnnnnnnnnnnnnnnnnnnnnnnnnnnnnnnnnnnnnnnnnnnnnnnnnnnnnnnnnnnnnnnnnnnnnnnnnnnnnnnnnnnnnnnnnnnnnnnnnnnnnnnnnnnnnnnnnnnnnnnnnnnnnnnnnnnnnnnnnnnnnnnnnnnnnnnnnnnnnnnnnnnnnnnnnnnnnnnnnnnnnnnnnnnnnnnnnnnnnnnnnnnnnnnnnnnnnnnnnnnnnnnnnnnnnnnnnnnnnnnnnnnnnnnnnnnnnnnnnnnnnnnnnnnnnnnnnnnnnnnnnnnnnnnnnnnnnnnnnnnnnnnnnnnnnnnnnnnnnnnnnnnnnnnnnnnnnnnnnnnnnnnnnnnnnnnnnnnnnnnnnnnnnnnnnnnnnnnnnnnnnnnnnnnnnnnnnnnnnnnnnnnnnnnnnnnnnnnnnnnnnnnnnnnnnnnnnnnnnnnnnnnnnnnnnnnnnnnnnnnnnnnnnnnnnnnnnnnnnnnnnnnnnnnnnnnnnnnnnnnnnnnnnnnnnnnnnnnnnnnnnnnnnnnnnnnnnnnnnnnnnnnnnnnnnnnnnnnnnnnnnnnnnnnnnnnnnnnnnnnnnnnnnnnnnnnnnnnnnnnnnnnnnnnnnnnnnnnnnnnnnnnnnnnnnnnnnnnnnnnnnnnnnnnnnnnnnnnnnnnnnnnnnnnnnnnnnnnnnnnnnnnnnnnnnnnnnnnnnnnnnnnnnnnnnnnnnnnnnnnnnnnnnnnnnnnnnnnnnnnnnnnnnnnnnnnnnnnnnnnnnnnnnnnnnnnnnnnnnnnnnnnnnnnnnnnnnnnnnnnnnnnnnnnnnnnnnnnnnnnnnnnnnnnnnnnnnnnnnnnnnnnnnnnnnnnnnnnnnnnnnnnnnnnnnnnnnnnnnnnnnnnnnnnnnnnnnnnnnnnnnnnnnnnnnnnnnnnnnnnnnnnnnnnnnnnnnnnnnnnnnnnnnnnnnnnnnnnnnnnnnnnnnnnnnnnnnnnnnnnnnnnnnnnnnnnnnnnnnnnnnnnnnnnnnnnnnnnnnnnnnnnnnnnnnnnnnnnnnnnnnnnnnnnnnnnnnnnnnnnnnnnnnnnnnnnnnnnnnnnnnnnnnnnnnnnnnnnnnnnnnnnnnnnnnnnnnnnnnnnnnnnnnnnnnnnnnnnnnnnnnnnnnnnnnnnnnnnnnnnnnnnnnnnnnnnnnnnnnnnnnnnnnnnnnnnnnnnnnnnnnnnnnnnnnnnnnnnnnnnnnnnnnnnnnnnnnnnnnnnnnnnnnnnnnnnnnnnnnnnnnnnnnnnnnnnnnnnnnnnnnnnnnnnnnnnnnnnnnnnnnnnnnnnnnnnnnnnnnnnnnnnnnnnnnnnnnnnnnnnnnnnnnnnnnnnnnnnnnnnnnnnnnnnnnnnnnnnnnnnnnnnnnnnnnnnnnnnnnnnnnnnnnnnnnnnnnnnnnnnnnnnnnnnnnnnnnnnnnnnnnnnnnnnnnnnnnnnnnnnnnnnnnnnnnnnnnnnnnnnnnnnnnnnnnnnnnnnnnnnnnnnnnnnnnnnnnnnnnnnnnnnnnnnnnnnnnnnnnnnnnnnnnnnnnnnnnnnnnnnnnnnnnnnnnnnnnnnnnnnnnnnnnnnnnnnnnnnnnnnnnnnnnnnnnnnnnnnnnnnnnnnnnnnnnnnnnnnnnnnnnnnnnnnnnnnnnnnnnnnnnnnnnnnnnnnnnnnnnnnnnnnnnnnnnnnnnnnnnnnnnnnnnnnnnnnnnnnnnnnnnnnnnnnnnnnnnnnnnnnnnnnnnnnnnnnnnnnnnnnnnnnnnnnnnnnnnnnnnnnnnnnnnnnnnnnnnnnnnnnnnnnnnnnnnnnnnnnnnnnnnnnnnnnnnnnnnnnnnnnnnnnnnnnnnnnnnnnnnnnnnnnnnnnnnnnnnnnnnnnnnnnnnnnnnnnnnnnnnnnnnnnnnnnnnnnnnnnnnnnnnnnnnnnnnnnnnnnnnnnnnnnnnnnnnnnnnnnnnnnnnnnnnnnnnnnnnnnnnnnnnnnnnnnnnnnnnnnnnnnnnnnnnnnnnnnnnnnnnnnnnnnnnnnnnnnnnnnnnnnnnnnnnnnnnnnnnnnnnnnnnnnnnnnnnnnnnnnnnnnnnnnnnnnnnnnnnnnnnnnnnnnnnnnnnnnnnnnnnnnnnnnnnnnnnnnnnnnnnnnnnnnnnnnnnnnnnnnnnnnnnnnnnnnnnnnnnnnnnnnnnnnnnnnnnnnnnnnnnnnnnnnnnnnnnnnnnnnnnnnnnnnnnnnnnnnnnnnnnnnnnnnnnnnnnnnnnnnnnnnnnnnnnnnnnnnnnnnnnnnnnnnnnnnnnnnnnnnnnnnnnnnnnnnnnnnnnnnnnnnnnnnnnnnnnnnnnnnnnnnnnnnnnnnnnnnnnnnnnnnnnnnnnnnnnnnnnnnnnnnnnnnnnnnnnnnnnnnnnnnnnnnnnnnnnnnnnnnnnnnnnnnnnnnnnnnnnnnnnnnnnnnnnnnnnnnnnnnnnnnnnnnnnnnnnnnnnnnnnnnnnnnnnnnnnnnnnnnnnnnnnnnnnnnnnnnnnnnnnnnnnnnnnnnnnnnnnnnnnnnnnnnnnnnnnnnnnnnnnnnnnnnnnnnnnnnnnnnnnnnnnnnnnnnnnnnnnnnnnnnnnnnnnnnnnnnnnnnnnnnnnnnnnnnnnnnnnnnnnnnnnnnnnnnnnnnnnnnnnnnnnnnnnnnnnnnnnnnnnnnnnnnnnnnnnnnnnnnnnnnnnnnnnnnnnnnnnnnnnnnnnnnnnnnnnnnnnnnnnnnnnnnnnnnnnnnnnnnnnnnnnnnnnnnnnnnnnnnnnnnnnnnnnnnnnnnnnnnnnnnnnnnnnnnnnnnnnnnnnnnnnnnnnnnnnnnnnnnnnnnnnnnnnnnnnnnnnnnnnnnnnnnnnnnnnnnnnnnnnnnnnnnnnnnnnnnnnnnnnnnnnnnnnnnnnnnnnnnnnnnnnnnnnnnnnnnnnnnnnnnnnnnnnnnnnnnnnnnnnnnnnnnnnnnnnnnnnnnnnnnnnnnnnnnnnnnnnnnnnnnnnnnnnnnnnnnnnnnnnnnnnnnnnnnnnnnnnnnnnnnnnnnnnnnnnnnnnnnnnnnnnnnnnnnnnnnnnnnnnnnnnnnnnnnnnnnnnnnnnnnnnnnnnnnnnnnnnnnnnnnnnnnnnnnnnnnnnnnnnnnnnnnnnnnnnnnnnnnnnnnnnnnnnnnnnnnnnnnnnnnnnnnnnnnnnnnnnnnnnnnnnnnnnnnnnnnnnnnnnnnnnnnnnnnnnnnnnnnnnnnnnnnnnnnnnnnnnnnnnnnnnnnnnnnnnnnnnnnnnnnnnnnnnnnnnnnnnnnnnnnnnnnnnnnnnnnnnnnnnnnnnnnnnnnnnnnnnnnnnnnnnnnnnnnnnnnnnnnnnnnnnnnnnnnnnnnnnnnnnnnnnnnnnnnnnnnnnnnnnnnnnnnnnnnnnnnnnnnnnnnnnnnnnnnnnnnnnnnnnnnnnnnnnnnnnnnnnnnnnnnnnnnnnnnnnnnnnnnnnnnnnnnnnnnnnnnnnnnnnnnnnnnnnnnnnnnnnnnnnnnnnnnnnnnnnnnnnnnnnnnnnnnnnnnnnnnnnnnnnnnnnnnnnnnnnnnnnnnnnnnnnnnnnnnnnnnnnnnnnnnnnnnnnnnnnnnnnnnnnnnnnnnnnnnnnnnnnnnnnnnnnnnnnnnnnnnnnnnnnnnnnnnnnnnnnnnnnnnnnnnnnnnnnnnnnnnnnnnnnnnnnnnnnnnnnnnnnnnnnnnnnnnnnnnnnnnnnnnnnnnnnnnnnnnnnnnnnnnnnnnnnnnnnnnnnnnnnnnnnnnnnnnnnnnnnnnnnnnnnnnnnnnnnnnnnnnnnnnnnnnnnnnnnnnnnnnnnnnnnnnnnnnnnnnnnnnnnnnnnnnnnnnnnnnnnnnnnnnnnnnnnnnnnnnnnnnnnnnnnnnnnnnnnnnnnnnnnnnnnnnnnnnnnnnnnnnnnnnnnnnnnnnnnnnnnnnnnnnnnnnnnnnnnnnnnnnnnnnnnnnnnnnnnnnnnnnnnnnnnnnnnnnnnnnnnnnnnnnnnnnnnnnnnnnnnnnnnnnnnnnnnnnnnnnnnnnnnnnnnnnnnnnnnnnnnnnnnnnnnnnnnnnnnnnnnnnnnnnnnnnnnnnnnnnnnnnnnnnnnnnnnnnnnnnnnnnnnnnnnnnnnnnnnnnnnnnnnnnnnnnnnnnnnnnnnnnnnnnnnnnnnnnnnnnnnnnnnnnnnnnnnnnnnnnnnnnnnnnnnnnnnnnnnnnnnnnnnnnnnnnnnnnnnnnnnnnnnnnnnnnnnnnnnnnnnnnnnnnnnnnnnnnnnnnnnnnnnnnnnnnnnnnnnnnnnnnnnnnnnnnnnnnnnnnnnnnnnnnnnnnnnnnnnnnnnnnnnnnnnnnnnnnnnnnnnnnnnnnnnnnnnnnnnnnnnnnnnnnnnnnnnnnnnnnnnnnnnnnnnnnnnnnnnnnnnnnnnnnnnnnnnnnnnnnnnnnnnnnnnnnnnnnnnnnnnnnnnnnnnnnnnnnnnnnnnnnnnnnnnnnnnnnnnnnnnnnnnnnnnnnnnnnnnnnnnnnnnnnnnnnnnnnnnnnnnnnnnnnnnnnnnnnnnnnnnnnnnnnnnnnnnnnnnnnnnnnnnnnnnnnnnnnnnnnnnnnnnnnnnnnnnnnnnnnnnnnnnnnnnnnnnnnnnnnnnnnnnnnnnnnnnnnnnnnnnnnnnnnnnnnnnnnnnnnnnnnnnnnnnnnnnnnnnnnnnnnnnnnnnnnnnnnnnnnnnnnnnnnnnnnnnnnnnnnnnnnnnnnnnnnnnnnnnnnnnnnnnnnnnnnnnnnnnnnnnnnnnnnnnnnnnnnnnnnnnnnnnnnnnnnnnnnnnnnnnnnnnnnnnnnnnnnnnnnnnnnnnnnnnnnnnnnnnnnnnnnnnnnnnnnnnnnnnnnnnnnnnnnnnnnnnnnnnnnnnnnnnnnnnnnnnnnnnnnnnnnnnnnnnnnnnnnnnnnnnnnnnnnnnnnnnnnnnnnnnnnnnnnnnnnnnnnnnnnnnnnnnnnnnnnnnnnnnnnnnnnnnnnnnnnnnnnnnnnnnnnnnnnnnnnnnnnnnnnnnnnnnnnnnnnnnnnnnnnnnnnnnnnnnnnnnnnnnnnnnnnnnnnnnnnnnnnnnnnnnnnnnnnnnnnnnnnnnnnnnnnnnnnnnnnnnnnnnnnnnnnnnnnnnnnnnnnnnnnnnnnnnnnnnnnnnnnnnnnnnnnnnnnnnnnnnnnnnnnnnnnnnnnnnnnnnnnnnnnnnnnnnnnnnnnnnnnnnnnnnnnnnnnnnnnnnnnnnnnnnnnnnnnnnnnnnnnnnnnnnnnnnnnnnnnnnnnnnnnnnnnnnnnnnnnnnnnnnnnnnnnnnnnnnnnnnnnnnnnnnnnnnnnnnnnnnnnnnnnnnnnnnnnnnnnnnnnnnnnnnnnnnnnnnnnnnnnnnnnnnnnnnnnnnnnnnnnnnnnnnnnnnnnnnnnnnnnnnnnnnnnnnnnnnnnnnnnnnnnnnnnnnnnnnnnnnnnnnnnnnnnnnnnnnnnnnnnnnnnnnnnnnnnnnnnnnnnnnnnnnnnnnnnnnnnnnnnnnnnnnnnnnnnnnnnnnnnnnnnnnnnnnnnnnnnnnnnnnnnnnnnnnnnnnnnnnnnnnnnnnnnnnnnnnnnnnnnnnnnnnnnnnnnnnnnnnnnnnnnnnnnnnnnnnnnnnnnnnnnnnnnnnnnnnnnnnnnnnnnnnnnnnnnnnnnnnnnnnnnnnnnnnnnnnnnnnnnnnnnnnnnnnnnnnnnnnnnnnnnnnnnnnnnnnnnnnnnnnnnnnnnnnnnnnnnnnnnnnnnnnnnnnnnnnnnnnnnnnnnnnnnnnnnnnnnnnnnnnnnnnnnnnnnnnnnnnnnnnnnnnnnnnnnnnnnnnnnnnnnnnnnnnnnnnnnnnnnnnnnnnnnnnnnnnnnnnnnnnnnnnnnnnnnnnnnnnnnnnnnnnnnnnnnnnnnnnnnnnnnnnnnnnnnnnnnnnnnnnnnnnnnnnnnnnnnnnnnnnnnnnnnnnnnnnnnnnnnnnnnnnnnnnnnnnnnnnnnnnnnnnnnnnnnnnnnnnnnnnnnnnnnnnnnnnnnnnnnnnnnnnnnnnnnnnnnnnnnnnnnnnnnnnnnnnnnnnnnnnnnnnnnnnnnnnnnnnnnnnnnnnnnnnnnnnnnnnnnnnnnnnnnnnnnnnnnnnnnnnnnnnnnnnnnnnnnnnnnnnnnnnnnnnnnnnnnnnnnnnnnnnnnnnnnnnnnnnnnnnnnnnnnnnnnnnnnnnnnnnnnnnnnnnnnnnnnnnnnnnnnnnnnnnnnnnnnnnnnnnnnnnnnnnnnnnnnnnnnnnnnnnnnnnnnnnnnnnnnnnnnnnnnnnnnnnnnnnnnnnnnnnnnnnnnnnnnnnnnnnnnnnnnnnnnnnnnnnnnnnnnnnnnnnnnnnnnnnnnnnnnnnnnnnnnnnnnnnnnnnnnnnnnnnnnnnnnnnnnnnnnnnnnnnnnnnnnnnnnnnnnnnnnnnnnnnnnnnnnnnnnnnnnnnnnnnnnnnnnnnnnnnnnnnnnnnnnnnnnnnnnnnnnnnnnnnnnnnnnnnnnnnnnnnnnnnnnnnnnnnnnnnnnnnnnnnnnnnnnnnnnnnnnnnnnnnnnnnnnnnnnnnnnnnnnnnnnnnnnnnnnnnnnnnnnnnnnnnnnnnnnnnnnnnnnnnnnnnnnnnnnnnnnnnnnnnnnnnnnnnnnnnnnnnnnnnnnnnnnnnnnnnnnnnnnnnnnnnnnnnnnnnnnnnnnnnnnnnnnnnnnnnnnnnnnnnnnnnnnnnnnnnnnnnnnnnnnnnnnnnnnnnnnnnnnnnnnnnnnnnnnnnnnnnnnnnnnnnnnnnnnnnnnnnnnnnnnnnnnnnnnnnnnnnnnnnnnnnnnnnnnnnnnnnnnnnnnnnnnnnnnnnnnnnnnnnnnnnnnnnnnnnnnnnnnnnnnnnnnnnnnnnnnnnnnnnnnnnnnnnnnnnnnnnnnnnnnnnnnnnattgaccaagaaagcggtgaagtgggtcaagcaggcaagccgcacagcggcggctcgcaaatatgcgccgtccaggcgaattcccccggccacaccacccgaggacaagtgcagtagatttccttttagtccgacagactcctagaagccacccgtgaatccctctccttcatcgcctcactgcgtcccaatcacagcattgatcccgacctgattctgaaaaataaacacggcaagttacaccacaagttcgacacctcgctgaccaacgtaatgaacagttacacactactcaccgcgccgacggtgacctggtatgcagaaggcaatgccgagctcatttcatgcctgctatcgcccgtgcaatttattggcaagcggcgtgcctctggtttttggttgcgtctcgcattggcaagttgaagccgatgaactggatggtatcgaaggaatgttcggtgaagcgctgcgtccggtgccgattgacttgttcgagggcgacacttcccacccgattgttgatgccgcctggcagcctgcctactggaatcccaatcatcggacggcctgctatgcgccagtttaaggacgtgcaatgctgagttttttcaatgaaaattttggccgtcatctgctgttgcgcaccgatatcagcttgaaattgagcagcggccgcaacgcagcatcagcaccggagacattatcggtttcgagttgcgcgcctgtgtcagcaaaaaactcaaaggccgtcacatctactttcgcacctcggattggcaacgtcggcatagctggatggaacgaaagagggaggcgcatggatttacgcttatcaccgtacattgcagcgcctcgatgcaaaccgtgcagactggcgagagacaatttacggttgatcagacggtctacaccggggttctcaaagtaacggacactgaacgttttaacgcagccctcgccaatggcatcggcattaagacccgtgctttcggctttggcatgttggttatttaacagaaggaatcagtatgaaatctatcatcattaacgccacacttaccaccatcggctccttgtctatcgccttgtctatcgccttgccggtctctgaaggtcagcagggcaacaattcccatcgtcacgcgcggcattgatgtagcgggcaacaagcaacaaaccggctacctgccagccagcacgctacgcggatttttacgcgcgccatcgtggtcgaacaaatgacgcaagccgcccccgcagggcatcactacaccctgcaaaaagcctacgccgacttgattggacaggatgccacctccgaatccagtgacgatattgatctgctcaagttgcgtcaaacccgtgaggacaacgcagtactcgatttatttggctcaggtctaggcattaaatcgcgcctgctggtgtcgcatttcttaccgacacataacgtattaccggaagtcttcaccggcgtgcgcaaggatttggacgataccgacggcgtgctggagctgatttctgaagcggatcgcgcgcgttatccggggcgttccgacgcgaacagcaaacgcgcggccgctgtaacggtggtaaaaggactggaggcaaagttgcgcaaagccaaaaaggccggtgagtcactggtcgaattggaactcgcgcggcaagcggcacaggatattgtcgaacgctacgaatccgacatgggcgagatgaccaatttttcacgcacgctgaccaactattttgccctcccggcaggcatcaaactcaaaggccgattagtgattgagaaagcgcgtgagcgtgatctggccatgatcgaactcgcgctgaatagactttcacagcgtccgattcttggcgcgcaaagcgcgcgcggctgcggggaaattgccggcgtattggatgtattagtggatggcctgcttgccaaaaaaatcaccatctgcgcatggcaagcagcgattattagcaatttttctgctgtcgaatcttgaaaataggtttaataatcaatgcataacaacagattggatcaagccaccccttgtttgggtgcttactataaataaaaatctggcattgtttcacgtgaaacaatcggtttggtcgtttacgaaaaagggaagttgaatgttccgttctgccgagcaaggtaattttgccgctatcgtcgcccggcacatcgcctcggctgacgcaccgttattgctggaaggcggcacggggatcggtaaaactcgtgcctatctttccgcgctgattcaatccggtttgcgcgtcactatcgtgctgcctacccatcagttgattgaccagatgttggcctcaaacgacttggcggcgacgcgaagcgcggccagtattgccgcctttcgtccagcgcgactatttgaaaattggtcggactatgaagctaataagcgcgccgcaatggccgcaaccgtgatgttttgcacagcggccagcgtcatcattgatcagcgtctgggcggcgaatataacggcgcaacaaaccgcgactatttgttgtttgatgaagccgatcaactaccggacatggccgcattgcaaagcgacttcaccattacacaggcggaactgacagcgttgggcataacactcagctgcgtgactgaagccttgcaagccattttggtcaaagcgccaaacgtggttgagccggaaaccagagccgccgcacgcatcattctcgatgccatcgagcaaccagcgtggtatcagtccgctggtgtaagcgatgaaggcgacattatgctgacgcacagcttgcccggtcgtttactgaaataaatcagcaattcagcccatttcgcctttgtctctgccacgctaaccgtcgccagacagctcaaggattttcaaaattcgatgggcattgcgacggtaagtaacttgtcgggcgtgatagaaccggagcgtcacggtacgcttgatttccactttatgccggtggtggttgataccgaggaatggcgcagtgccgtcatccgaatggcgaacgaagcgcctaaaccggtgctgatcgcgaccacatcacaccgtttttccagcctgctcggcgaacaattatcaggtgcaacggtaaggtcggacagcgaatccaccgctcacgccgccgtgcgcgtttcagccaatgggttttttattgcagccggtgcctgggcagggctggatacgccgttgcgctggcgttcgatcatcgtgccgcgcgtgccatacggacaaccagtggtgatagacggcgaaaccaccacccgttatttcgatgcgcacaacacggcgattcgccgtttgcgccaggtgataggccgtggtttacgttcggcggatgcaatctgtagcgtttacatcctcgatggcagggctgaaaaattaacgggctttgtaccggagcgtttttccgccgcatgggcatcacgcaaaacgtatttggagggggcgaggcaagcgctgattttgagcaggaacgaacgctatcccgccgtccgtcgtgccgcactcaattactatggtcgaaaatgtatggcgtgtagctttgtgccgcgcgtggatgcacaactggacgtgcatcatctcgacccgattgccgaaggtgttcgctgcatcaggattgaggatgtggtcgttttgtgtgcaaactgtcaccgtctggttcacgctacccatccccctttagcactcaccgatctaattgcgctactcaacgcaacaatatgattatccttaacgtaaaactcgcgcagcgacgaactgtacccctcgccctctgggagaggggggacgggggtgagggaacgggcatggcgggttttatcatcaggggtggttacttttccatgcccgttagatttttttcaattaaattcccgttagctaacggttttccctagcagcctgtcggacatgatgttaaatcatccgactttcctggcaagccggaagaatttgttcccgatttcataaaaataaccttcaggttgtcataaaaatccatttttggcgttgaagagcggttgttttcgttctcagcatgctactttcc

SEQ ID NO: 268 - DNA, 11173 bp, Artificial Sequence
  Synthetic Oligonucleotide
  misc_feature (1)..(6188): n is a, c, g, or t
nnnnnnnnnnnnnnnnnnnnnnnnnnnnnnnnnnnnnnnnnnnnnnnnnnnnnnnnnnnnnnnnnnnnnnnnnnnnnnnnnnnnnnnnnnnnnnnnnnnnnnnnnnnnnnnnnnnnnnnnnnnnnnnnnnnnnnnnnnnnnnnnnnnnnnnnnnnnnnnnnnnnnnnnnnnnnnnnnnnnnnnnnnnnnnnnnnnnnnnnnnnnnnnnnnnnnnnnnnnnnnnnnnnnnnnnnnnnnnnnnnnnnnnnnnnnnnnnnnnnnnnnnnnnnnnnnnnnnnnnnnnnnnnnnnnnnnnnnnnnnnnnnnnnnnnnnnnnnnnnnnnnnnnnnnnnnnnnnnnnnnnnnnnnnnnnnnnnnnnnnnnnnnnnnnnnnnnnnnnnnnnnnnnnnnnnnnnnnnnnnnnnnnnnnnnnnnnnnnnnnnnnnnnnnnnnnnnnnnnnnnnnnnnnnnnnnnnnnnnnnnnnnnnnnnnnnnnnnnnnnnnnnnnnnnnnnnnnnnnnnnnnnnnnnnnnnnnnnnnnnnnnnnnnnnnnnnnnnnnnnnnnnnnnnnnnnnnnnnnnnnnnnnnnnnnnnnnnnnnnnnnnnnnnnnnnnnnnnnnnnnnnnnnnnnnnnnnnnnnnnnnnnnnnnnnnnnnnnnnnnnnnnnnnnnnnnnnnnnnnnnnnnnnnnnnnnnnnnnnnnnnnnnnnnnnnnnnnnnnnnnnnnnnnnnnnnnnnnnnnnnnnnnnnnnnnnnnnnnnnnnnnnnnnnnnnnnnnnnnnnnnnnnnnnnnnnnnnnnnnnnnnnnnnnnnnnnnnnnnnnnnnnnnnnnnnnnnnnnnnnnnnnnnnnnnnnnnnnnnnnnnnnnnnnnnnnnnnnnnnnnnnnnnnnnnnnnnnnnnnnnnnnnnnnnnnnnnnnnnnnnnnnnnnnnnnnnnnnnnnnnnnnnnnnnnnnnnnnnnnnnnnnnnnnnnnnnnnnnnnnnnnnnnnnnnnnnnnnnnnnnnnnnnnnnnnnnnnnnnnnnnnnnnnnnnnnnnnnnnnnnnnnnnnnnnnnnnnnnnnnnnnnnnnnnnnnnnnnnnnnnnnnnnnnnnnnnnnnnnnnnnnnnnnnnnnnnnnnnnnnnnnnnnnnnnnnnnnnnnnnnnnnnnnnnnnnnnnnnnnnnnnnnnnnnnnnnnnnnnnnnnnnnnnnnnnnnnnnnnnnnnnnnnnnnnnnnnnnnnnnnnnnnnnnnnnnnnnnnnnnnnnnnnnnnnnnnnnnnnnnnnnnnnnnnnnnnnnnnnnnnnnnnnnnnnnnnnnnnnnnnnnnnnnnnnnnnnnnnnnnnnnnnnnnnnnnnnnnnnnnnnnnnnnnnnnnnnnnnnnnnnnnnnnnnnnnnnnnnnnnnnnnnnnnnnnnnnnnnnnnnnnnnnnnnnnnnnnnnnnnnnnnnnnnnnnnnnnnnnnnnnnnnnnnnnnnnnnnnnnnnnnnnnnnnnnnnnnnnnnnnnnnnnnnnnnnnnnnnnnnnnnnnnnnnnnnnnnnnnnnnnnnnnnnnnnnnnnnnnnnnnnnnnnnnnnnnnnnnnnnnnnnnnnnnnnnnnnnnnnnnnnnnnnnnnnnnnnnnnnnnnnnnnnnnnnnnnnnnnnnnnnnnnnnnnnnnnnnnnnnnnnnnnnnnnnnnnnnnnnnnnnnnnnnnnnnnnnnnnnnnnnnnnnnnnnnnnnnnnnnnnnnnnnnnnnnnnnnnnnnnnnnnnnnnnnnnnnnnnnnnnnnnnnnnnnnnnnnnnnnnnnnnnnnnnnnnnnnnnnnnnnnnnnnnnnnnnnnnnnnnnnnnnnnnnnnnnnnnnnnnnnnnnnnnnnnnnnnnnnnnnnnnnnnnnnnnnnnnnnnnnnnnnnnnnnnnnnnnnnnnnnnnnnnnnnnnnnnnnnnnnnnnnnnnnnnnnnnnnnnnnnnnnnnnnnnnnnnnnnnnnnnnnnnnnnnnnnnnnnnnnnnnnnnnnnnnnnnnnnnnnnnnnnnnnnnnnnnnnnnnnnnnnnnnnnnnnnnnnnnnnnnnnnnnnnnnnnnnnnnnnnnnnnnnnnnnnnnnnnnnnnnnnnnnnnnnnnnnnnnnnnnnnnnnnnnnnnnnnnnnnnnnnnnnnnnnnnnnnnnnnnnnnnnnnnnnnnnnnnnnnnnnnnnnnnnnnnnnnnnnnnnnnnnnnnnnnnnnnnnnnnnnnnnnnnnnnnnnnnnnnnnnnnnnnnnnnnnnnnnnnnnnnnnnnnnnnnnnnnnnnnnnnnnnnnnnnnnnnnnnnnnnnnnnnnnnnnnnnnnnnnnnnnnnnnnnnnnnnnnnnnnnnnnnnnnnnnnnnnnnnnnnnnnnnnnnnnnnnnnnnnnnnnnnnnnnnnnnnnnnnnnnnnnnnnnnnnnnnnnnnnnnnnnnnnnnnnnnnnnnnnnnnnnnnnnnnnnnnnnnnnnnnnnnnnnnnnnnnnnnnnnnnnnnnnnnnnnnnnnnnnnnnnnnnnnnnnnnnnnnnnnnnnnnnnnnnnnnnnnnnnnnnnnnnnnnnnnnnnnnnnnnnnnnnnnnnnnnnnnnnnnnnnnnnnnnnnnnnnnnnnnnnnnnnnnnnnnnnnnnnnnnnnnnnnnnnnnnnnnnnnnnnnnnnnnnnnnnnnnnnnnnnnnnnnnnnnnnnnnnnnnnnnnnnnnnnnnnnnnnnnnnnnnnnnnnnnnnnnnnnnnnnnnnnnnnnnnnnnnnnnnnnnnnnnnnnnnnnnnnnnnnnnnnnnnnnnnnnnnnnnnnnnnnnnnnnnnnnnnnnnnnnnnnnnnnnnnnnnnnnnnnnnnnnnnnnnnnnnnnnnnnnnnnnnnnnnnnnnnnnnnnnnnnnnnnnnnnnnnnnnnnnnnnnnnnnnnnnnnnnnnnnnnnnnnnnnnnnnnnnnnnnnnnnnnnnnnnnnnnnnnnnnnnnnnnnnnnnnnnnnnnnnnnnnnnnnnnnnnnnnnnnnnnnnnnnnnnnnnnnnnnnnnnnnnnnnnnnnnnnnnnnnnnnnnnnnnnnnnnnnnnnnnnnnnnnnnnnnnnnnnnnnnnnnnnnnnnnnnnnnnnnnnnnnnnnnnnnnnnnnnnnnnnnnnnnnnnnnnnnnnnnnnnnnnnnnnnnnnnnnnnnnnnnnnnnnnnnnnnnnnnnnnnnnnnnnnnnnnnnnnnnnnnnnnnnnnnnnnnnnnnnnnnnnnnnnnnnnnnnnnnnnnnnnnnnnnnnnnnnnnnnnnnnnnnnnnnnnnnnnnnnnnnnnnnnnnnnnnnnnnnnnnnnnnnnnnnnnnnnnnnnnnnnnnnnnnnnnnnnnnnnnnnnnnnnnnnnnnnnnnnnnnnnnnnnnnnnnnnnnnnnnnnnnnnnnnnnnnnnnnnnnnnnnnnnnnnnnnnnnnnnnnnnnnnnnnnnnnnnnnnnnnnnnnnnnnnnnnnnnnnnnnnnnnnnnnnnnnnnnnnnnnnnnnnnnnnnnnnnnnnnnnnnnnnnnnnnnnnnnnnnnnnnnnnnnnnnnnnnnnnnnnnnnnnnnnnnnnnnnnnnnnnnnnnnnnnnnnnnnnnnnnnnnnnnnnnnnnnnnnnnnnnnnnnnnnnnnnnnnnnnnnnnnnnnnnnnnnnnnnnnnnnnnnnnnnnnnnnnnnnnnnnnnnnnnnnnnnnnnnnnnnnnnnnnnnnnnnnnnnnnnnnnnnnnnnnnnnnnnnnnnnnnnnnnnnnnnnnnnnnnnnnnnnnnnnnnnnnnnnnnnnnnnnnnnnnnnnnnnnnnnnnnnnnnnnnnnnnnnnnnnnnnnnnnnnnnnnnnnnnnnnnnnnnnnnnnnnnnnnnnnnnnnnnnnnnnnnnnnnnnnnnnnnnnnnnnnnnnnnnnnnnnnnnnnnnnnnnnnnnnnnnnnnnnnnnnnnnnnnnnnnnnnnnnnnnnnnnnnnnnnnnnnnnnnnnnnnnnnnnnnnnnnnnnnnnnnnnnnnnnnnnnnnnnnnnnnnnnnnnnnnnnnnnnnnnnnnnnnnnnnnnnnnnnnnnnnnnnnnnnnnnnnnnnnnnnnnnnnnnnnnnnnnnnnnnnnnnnnnnnnnnnnnnnnnnnnnnnnnnnnnnnnnnnnnnnnnnnnnnnnnnnnnnnnnnnnnnnnnnnnnnnnnnnnnnnnnnnnnnnnnnnnnnnnnnnnnnnnnnnnnnnnnnnnnnnnnnnnnnnnnnnnnnnnnnnnnnnnnnnnnnnnnnnnnnnnnnnnnnnnnnnnnnnnnnnnnnnnnnnnnnnnnnnnnnnnnnnnnnnnnnnnnnnnnnnnnnnnnnnnnnnnnnnnnnnnnnnnnnnnnnnnnnnnnnnnnnnnnnnnnnnnnnnnnnnnnnnnnnnnnnnnnnnnnnnnnnnnnnnnnnnnnnnnnnnnnnnnnnnnnnnnnnnnnnnnnnnnnnnnnnnnnnnnnnnnnnnnnnnnnnnnnnnnnnnnnnnnnnnnnnnnnnnnnnnnnnnnnnnnnnnnnnnnnnnnnnnnnnnnnnnnnnnnnnnnnnnnnnnnnnnnnnnnnnnnnnnnnnnnnnnnnnnnnnnnnnnnnnnnnnnnnnnnnnnnnnnnnnnnnnnnnnnnnnnnnnnnnnnnnnnnnnnnnnnnnnnnnnnnnnnnnnnnnnnnnnnnnnnnnnnnnnnnnnnnnnnnnnnnnnnnnnnnnnnnnnnnnnnnnnnnnnnnnnnnnnnnnnnnnnnnnnnnnnnnnnnnnnnnnnnnnnnnnnnnnnnnnnnnnnnnnnnnnnnnnnnnnnnnnnnnnnnnnnnnnnnnnnnnnnnnnnnnnnnnnnnnnnnnnnnnnnnnnnnnnnnnnnnnnnnnnnnnnnnnnnnnnnnnnnnnnnnnnnnnnnnnnnnnnnnnnnnnnnnnnnnnnnnnnnnnnnnnnnnnnnnnnnnnnnnnnnnnnnnnnnnnnnnnnnnnnnnnnnnnnnnnnnnnnnnnnnnnnnnnnnnnnnnnnnnnnnnnnnnnnnnnnnnnnnnnnnnnnnnnnnnnnnnnnnnnnnnnnnnnnnnnnnnnnnnnnnnnnnnnnnnnnnnnnnnnnnnnnnnnnnnnnnnnnnnnnnnnnnnnnnnnnnnnnnnnnnnnnnnnnnnnnnnnnnnnnnnnnnnnnnnnnnnnnnnnnnnnnnnnnnnnnnnnnnnnnnnnnnnnnnnnnnnnnnnnnnnnnnnnnnnnnnnnnnnnnnnnnnnnnnnnnnnnnnnnnnnnnnnnnnnnnnnnnnnnnnnnnnnnnnnnnnnnnnnnnnnnnnnnnnnnnnnnnnnnnnnnnnnnnnnnnnnnnnnnnnnnnnnnnnnnnnnnnnnnnnnnnnnnnnnnnnnnnnnnnnnnnnnnnnnnnnnnnnnnnnnnnnnnnnnnnnnnnnnnnnnnnnnnnnnnnnnnnnnnnnnnnnnnnnnnnnnnnnnnnnnnnnnnnnnnnnnnnnnnnnnnnnnnnnnnnnnnnnnnnnnnnnnnnnnnnnnnnnnnnnnnnnnnnnnnnnnnnnnnnnnnnnnnnnnnnnnnnnnnnnnnnnnnnnnnnnnnnnnnnnnnnnnnnnnnnnnnnnnnnnnnnnnnnnnnnnnnnnnnnnnnnnnnnnnnnnnnnnnnnnnnnnnnnnnnnnnnnnnnnnnnnnnnnnnnnnnnnnnnnnnnnnnnnnnnnnnnnnnnnnnnnnnnnnnnnnnnnnnnnnnnnnnnnnnnnnnnnnnnnnnnnnnnnnnnnnnnnnnnnnnnnnnnnnnnnnnnnnnnnnnnnnnnnnnnnnnnnnnnnnnnnnnnnnnnnnnnnnnnnnnnnnnnnnnnnnnnnnnnnnnnnnnnnnnnnnnnnnnnnnnnnnnnnnnnnnnnnnnnnnnnnnnnnnnnnnnnnnnnnnnnnnnnnnnnnnnnnnnnnnnnnnnnnnnnnnnnnnnnnnnnnnnnnnnnnnnnnnnnnnnnnnnnnnnnnnnnnnnnnnnnnnnnnnnnnnnnnnnnnnnnnnnnnnnnnnnnnnnnnnnnnnnnnnnnnnnnnnnnnnnnnnnnnnnnnnnnnnnnnnnnnnnnnnnnnnnnnnnnnnnnnnnnnnnnnnnnnnnnnnnnnnnnnnnnnnnnnnnnnnnnnnnnnnnnnnnnnnnnnnnnnnnnnnnnnnnnnnnnnnnnnnnnnnnnnnnnnnnnnnnnnnnnnnnnnnnnnnnnnnnnnnnnnnnnnnnnnnnnnnnnnnnnnnnnnnnnnnnnnnnnnnnnnnnnnnnnnnnnnnnnnnnnnnnnnnnnnnnnnnnnnnnnnnnnnnnnnnnnnnnnnnnnnnnnnnnnacaccgtattgcgcgtgctgggcgaccaccccaacgacaacgccagcgtggaaatttgcagcggtcgctacggcccctacgcgcgccacggcaaaatcaatgccaccctccccaaagatgtctcacctgacgaaatcaccctggaacaggcgctggaactgattgccgcaaaagccgcaaaaggcgacaccggtaagaagcctgcccgaaaaacagcgagcgccaagccacgggcagcggcgaaaccgaaagatactgctaaaccgaaggcagcagttaaacccaaggcagcggcaaagccaaaaactctggcgaaacctaaagttgcggccaaacccaaagccgccgcaaaacccaaagccgcgaccgcaaaaaaacccgccgtcaaaaagctctgagcatgtcatcattgtgagcctgtcgggcgatgcctgtcccgactctcacaaatatgtttcacgtgaaacaataccccttgccgatttggcgggtgttgggggtttttcagcaaagtcgaaatttggcatccctttttccaccctgactccccccttacccgacccttggcagcgcgttatagcgcgttttgagcaaccgcttctgcaagccaataaatacggcgcttgcagcggcagctaggtttatttcgtacaatttctctggccgacgtagaatccatccgccgcttcacgactaacgggcataaaaaagtgaccgccctcgataatcaaacccgccatgcccatttccctcacctcaatcctctcccgccagcgccgccatcccaggagtctgtcggacttgaagaatcgtagcgaaaaggtttaagcaggcaaagccgcaaagcggctgctcgcaaaatctggctgggcgagggcagattttgctggtttcgcaggtcaatagttgttctattgaccaagaaagcggtgaagtgggtcaagcaggcaagccgcacagcggcggctcgcaaatatgcgccgtccaggcgaattcccccggccacaccacccgaggacaagtgcagtagatttccttttagtccgacagactcctagaagccacccgtgaatccctctccttcatcgcctcactgcgtcccaatcacagcattgatcccgacctgattctgaaaaataaacacggcaagttacaccacaagttcgacacctcgctgaccaacgtaatgaacagttacacactactcaccgcgccgacggtgacctggtatgcagaaggcaatgccgagctcatttcatgcctgctatcgcccgtgcaatttattggcaagcggcgtgcctctggtttttggttgcgtctcgcattggcaagttgaagccgatgaactggatggtatcgaaggaatgttcggtgaagcgctgcgtccggtgccgattgacttgttcgagggcgacacttcccacccgattgttgatgccgcctggcagcctgcctactggaatcccaatcatcggacggcctgctatgcgccagtttaaggacgtgcaatgctgagttttttcaatgaaaattttggccgtcatctgctgttgcgcaccgatatcagcttgaaattgagcagcggccgcaacgcagcatcagcaccggagacattatcggtttcgagttgcgcgcctgtgtcagcaaaaaactcaaaggccgtcacatctactttcgcacctcggattggcaacgtcggcatagctggatggaacgaaagagggaggcgcatggatttacgcttatcaccgtacattgcagcgcctcgatgcaaaccgtgcagactggcgagagacaatttacggttgatcagacggtctacaccggggttctcaaagtaacggacactgaacgttttaacgcagccctcgccaatggcatcggcattaagacccgtgctttcggctttggcatgttggttatttaacagaaggaatcagtatgaaatctatcatcattaacgccacacttaccaccatcggctccttgtctatcgccttgtctatcgccttgccggtctctgaaggtcagcagggcaacaattcccatcgtcacgcgcggcattgatgtagcgggcaacaagcaacaaaccggctacctgccagccagcacgctacgcggatttttacgcgcgccatcgtggtcgaacaaatgacgcaagccgcccccgcagggcatcactacaccctgcaaaaagcctacgccgacttgattggacaggatgccacctccgaatccagtgacgatattgatctgctcaagttgcgtcaaacccgtgaggacaacgcagtactcgatttatttggctcaggtctaggcattaaatcgcgcctgctggtgtcgcatttcttaccgacacataacgtattaccggaagtcttcaccggcgtgcgcaaggatttggacgataccgacggcgtgctggagctgatttctgaagcggatcgcgcgcgttatccggggcgttccgacgcgaacagcaaacgcgcggccgctgtaacggtggtaaaaggactggaggcaaagttgcgcaaagccaaaaaggccggtgagtcactggtcgaattggaactcgcgcggcaagcggcacaggatattgtcgaacgctacgaatccgacatgggcgagatgaccaatttttcacgcacgctgaccaactattttgccctcccggcaggcatcaaactcaaaggccgattagtgattgagaaagcgcgtgagcgtgatctggccatgatcgaactcgcgctgaatagactttcacagcgtccgattcttggcgcgcaaagcgcgcgcggctgcggggaaattgccggcgtattggatgtattagtggatggcctgcttgccaaaaaaatcaccatctgcgcatggcaagcagcgattattagcaatttttctgctgtcgaatcttgaaaataggtttaataatcaatgcataacaacagattggatcaagccaccccttgtttgggtgcttactataaataaaaatctggcattgtttcacgtgaaacaatcggtttggtcgtttacgaaaaagggaagttgaatgttccgttctgccgagcaaggtaattttgccgctatcgtcgcccggcacatcgcctcggctgacgcaccgttattgctggaaggcggcacggggatcggtaaaactcgtgcctatctttccgcgctgattcaatccggtttgcgcgtcactatcgtgctgcctacccatcagttgattgaccagatgttggcctcaaacgacttggcggcgacgcgaagcgcggccagtattgccgcctttcgtccagcgcgactatttgaaaattggtcggactatgaagctaataagcgcgccgcaatggccgcaaccgtgatgttttgcacagcggccagcgtcatcattgatcagcgtctgggcggcgaatataacggcgcaacaaaccgcgactatttgttgtttgatgaagccgatcaactaccggacatggccgcattgcaaagcgacttcaccattacacaggcggaactgacagcgttgggcataacactcagctgcgtgactgaagccttgcaagccattttggtcaaagcgccaaacgtggttgagccggaaaccagagccgccgcacgcatcattctcgatgccatcgagcaaccagcgtggtatcagtccgctggtgtaagcgatgaaggcgacattatgctgacgcacagcttgcccggtcgtttactgaaataaatcagcaattcagcccatttcgcctttgtctctgccacgctaaccgtcgccagacagctcaaggattttcaaaattcgatgggcattgcgacggtaagtaacttgtcgggcgtgatagaaccggagcgtcacggtacgcttgatttccactttatgccggtggtggttgataccgaggaatggcgcagtgccgtcatccgaatggcgaacgaagcgcctaaaccggtgctgatcgcgaccacatcacaccgtttttccagcctgctcggcgaacaattatcaggtgcaacggtaaggtcggacagcgaatccaccgctcacgccgccgtgcgcgtttcagccaatgggttttttattgcagccggtgcctgggcagggctggatacgccgttgcgctggcgttcgatcatcgtgccgcgcgtgccatacggacaaccagtggtgatagacggcgaaaccaccacccgttatttcgatgcgcacaacacggcgattcgccgtttgcgccaggtgataggccgtggtttacgttcggcggatgcaatctgtagcgtttacatcctcgatggcagggctgaaaaattaacgggctttgtaccggagcgtttttccgccgcatgggcatcacgcaaaacgtatttggagggggcgaggcaagcgctgattttgagcaggaacgaacgctatcccgccgtccgtcgtgccgcactcaattactatggtcgaaaatgtatggcgtgtagctttgtgccgcgcgtggatgcacaactggacgtgcatcatctcgacccgattgccgaaggtgttcgctgcatcaggattgaggatgtggtcgttttgtgtgcaaactgtcaccgtctggttcacgctacccatccccctttagcactcaccgatctaattgcgctactcaacgcaacaatatgattatccttaacgtaaaactcgcgcagcgacgaactgtacccctcgccctctgggagaggggggacgggggtgagggaacgggcatggcgggttttatcatcaggggtggttacttttccatgcccgttagatttttttcaattaaattcccgttagctaacggttttccctagcagcctgtcggacatgatgttaaatcatccgactttcctggcaagccggaagaatttgttcccgatttcataaaaataaccttcaggttgtcataaaaatccatttttggcgttgaagagcggttgttttcgttctcagcatgctactttcc

SEQ ID NO: 269 - DNA, 11173 bp, Artificial Sequence; identical to SEQ ID NO: 267
  Synthetic Oligonucleotide
  misc_feature (1)..(7101): n is a, c, g, or t

SEQ ID NO: 270 - DNA, 11173 bp, Artificial Sequence; identical to SEQ ID NO: 267
  Synthetic Oligonucleotide
  misc_feature (1)..(7101): n is a, c, g, or t

SEQ ID NO: 271 - DNA, 11173 bp, Artificial Sequence; identical to SEQ ID NO: 267
  Synthetic Oligonucleotide
  misc_feature (1)..(7101): n is a, c, g, or t

SEQ ID NO: 272 - DNA, 11173 bp, Artificial Sequence
  Synthetic Oligonucleotide
  misc_feature (1)..(6503): n is a, c, g, or t
nnnnnnnnnnnnnnnnnnnnnnnnnnnnnnnnnnnnnnnnnnnnnnnnnnnnnnnnnnnnnnnnnnnnnnnnnnnnnnnnnnnnnnnnnnnnnnnnnnnnnnnnnnnnnnnnnnnnnnnnnnnnnnnnnnnnnnnnnnnnnnnnnnnnnnnnnnnnnnnnnnnnnnnnnnnnnnnnnnnnnnnnnnnnnnnnnnnnnnnnnnnnnnnnnnnnnnnnnnnnnnnnnnnnnnnnnnnnnnnnnnnnnnnnnnnnnnnnnnnnnnnnnnnnnnnnnnnnnnnnnnnnnnnnnnnnnnnnnnnnnnnnnnnnnnnnnnnnnnnnnnnnnnnnnnnnnnnnnnnnnnnnnnnnnnnnnnnnnnnnnnnnnnnnnnnnnnnnnnnnnnnnnnnnnnnnnnnnnnnnnnnnnnnnnnnnnnnnnnnnnnnnnnnnnnnnnnnnnnnnnnnnnnnnnnnnnnnnnnnnnnnnnnnnnnnnnnnnnnnnnnnnnnnnnnnnnnnnnnnnnnnnnnnnnnnnnnnnnnnnnnnnnnnnnnnnnnnnnnnnnnnnnnnnnnnnnnnnnnnnnnnnnnnnnnnnnnnnnnnnnnnnnnnnnnnnnnnnnnnnnnnnnnnnnnnnnnnnnnnnnnnnnnnnnnnnnnnnnnnnnnnnnnnnnnnnnnnnnnnnnnnnnnnnnnnnnnnnnnnnnnnnnnnnnnnnnnnnnnnnnnnnnnnnnnnnnnnnnnnnnnnnnnnnnnnnnnnnnnnnnnnnnnnnnnnnnnnnnnnnnnnnnnnnnnnnnnnnnnnnnnnnnnnnnnnnnnnnnnnnnnnnnnnnnnnnnnnnnnnnnnnnnnnnnnnnnnnnnnnnnnnnnnnnnnnnnnnnnnnnnnnnnnnnnnnnnnnnnnnnnnnnnnnnnnnnnnnnnnnnnnnnnnnnnnnnnnnnnnnnnnnnnnnnnnnnnnnnnnnnnnnnnnnnnnnnnnnnnnnnnnnnnnnnnnnnnnnnnnnnnnnnnnnnnnnnnnnnnnnnnnnnnnnnnnnnnnnnnnnnnnnnnnnnnnnnnnnnnnnnnnnnnnnnnnnnnnnnnnnnnnnnnnnnnnnnnnnnnnnnnnnnnnnnnnnnnnnnnnnnnnnnnnnnnnnnnnnnnnnnnnnnnnnnnnnnnnnnnnnnnnnnnnnnnnnnnnnnnnnnnnnnnnnnnnnnnnnnnnnnnnnnnnnnnnnnnnnnnnnnnnnnnnnnnnnnnnnnnnnnnnnnnnnnnnnnnnnnnnnnnnnnnnnnnnnnnnnnnnnnnnnnnnnnnnnnnnnnnnnnnnnnnnnnnnnnnnnnnnnnnnnnnnnnnnnnnnnnnnnnnnnnnnnnnnnnnnnnnnnnnnnnnnnnnnnnnnnnnnnnnnnnnnnnnnnnnnnnnnnnnnnnnnnnnnnnnnnnnnnnnnnnnnnnnnnnnnnnnnnnnnnnnnnnnnnnnnnnnnnnnnnnnnnnnnnnnnnnnnnnnnnnnnnnnnnnnnnnnnnnnnnnnnnnnnnnnnnnnnnnnnnnnnnnnnnnnnnnnnnnnnnnnnnnnnnnnnnnnnnnnnnnnnnnnnnnnnnnnnnnnnnnnnnnnnnnnnnnnnnnnnnnnnnnnnnnnnnnnnnnnnnnnnnnnnnnnnnnnnnnnnnnnnnnnnnnnnnnnnnnnnnnnnnnnnnnnnnnnnnnnnnnnnnnnnnnnnnnnnnnnnnnnnnnnnnnnnnnnnnnnnnnnnnnnnnnnnnnnnnnnnnnnnnnnnnnnnnnnnnnnnnnnnnnnnnnnnnnnnnnnnnnnnnnnnnnnnnnnnnnnnnnnnnnnnnnnnnnnnnnnnnnnnnnnnnnnnnnnnnnnnnnnnnnnnnnnnnnnnnnnnnnnnnnnnnnnnnnnnnnnnnnnnnnnnnnnnnnnnnnnnnnnnnnnnnnnnnnnnnnnnnnnnnnnnnnnnnnnnnnnnnnnnnnnnnnnnnnnnnnnnnnnnnnnnnnnnnnnnnnnnnnnnnnnnnnnnnnnnnnnnnnnnnnnnnnnnnnnnnnnnnnnnnnnnnnnnnnnnnnnnnnnnnnnnnnnnnnnnnnnnnnnnnnnnnnnnnnnnnnnnnnnnnnnnnnnnnnnnnnnnnnnnnnnnnnnnnnnnnnnnnnnnnnnnnnnnnnnnnnnnnnnnnnnnnnnnnnnnnnnnnnnnnnnnnnnnnnnnnnnnnnnnnnnnnnnnnnnnnnnnnnnnnnnnnnnnnnnnnnnnnnnnnnnnnnnnnnnnnnnnnnnnnnnnnnnnnnnnnnnnnnnnnnnnnnnnnnnnnnnnnnnnnnnnnnnnnnnnnnnnnnnnnnnnnnnnnnnnnnnnnnnnnnnnnnnnnnnnnnnnnnnnnnnnnnnnnnnnnnnnnnnnnnnnnnnnnnnnnnnnnnnnnnnnnnnnnnnnnnnnnnnnnnnnnnnnnnnnnnnnnnnnnnnnnnnnnnnnnnnnnnnnnnnnnnnnnnnnnnnnnnnnnnnnnnnnnnnnnnnnnnnnnnnnnnnnnnnnnnnnnnnnnnnnnnnnnnnnnnnnnnnnnnnnnnnnnnnnnnnnnnnnnnnnnnnnnnnnnnnnnnnnnnnnnnnnnnnnnnnnnnnnnnnnnnnnnnnnnnnnnnnnnnnnnnnnnnnnnnnnnnnnnnnnnnnnnnnnnnnnnnnnnnnnnnnnnnnnnnnnnnnnnnnnnnnnnnnnnnnnnnnnnnnnnnnnnnnnnnnnnnnnnnnnnnnnnnnnnnnnnnnnnnnnnnnnnnnnnnnnnnnnnnnnnnnnnnnnnnnnnnnnnnnnnnnnnnnnnnnnnnnnnnnnnnnnnnnnnnnnnnnnnnnnnnnnnnnnnnnnnnnnnnnnnnnnnnnnnnnnnnnnnnnnnnnnnnnnnnnnnnnnnnnnnnnnnnnnnnnnnnnnnnnnnnnnnnnnnnnnnnnnnnnnnnnnnnnnnnnnnnnnnnnnnnnnnnnnnnnnnnnnnnnnnnnnnnnnnnnnnnnnnnnnnnnnnnnnnnnnnnnnnnnnnnnnnnnnnnnnnnnnnnnnnnnnnnnnnnnnnnnnnnnnnnnnnnnnnnnnnnnnnnnnnnnnnnnnnnnnnnnnnnnnnnnnnnnnnnnnnnnnnnnnnnnnnnnnnnnnnnnnnnnnnnnnnnnnnnnnnnnnnnnnnnnnnnnnnnnnnnnnnnnnnnnnnnnnnnnnnnnnnnnnnnnnnnnnnnnnnnnnnnnnnnnnnnnnnnnnnnnnnnnnnnnnnnnnnnnnnnnnnnnnnnnnnnnnnnnnnnnnnnnnnnnnnnnnnnnnnnnnnnnnnnnnnnnnnnnnnnnnnnnnnnnnnnnnnnnnnnnnnnnnnnnnnnnnnnnnnnnnnnnnnnnnnnnnnnnnnnnnnnnnnnnnnnnnnnnnnnnnnnnnnnnnnnnnnnnnnnnnnnnnnnnnnnnnnnnnnnnnnnnnnnnnnnnnnnnnnnnnnnnnnnnnnnnnnnnnnnnnnnnnnnnnnnnnnnnnnnnnnnnnnnnnnnnnnnnnnnnnnnnnnnnnnnnnnnnnnnnnnnnnnnnnnnnnnnnnnnnnnnnnnnnnnnnnnnnnnnnnnnnnnnnnnnnnnnnnnnnnnnnnnnnnnnnnnnnnnnnnnnnnnnnnnnnnnnnnnnnnnnnnnnnnnnnnnnnnnnnnnnnnnnnnnnnnnnnnnnnnnnnnnnnnnnnnnnnnnnnnnnnnnnnnnnnnnnnnnnnnnnnnnnnnnnnnnnnnnnnnnnnnnnnnnnnnnnnnnnnnnnnnnnnnnnnnnnnnnnnnnnnnnnnnnnnnnnnnnnnnnnnnnnnnnnnnnnnnnnnnnnnnnnnnnnnnnnnnnnnnnnnnnnnnnnnnnnnnnnnnnnnnnnnnnnnnnnnnnnnnnnnnnnnnnnnnnnnnnnnnnnnnnnnnnnnnnnnnnnnnnnnnnnnnnnnnnnnnnnnnnnnnnnnnnnnnnnnnnnnnnnnnnnnnnnnnnnnnnnnnnnnnnnnnnnnnnnnnnnnnnnnnnnnnnnnnnnnnnnnnnnnnnnnnnnnnnnnnnnnnnnnnnnnnnnnnnnnnnnnnnnnnnnnnnnnnnnnnnnnnnnnnnnnnnnnnnnnnnnnnnnnnnnnnnnnnnnnnnnnnnnnnnnnnnnnnnnnnnnnnnnnnnnnnnnnnnnnnnnnnnnnnnnnnnnnnnnnnnnnnnnnnnnnnnnnnnnnnnnnnnnnnnnnnnnnnnnnnnnnnnnnnnnnnnnnnnnnnnnnnnnnnnnnnnnnnnnnnnnnnnnnnnnnnnnnnnnnnnnnnnnnnnnnnnnnnnnnnnnnnnnnnnnnnnnnnnnnnnnnnnnnnnnnnnnnnnnnnnnnnnnnnnnnnnnnnnnnnnnnnnnnnnnnnnnnnnnnnnnnnnnnnnnnnnnnnnnnnnnnnnnnnnnnnnnnnnnnnnnnnnnnnnnnnnnnnnnnnnnnnnnnnnnnnnnnnnnnnnnnnnnnnnnnnnnnnnnnnnnnnnnnnnnnnnnnnnnnnnnnnnnnnnnnnnnnnnnnnnnnnnnnnnnnnnnnnnnnnnnnnnnnnnnnnnnnnnnnnnnnnnnnnnnnnnnnnnnnnnnnnnnnnnnnnnnnnnnnnnnnnnnnnnnnnnnnnnnnnnnnnnnnnnnnnnnnnnnnnnnnnnnnnnnnnnnnnnnnnnnnnnnnnnnnnnnnnnnnnnnnnnnnnnnnnnnnnnnnnnnnnnnnnnnnnnnnnnnnnnnnnnnnnnnnnnnnnnnnnnnnnnnnnnnnnnnnnnnnnnnnnnnnnnnnnnnnnnnnnnnnnnnnnnnnnnnnnnnnnnnnnnnnnnnnnnnnnnnnnnnnnnnnnnnnnnnnnnnnnnnnnnnnnnnnnnnnnnnnnnnnnnnnnnnnnnnnnnnnnnnnnnnnnnnnnnnnnnnnnnnnnnnnnnnnnnnnnnnnnnnnnnnnnnnnnnnnnnnnnnnnnnnnnnnnnnnnnnnnnnnnnnnnnnnnnnnnnnnnnnnnnnnnnnnnnnnnnnnnnnnnnnnnnnnnnnnnnnnnnnnnnnnnnnnnnnnnnnnnnnnnnnnnnnnnnnnnnnnnnnnnnnnnnnnnnnnnnnnnnnnnnnnnnnnnnnnnnnnnnnnnnnnnnnnnnnnnnnnnnnnnnnnnnnnnnnnnnnnnnnnnnnnnnnnnnnnnnnnnnnnnnnnnnnnnnnnnnnnnnnnnnnnnnnnnnnnnnnnnnnnnnnnnnnnnnnnnnnnnnnnnnnnnnnnnnnnnnnnnnnnnnnnnnnnnnnnnnnnnnnnnnnnnnnnnnnnnnnnnnnnnnnnnnnnnnnnnnnnnnnnnnnnnnnnnnnnnnnnnnnnnnnnnnnnnnnnnnnnnnnnnnnnnnnnnnnnnnnnnnnnnnnnnnnnnnnnnnnnnnnnnnnnnnnnnnnnnnnnnnnnnnnnnnnnnnnnnnnnnnnnnnnnnnnnnnnnnnnnnnnnnnnnnnnnnnnnnnnnnnnnnnnnnnnnnnnnnnnnnnnnnnnnnnnnnnnnnnnnnnnnnnnnnnnnnnnnnnnnnnnnnnnnnnnnnnnnnnnnnnnnnnnnnnnnnnnnnnnnnnnnnnnnnnnnnnnnnnnnnnnnnnnnnnnnnnnnnnnnnnnnnnnnnnnnnnnnnnnnnnnnnnnnnnnnnnnnnnnnnnnnnnnnnnnnnnnnnnnnnnnnnnnnnnnnnnnnnnnnnnnnnnnnnnnnnnnnnnnnnnnnnnnnnnnnnnnnnnnnnnnnnnnnnnnnnnnnnnnnnnnnnnnnnnnnnnnnnnnnnnnnnnnnnnnnnnnnnnnnnnnnnnnnnnnnnnnnnnnnnnnnnnnnnnnnnnnnnnnnnnnnnnnnnnnnnnnnnnnnnnnnnnnnnnnnnnnnnnnnnnnnnnnnnnnnnnnnnnnnnnnnnnnnnnnnnnnnnnnnnnnnnnnnnnnnnnnnnnnnnnnnnnnnnnnnnnnnnnnnnnnnnnnnnnnnnnnnnnnnnnnnnnnnnnnnnnnnnnnnnnnnnnnnnnnnnnnnnnnnnnnnnnnnnnnnnnnnnnnnnnnnnnnnnnnnnnnnnnnnnnnnnnnnnnnnnnnnnnnnnnnnnnnnnnnnnnnnnnnnnnnnnnnnnnnnnnnnnnnnnnnnnnnnnnnnnnnnnnnnnnnnnnnnnnnnnnnnnnnnnnnnnnnnnnnnnnnnnnnnnnnnnnnnnnnnnnnnnnnnnnnnnnnnnnnnnnnnnnnnnnnnnnnnnnnnnnnnnnnnnnnnnnnnnnnnnnnnnnnnnnnnnnnnnnnnnnnnnnnnnnnnnnnnnnnnnnnnnnnnnnnnnnnnnnnnnnnnnnnnnnnnnnnnnnnnnnnnnnnnnnnnnnnnnnnnnnnnnnnnnnnnnnnnnnnnnnnnnnnnnnnnnnnnnnnnnnnnnnnnnnnnnnnnnnnnnnnnnnnnnnnnnnnnnnnnnnnnnnnnnnnnnnnnnnnnnnnnnnnnnnnnnnnnnnnnnnnnnnnnnnnnnnnnnnnnnnnnnnnnnnnnnnnnnnnnnnnnnnnnnnnnnnnnnnnnnnnnnnnnnnnnnnnnnnnnnnnnnnnnnnnnnnnnnnnnnnnnnnnnnnnaacctaaagttgcggccaaacccaaagccgccgcaaaacccaaagccgcgaccgcaaaaaaacccgccgtcaaaaagctctgagcatgtcatcattgtgagcctgtcgggcgatgcctgtcccgactctcacaaatatgtttcacgtgaaacaataccccttgccgatttggcgggtgttgggggtttttcagcaaagtcgaaatttggcatccctttttccaccctgactccccccttacccgacccttggcagcgcgttatagcgcgttttgagcaaccgcttctgcaagccaataaatacggcgcttgcagcggcagctaggtttatttcgtacaatttctctggccgacgtagaatccatccgccgcttcacgactaacgggcataaaaaagtgaccgccctcgataatcaaacccgccatgcccatttccctcacctcaatcctctcccgccagcgccgccatcccaggagtctgtcggacttgaagaatcgtagcgaaaaggtttaagcaggcaaagccgcaaagcggctgctcgcaaaatctggctgggcgagggcagattttgctggtttcgcaggtcaatagttgttctattgaccaagaaagcggtgaagtgggtcaagcaggcaagccgcacagcggcggctcgcaaatatgcgccgtccaggcgaattcccccggccacaccacccgaggacaagtgcagtagatttccttttagtccgacagactcctagaagccacccgtgaatccctctccttcatcgcctcactgcgtcccaatcacagcattgatcccgacctgattctgaaaaataaacacggcaagttacaccacaagttcgacacctcgctgaccaacgtaatgaacagttacacactactcaccgcgccgacggtgacctggtatgcagaaggcaatgccgagctcatttcatgcctgctatcgcccgtgcaatttattggcaagcggcgtgcctctggtttttggttgcgtctcgcattggcaagttgaagccgatgaactggatggtatcgaaggaatgttcggtgaagcgctgcgtccggtgccgattgacttgttcgagggcgacacttcccacccgattgttgatgccgcctggcagcctgcctactggaatcccaatcatcggacggcctgctatgcgccagtttaaggacgtgcaatgctgagttttttcaatgaaaattttggccgtcatctgctgttgcgcaccgatatcagcttgaaattgagcagcggccgcaacgcagcatcagcaccggagacattatcggtttcgagttgcgcgcctgtgtcagcaaaaaactcaaaggccgtcacatctactttcgcacctcggattggcaacgtcggcatagctggatggaacgaaagagggaggcgcatggatttacgcttatcaccgtacattgcagcgcctcgatgcaaaccgtgcagactggcgagagacaatttacggttgatcagacggtctacaccggggttctcaaagtaacggacactgaacgttttaacgcagccctcgccaatggcatcggcattaagacccgtgctttcggctttggcatgttggttatttaacagaaggaatcagtatgaaatctatcatcattaacgccacacttaccaccatcggctccttgtctatcgccttgtctatcgccttgccggtctctgaaggtcagcagggcaacaattcccatcgtcacgcgcggcattgatgtagcgggcaacaagcaacaaaccggctacctgccagccagcacgctacgcggatttttacgcgcgccatcgtggtcgaacaaatgacgcaagccgcccccgcagggcatcactacaccctgcaaaaagcctacgccgacttgattggacaggatgccacctccgaatccagtgacgatattgatctgctcaagttgcgtcaaacccgtgaggacaacgcagtactcgatttatttggctcaggtctaggcattaaatcgcgcctgctggtgtcgcatttcttaccgacacataacgtattaccggaagtcttcaccggcgtgcgcaaggatttggacgataccgacggcgtgctggagctgatttctgaagcggatcgcgcgcgttatccggggcgttccgacgcgaacagcaaacgcgcggccgctgtaacggtggtaaaaggactggaggcaaagttgcgcaaagccaaaaaggccggtgagtcactggtcgaattggaactcgcgcggcaagcggcacaggatattgtcgaacgctacgaatccgacatgggcgagatgaccaatttttcacgcacgctgaccaactattttgccctcccggcaggcatcaaactcaaaggccgattagtgattgagaaagcgcgtgagcgtgatctggccatgatcgaactcgcgctgaatagactttcacagcgtccgattcttggcgcgcaaagcgcgcgcggctgcggggaaattgccggcgtattggatgtattagtggatggcctgcttgccaaaaaaatcaccatctgcgcatggcaagcagcgattattagcaatttttctgctgtcgaatcttgaaaataggtttaataatcaatgcataacaacagattggatcaagccaccccttgtttgggtgcttactataaataaaaatctggcattgtttcacgtgaaacaatcggtttggtcgtttacgaaaaagggaagttgaatgttccgttctgccgagcaaggtaattttgccgctatcgtcgcccggcacatcgcctcggctgacgcaccgttattgctggaaggcggcacggggatcggtaaaactcgtgcctatctttccgcgctgattcaatccggtttgcgcgtcactatcgtgctgcctacccatcagttgattgaccagatgttggcctcaaacgacttggcggcgacgcgaagcgcggccagtattgccgcctttcgtccagcgcgactatttgaaaattggtcggactatgaagctaataagcgcgccgcaatggccgcaaccgtgatgttttgcacagcggccagcgtcatcattgatcagcgtctgggcggcgaatataacggcgcaacaaaccgcgactatttgttgtttgatgaagccgatcaactaccggacatggccgcattgcaaagcgacttcaccattacacaggcggaactgacagcgttgggcataacactcagctgcgtgactgaagccttgcaagccattttggtcaaagcgccaaacgtggttgagccggaaaccagagccgccgcacgcatcattctcgatgccatcgagcaaccagcgtggtatcagtccgctggtgtaagcgatgaaggcgacattatgctgacgcacagcttgcccggtcgtttactgaaataaatcagcaattcagcccatttcgcctttgtctctgccacgctaaccgtcgccagacagctcaaggattttcaaaattcgatgggcattgcgacggtaagtaacttgtcgggcgtgatagaaccggagcgtcacggtacgcttgatttccactttatgccggtggtggttgataccgaggaatggcgcagtgccgtcatccgaatggcgaacgaagcgcctaaaccggtgctgatcgcgaccacatcacaccgtttttccagcctgctcggcgaacaattatcaggtgcaacggtaaggtcggacagcgaatccaccgctcacgccgccgtgcgcgtttcagccaatgggttttttattgcagccggtgcctgggcagggctggatacgccgttgcgctggcgttcgatcatcgtgccgcgcgtgccatacggacaaccagtggtgatagacggcgaaaccaccacccgttatttcgatgcgcacaacacggcgattcgccgtttgcgccaggtgataggccgtggtttacgttcggcggatgcaatctgtagcgtttacatcctcgatggcagggctgaaaaattaacgggctttgtaccggagcgtttttccgccgcatgggcatcacgcaaaacgtatttggagggggcgaggcaagcgctgattttgagcaggaacgaacgctatcccgccgtccgtcgtgccgcactcaattactatggtcgaaaatgtatggcgtgtagctttgtgccgcgcgtggatgcacaactggacgtgcatcatctcgacccgattgccgaaggtgttcgctgcatcaggattgaggatgtggtcgttttgtgtgcaaactgtcaccgtctggttcacgctacccatccccctttagcactcaccgatctaattgcgctactcaacgcaacaatatgattatccttaacgtaaaactcgcgcagcgacgaactgtacccctcgccctctgggagaggggggacgggggtgagggaacgggcatggcgggttttatcatcaggggtggttacttttccatgcccgttagatttttttcaattaaattcccgttagctaacggttttccctagcagcctgtcggacatgatgttaaatcatccgactttcctggcaagccggaagaatttgttcccgatttcataaaaataaccttcaggttgtcataaaaatccatttttggcgttgaagagcggttgttttcgttctcagcatgctactttcc

SEQ ID NO: 273 - DNA, 11173 bp, Artificial Sequence
  Synthetic Oligonucleotide
  misc_feature (1)..(7100): n is a, c, g, or t
nnnnnnnnnnnnnnnnnnnnnnnnnnnnnnnnnnnnnnnnnnnnnnnnnnnnnnnnnnnnnnnnnnnnnnnnnnnnnnnnnnnnnnnnnnnnnnnnnnnnnnnnnnnnnnnnnnnnnnnnnnnnnnnnnnnnnnnnnnnnnnnnnnnnnnnnnnnnnnnnnnnnnnnnnnnnnnnnnnnnnnnnnnnnnnnnnnnnnnnnnnnnnnnnnnnnnnnnnnnnnnnnnnnnnnnnnnnnnnnnnnnnnnnnnnnnnnnnnnnnnnnnnnnnnnnnnnnnnnnnnnnnnnnnnnnnnnnnnnnnnnnnnnnnnnnnnnnnnnnnnnnnnnnnnnnnnnnnnnnnnnnnnnnnnnnnnnnnnnnnnnnnnnnnnnnnnnnnnnnnnnnnnnnnnnnnnnnnnnnnnnnnnnnnnnnnnnnnnnnnnnnnnnnnnnnnnnnnnnnnnnnnnnnnnnnnnnnnnnnnnnnnnnnnnnnnnnnnnnnnnnnnnnnnnnnnnnnnnnnnnnnnnnnnnnnnnnnnnnnnnnnnnnnnnnnnnnnnnnnnnnnnnnnnnnnnnnnnnnnnnnnnnnnnnnnnnnnnnnnnnnnnnnnnnnnnnnnnnnnnnnnnnnnnnnnnnnnnnnnnnnnnnnnnnnnnnnnnnnnnnnnnnnnnnnnnnnnnnnnnnnnnnnnnnnnnnnnnnnnnnnnnnnnnnnnnnnnnnnnnnnnnnnnnnnnnnnnnnnnnnnnnnnnnnnnnnnnnnnnnnnnnnnnnnnnnnnnnnnnnnnnnnnnnnnnnnnnnnnnnnnnnnnnnnnnnnnnnnnnnnnnnnnnnnnnnnnnnnnnnnnnnnnnnnnnnnnnnnnnnnnnnnnnnnnnnnnnnnnnnnnnnnnnnnnnnnnnnnnnnnnnnnnnnnnnnnnnnnnnnnnnnnnnnnnnnnnnnnnnnnnnnnnnnnnnnnnnnnnnnnnnnnnnnnnnnnnnnnnnnnnnnnnnnnnnnnnnnnnnnnnnnnnnnnnnnnnnnnnnnnnnnnnnnnnnnnnnnnnnnnnnnnnnnnnnnnnnnnnnnnnnnnnnnnnnnnnnnnnnnnnnnnnnnnnnnnnnnnnnnnnnnnnnnnnnnnnnnnnnnnnnnnnnnnnnnnnnnnnnnnnnnnnnnnnnnnnnnnnnnnnnnnnnnnnnnnnnnnnnnnnnnnnnnnnnnnnnnnnnnnnnnnnnnnnnnnnnnnnnnnnnnnnnnnnnnnnnnnnnnnnnnnnnnnnnnnnnnnnnnnnnnnnnnnnnnnnnnnnnnnnnnnnnnnnnnnnnnnnnnnnnnnnnnnnnnnnnnnnnnnnnnnnnnnnnnnnnnnnnnnnnnnnnnnnnnnnnnnnnnnnnnnnnnnnnnnnnnnnnnnnnnnnnnnnnnnnnnnnnnnnnnnnnnnnnnnnnnnnnnnnnnnnnnnnnnnnnnnnnnnnnnnnnnnnnnnnnnnnnnnnnnnnnnnnnnnnnnnnnnnnnnnnnnnnnnnnnnnnnnnnnnnnnnnnnnnnnnnnnnnnnnnnnnnnnnnnnnnnnnnnnnnnnnnnnnnnnnnnnnnnnnnnnnnnnnnnnnnnnnnnnnnnnnnnnnnnnnnnnnnnnnnnnnnnnnnnnnnnnnnnnnnnnnnnnnnnnnnnnnnnnnnnnnnnnnnnnnnnnnnnnnnnnnnnnnnnnnnnnnnnnnnnnnnnnnnnnnnnnnnnnnnnnnnnnnnnnnnnnnnnnnnnnnnnnnnnnnnnnnnnnnnnnnnnnnnnnnnnnnnnnnnnnnnnnnnnnnnnnnnnnnnnnnnnnnnnnnnnnnnnnnnnnnnnnnnnnnnnnnnnnnnnnnnnnnnnnnnnnnnnnnnnnnnnnnnnnnnnnnnnnnnnnnnnnnnnnnnnnnnnnnnnnnnnnnnnnnnnnnnnnnnnnnnnnnnnnnnnnnnnnnnnnnnnnnnnnnnnnnnnnnnnnnnnnnnnnnnnnnnnnnnnnnnnnnnnnnnnnnnnnnnnnnnnnnnnnnnnnnnnnnnnnnnnnnnnnnnnnnnnnnnnnnnnnnnnnnnnnnnnnnnnnnnnnnnnnnnnnnnnnnnnnnnnnnnnnnnnnnnnnnnnnnnnnnnnnnnnnnnnnnnnnnnnnnnnnnnnnnnnnnnnnnnnnnnnnnnnnnnnnnnnnnnnnnnnnnnnnnnnnnnnnnnnnnnnnnnnnnnnnnnnnnnnnnnnnnnnnnnnnnnnnnnnnnnnnnnnnnnnnnnnnnnnnnnnnnnnnnnnnnnnnnnnnnnnnnnnnnnnnnnnnnnnnnnnnnnnnnnnnnnnnnnnnnnnnnnnnnnnnnnnnnnnnnnnnnnnnnnnnnnnnnnnnnnnnnnnnnnnnnnnnnnnnnnnnnnnnnnnnnnnnnnnnnnnnnnnnnnnnnnnnnnnnnnnnnnnnnnnnnnnnnnnnnnnnnnnnnnnnnnnnnnnnnnnnnnnnnnnnnnnnnnnnnnnnnnnnnnnnnnnnnnnnnnnnnnnnnnnnnnnnnnnnnnnnnnnnnnnnnnnnnnnnnnnnnnnnnnnnnnnnnnnnnnnnnnnnnnnnnnnnnnnnnnnnnnnnnnnnnnnnnnnnnnnnnnnnnnnnnnnnnnnnnnnnnnnnnnnnnnnnnnnnnnnnnnnnnnnnnnnnnnnnnnnnnnnnnnnnnnnnnnnnnnnnnnnnnnnnnnnnnnnnnnnnnnnnnnnnnnnnnnnnnnnnnnnnnnnnnnnnnnnnnnnnnnnnnnnnnnnnnnnnnnnnnnnnnnnnnnnnnnnnnnnnnnnnnnnnnnnnnnnnnnnnnnnnnnnnnnnnnnnnnnnnnnnnnnnnnnnnnnnnnnnnnnnnnnnnnnnnnnnnnnnnnnnnnnnnnnnnnnnnnnnnnnnnnnnnnnnnnnnnnnnnnnnnnnnnnnnnnnnnnnnnnnnnnnnnnnnnnnnnnnnnnnnnnnnnnnnnnnnnnnnnnnnnnnnnnnnnnnnnnnnnnnnnnnnnnnnnnnnnnnnnnnnnnnnnnnnnnnnnnnnnnnnnnnnnnnnnnnnnnnnnnnnnnnnnnnnnnnnnnnnnnnnnnnnnnnnnnnnnnnnnnnnnnnnnnnnnnnnnnnnnnnnnnnnnnnnnnnnnnnnnnnnnnnnnnnnnnnnnnnnnnnnnnnnnnnnnnnnnnnnnnnnnnnnnnnnnnnnnnnnnnnnnnnnnnnnnnnnnnnnnnnnnnnnnnnnnnnnnnnnnnnnnnnnnnnnnnnnnnnnnnnnnnnnnnnnnnnnnnnnnnnnnnnnnnnnnnnnnnnnnnnnnnnnnnnnnnnnnnnnnnnnnnnnnnnnnnnnnnnnnnnnnnnnnnnnnnnnnnnnnnnnnnnnnnnnnnnnnnnnnnnnnnnnnnnnnnnnnnnnnnnnnnnnnnnnnnnnnnnnnnnnnnnnnnnnnnnnnnnnnnnnnnnnnnnnnnnnnnnnnnnnnnnnnnnnnnnnnnnnnnnnnnnnnnnnnnnnnnnnnnnnnnnnnnnnnnnnnnnnnnnnnnnnnnnnnnnnnnnnnnnnnnnnnnnnnnnnnnnnnnnnnnnnnnnnnnnnnnnnnnnnnnnnnnnnnnnnnnnnnnnnnnnnnnnnnnnnnnnnnnnnnnnnnnnnnnnnnnnnnnnnnnnnnnnnnnnnnnnnnnnnnnnnnnnnnnnnnnnnnnnnnnnnnnnnnnnnnnnnnnnnnnnnnnnnnnnnnnnnnnnnnnnnnnnnnnnnnnnnnnnnnnnnnnnnnnnnnnnnnnnnnnnnnnnnnnnnnnnnnnnnnnnnnnnnnnnnnnnnnnnnnnnnnnnnnnnnnnnnnnnnnnnnnnnnnnnnnnnnnnnnnnnnnnnnnnnnnnnnnnnnnnnnnnnnnnnnnnnnnnnnnnnnnnnnnnnnnnnnnnnnnnnnnnnnnnnnnnnnnnnnnnnnnnnnnnnnnnnnnnnnnnnnnnnnnnnnnnnnnnnnnnnnnnnnnnnnnnnnnnnnnnnnnnnnnnnnnnnnnnnnnnnnnnnnnnnnnnnnnnnnnnnnnnnnnnnnnnnnnnnnnnnnnnnnnnnnnnnnnnnnnnnnnnnnnnnnnnnnnnnnnnnnnnnnnnnnnnnnnnnnnnnnnnnnnnnnnnnnnnnnnnnnnnnnnnnnnnnnnnnnnnnnnnnnnnnnnnnnnnnnnnnnnnnnnnnnnnnnnnnnnnnnnnnnnnnnnnnnnnnnnnnnnnnnnnnnnnnnnnnnnnnnnnnnnnnnnnnnnnnnnnnnnnnnnnnnnnnnnnnnnnnnnnnnnnnnnnnnnnnnnnnnnnnnnnnnnnnnnnnnnnnnnnnnnnnnnnnnnnnnnnnnnnnnnnnnnnnnnnnnnnnnnnnnnnnnnnnnnnnnnnnnnnnnnnnnnnnnnnnnnnnnnnnnnnnnnnnnnnnnnnnnnnnnnnnnnnnnnnnnnnnnnnnnnnnnnnnnnnnnnnnnnnnnnnnnnnnnnnnnnnnnnnnnnnnnnnnnnnnnnnnnnnnnnnnnnnnnnnnnnnnnnnnnnnnnnnnnnnnnnnnnnnnnnnnnnnnnnnnnnnnnnnnnnnnnnnnnnnnnnnnnnnnnnnnnnnnnnnnnnnnnnnnnnnnnnnnnnnnnnnnnnnnnnnnnnnnnnnnnnnnnnnnnnnnnnnnnnnnnnnnnnnnnnnnnnnnnnnnnnnnnnnnnnnnnnnnnnnnnnnnnnnnnnnnnnnnnnnnnnnnnnnnnnnnnnnnnnnnnnnnnnnnnnnnnnnnnnnnnnnnnnnnnnnnnnnnnnnnnnnnnnnnnnnnnnnnnnnnnnnnnnnnnnnnnnnnnnnnnnnnnnnnnnnnnnnnnnnnnnnnnnnnnnnnnnnnnnnnnnnnnnnnnnnnnnnnnnnnnnnnnnnnnnnnnnnnnnnnnnnnnnnnnnnnnnnnnnnnnnnnnnnnnnnnnnnnnnnnnnnnnnnnnnnnnnnnnnnnnnnnnnnnnnnnnnnnnnnnnnnnnnnnnnnnnnnnnnnnnnnnnnnnnnnnnnnnnnnnnnnnnnnnnnnnnnnnnnnnnnnnnnnnnnnnnnnnnnnnnnnnnnnnnnnnnnnnnnnnnnnnnnnnnnnnnnnnnnnnnnnnnnnnnnnnnnnnnnnnnnnnnnnnnnnnnnnnnnnnnnnnnnnnnnnnnnnnnnnnnnnnnnnnnnnnnnnnnnnnnnnnnnnnnnnnnnnnnnnnnnnnnnnnnnnnnnnnnnnnnnnnnnnnnnnnnnnnnnnnnnnnnnnnnnnnnnnnnnnnnnnnnnnnnnnnnnnnnnnnnnnnnnnnnnnnnnnnnnnnnnnnnnnnnnnnnnnnnnnnnnnnnnnnnnnnnnnnnnnnnnnnnnnnnnnnnnnnnnnnnnnnnnnnnnnnnnnnnnnnnnnnnnnnnnnnnnnnnnnnnnnnnnnnnnnnnnnnnnnnnnnnnnnnnnnnnnnnnnnnnnnnnnnnnnnnnnnnnnnnnnnnnnnnnnnnnnnnnnnnnnnnnnnnnnnnnnnnnnnnnnnnnnnnnnnnnnnnnnnnnnnnnnnnnnnnnnnnnnnnnnnnnnnnnnnnnnnnnnnnnnnnnnnnnnnnnnnnnnnnnnnnnnnnnnnnnnnnnnnnnnnnnnnnnnnnnnnnnnnnnnnnnnnnnnnnnnnnnnnnnnnnnnnnnnnnnnnnnnnnnnnnnnnnnnnnnnnnnnnnnnnnnnnnnnnnnnnnnnnnnnnnnnnnnnnnnnnnnnnnnnnnnnnnnnnnnnnnnnnnnnnnnnnnnnnnnnnnnnnnnnnnnnnnnnnnnnnnnnnnnnnnnnnnnnnnnnnnnnnnnnnnnnnnnnnnnnnnnnnnnnnnnnnnnnnnnnnnnnnnnnnnnnnnnnnnnnnnnnnnnnnnnnnnnnnnnnnnnnnnnnnnnnnnnnnnnnnnnnnnnnnnnnnnnnnnnnnnnnnnnnnnnnnnnnnnnnnnnnnnnnnnnnnnnnnnnnnnnnnnnnnnnnnnnnnnnnnnnnnnnnnnnnnnnnnnnnnnnnnnnnnnnnnnnnnnnnnnnnnnnnnnnnnnnnnnnnnnnnnnnnnnnnnnnnnnnnnnnnnnnnnnnnnnnnnnnnnnnnnnnnnnnnnnnnnnnnnnnnnnnnnnnnnnnnnnnnnnnnnnnnnnnnnnnnnnnnnnnnnnnnnnnnnnnnnnnnnnnnnnnnnnnnnnnnnnnnnnnnnnnnnnnnnnnnnnnnnnnnnnnnnnnnnnnnnnnnnnnnnnnnnnnnnnnnnnnnnnnnnnnnnnnnnnnnnnnnnnnnnnnnnnnnnnnnnnnnnnnnnnnnnnnnnnnnnnnnnnnnnnnnnnnnnnnnnnnnnnnnnnnnnnnnnnnnnnnnnnnnnnnnnnnnnnnnnnnnnnnnnnnnnnnnnnnnnnnnnnnnnnnnnnnnnnnnnnnnnnnnnnnnnnnnnnnnnnnnnnnnnnnnnnnnnnnnnnnnnnnnnnnnnnnnnnnnnnnnnnnnnnnnnnnnnnnnnnnnnnnnnnnnnnnnnnnnnnnnnnnnnnnnnnnnnnnnnnnnnnnnnnnnnnnnnnnnnnnnnnnnnnnnnnnnnnnnnnnnnnnnnnnnnnnnnnnnnnnnnnnnnnnnnnnnnnnnnnnnnnnnnnnnnnnnnnnnnnnnnnnnnnnnnnnnnnnnnnnnnnnnnnnnnnnnnnnnnnnnnnnnnnnnnnnnnnnnnnnnnnnnnnnnnnnnnnnnnnnnnnnnnnnnnnnnnnnnnnnnnnnnnnnnnnnnnnnnnnnnnnnnnnnnnnnnnnnnnnnnnnnnnnnnnnnnnnnnnnnnnnnnnnnnnnnnnnnnnnnnnnnnnnnnnnnnnnnnnnnnnnnnnnnnnnnnnnnnnnnnnnnnnnnnnnnnnnnnnnnnnnnnnnnnnnnnnnnnnnnnnnnnnnnnnnnnnnnnnnnnnnnnnnnnnnnnnnnnnnnnnnnnnnnnnnnnnnnnnnnnnnnnnnnnnnnnnnnnnnnnnnnnnnnnnnnnnnnnnnnnnnnnnnnnnnnnnnnnnnnnnnnnnnnnnnnnnnnnnnnnnnnnnnnnnnnnnnnnnnnnnnnnnnnnnnnnnnnnnnnnnnnnnnnnnnnnnnnnnnnnnnnnnnnnnnnnnnnnnnnnnnnnnnnnnnnnnnnnnnnnnnnnnnnnnnnnnnnnnnnnnnnnnnnnnnnnnnnnnnnnnnnnnnnnnnnnnnnnnnnnnnnnnnnnntattgaccaagaaagcggtgaagtgggtcaagcaggcaagccgcacagcggcggctcgcaaatatgcgccgtccaggcgaattcccccggccacaccacccgaggacaagtgcagtagatttccttttagtccgacagactcctagaagccacccgtgaatccctctccttcatcgcctcactgcgtcccaatcacagcattgatcccgacctgattctgaaaaataaacacggcaagttacaccacaagttcgacacctcgctgaccaacgtaatgaacagttacacactactcaccgcgccgacggtgacctggtatgcagaaggcaatgccgagctcatttcatgcctgctatcgcccgtgcaatttattggcaagcggcgtgcctctggtttttggttgcgtctcgcattggcaagttgaagccgatgaactggatggtatcgaaggaatgttcggtgaagcgctgcgtccggtgccgattgacttgttcgagggcgacacttcccacccgattgttgatgccgcctggcagcctgcctactggaatcccaatcatcggacggcctgctatgcgccagtttaaggacgtgcaatgctgagttttttcaatgaaaattttggccgtcatctgctgttgcgcaccgatatcagcttgaaattgagcagcggccgcaacgcagcatcagcaccggagacattatcggtttcgagttgcgcgcctgtgtcagcaaaaaactcaaaggccgtcacatctactttcgcacctcggattggcaacgtcggcatagctggatggaacgaaagagggaggcgcatggatttacgcttatcaccgtacattgcagcgcctcgatgcaaaccgtgcagactggcgagagacaatttacggttgatcagacggtctacaccggggttctcaaagtaacggacactgaacgttttaacgcagccctcgccaatggcatcggcattaagacccgtgctttcggctttggcatgttggttatttaacagaaggaatcagtatgaaatctatcatcattaacgccacacttaccaccatcggctccttgtctatcgccttgtctatcgccttgccggtctctgaaggtcagcagggcaacaattcccatcgtcacgcgcggcattgatgtagcgggcaacaagcaacaaaccggctacctgccagccagcacgctacgcggatttttacgcgcgccatcgtggtcgaacaaatgacgcaagccgcccccgcagggcatcactacaccctgcaaaaagcctacgccgacttgattggacaggatgccacctccgaatccagtgacgatattgatctgctcaagttgcgtcaaacccgtgaggacaacgcagtactcgatttatttggctcaggtctaggcattaaatcgcgcctgctggtgtcgcatttcttaccgacacataacgtattaccggaagtcttcaccggcgtgcgcaaggatttggacgataccgacggcgtgctggagctgatttctgaagcggatcgcgcgcgttatccggggcgttccgacgcgaacagcaaacgcgcggccgctgtaacggtggtaaaaggactggaggcaaagttgcgcaaagccaaaaaggccggtgagtcactggtcgaattggaactcgcgcggcaagcggcacaggatattgtcgaacgctacgaatccgacatgggcgagatgaccaatttttcacgcacgctgaccaactattttgccctcccggcaggcatcaaactcaaaggccgattagtgattgagaaagcgcgtgagcgtgatctggccatgatcgaactcgcgctgaatagactttcacagcgtccgattcttggcgcgcaaagcgcgcgcggctgcggggaaattgccggcgtattggatgtattagtggatggcctgcttgccaaaaaaatcaccatctgcgcatggcaagcagcgattattagcaatttttctgctgtcgaatcttgaaaataggtttaataatcaatgcataacaacagattggatcaagccaccccttgtttgggtgcttactataaataaaaatctggcattgtttcacgtgaaacaatcggtttggtcgtttacgaaaaagggaagttgaatgttccgttctgccgagcaaggtaattttgccgctatcgtcgcccggcacatcgcctcggctgacgcaccgttattgctggaaggcggcacggggatcggtaaaactcgtgcctatctttccgcgctgattcaatccggtttgcgcgtcactatcgtgctgcctacccatcagttgattgaccagatgttggcctcaaacgacttggcggcgacgcgaagcgcggccagtattgccgcctttcgtccagcgcgactatttgaaaattggtcggactatgaagctaataagcgcgccgcaatggccgcaaccgtgatgttttgcacagcggccagcgtcatcattgatcagcgtctgggcggcgaatataacggcgcaacaaaccgcgactatttgttgtttgatgaagccgatcaactaccggacatggccgcattgcaaagcgacttcaccattacacaggcggaactgacagcgttgggcataacactcagctgcgtgactgaagccttgcaagccattttggtcaaagcgccaaacgtggttgagccggaaaccagagccgccgcacgcatcattctcgatgccatcgagcaaccagcgtggtatcagtccgctggtgtaagcgatgaaggcgacattatgctgacgcacagcttgcccggtcgtttactgaaataaatcagcaattcagcccatttcgcctttgtctctgccacgctaaccgtcgccagacagctcaaggattttcaaaattcgatgggcattgcgacggtaagtaacttgtcgggcgtgatagaaccggagcgtcacggtacgcttgatttccactttatgccggtggtggttgataccgaggaatggcgcagtgccgtcatccgaatggcgaacgaagcgcctaaaccggtgctgatcgcgaccacatcacaccgtttttccagcctgctcggcgaacaattatcaggtgcaacggtaaggtcggacagcgaatccaccgctcacgccgccgtgcgcgtttcagccaatgggttttttattgcagccggtgcctgggcagggctggatacgccgttgcgctggcgttcgatcatcgtgccgcgcgtgccatacggacaaccagtggtgatagacggcgaaaccaccacccgttatttcgatgcgcacaacacggcgattcgccgtttgcgccaggtgataggccgtggtttacgttcggcggatgcaatctgtagcgtttacatcctcgatggcagggctgaaaaattaacgggctttgtaccggagcgtttttccgccgcatgggcatcacgcaaaacgtatttggagggggcgaggcaagcgctgattttgagcaggaacgaacgctatcccgccgtccgtcgtgccgcactcaattactatggtcgaaaatgtatggcgtgtagctttgtgccgcgcgtggatgcacaactggacgtgcatcatctcgacccgattgccgaaggtgttcgctgcatcaggattgaggatgtggtcgttttgtgtgcaaactgtcaccgtctggttcacgctacccatccccctttagcactcaccgatctaattgcgctactcaacgcaacaatatgattatccttaacgtaaaactcgcgcagcgacgaactgtacccctcgccctctgggagaggggggacgggggtgagggaacgggcatggcgggttttatcatcaggggtggttacttttccatgcccgttagatttttttcaattaaattcccgttagctaacggttttccctagcagcctgtcggacatgatgttaaatcatccgactttcctggcaagccggaagaatttgttcccgatttcataaaaataaccttcaggttgtcataaaaatccatttttggcgttgaagagcggttgttttcgttctcagcatgctactttcc

SEQ ID NO: 274 - DNA, 11173 bp, Artificial Sequence; identical to SEQ ID NO: 267
  Synthetic Oligonucleotide
  misc_feature (1)..(7101): n is a, c, g, or t

SEQ ID NO: 275 - DNA, 11173 bp, Artificial Sequence; identical to SEQ ID NO: 267
  Synthetic Oligonucleotide
  misc_feature (1)..(7101): n is a, c, g, or t

SEQ ID NO: 276 - DNA, 11173 bp, Artificial Sequence; identical to SEQ ID NO: 267
  Synthetic Oligonucleotide
  misc_feature (1)..(7101): n is a, c, g, or t

SEQ ID NO: 277 - DNA, 11144 bp, Artificial Sequence
  Synthetic Oligonucleotide
  misc_feature (1)..(7074): n is a, c, g, or t
nnnnnnnnnnnnnnnnnnnnnnnnnnnnnnnnnnnnnnnnnnnnnnnnnnnnnnnnnnnnnnnnnnnnnnnnnnnnnnnnnnnnnnnnnnnnnnnnnnnnnnnnnnnnnnnnnnnnnnnnnnnnnnnnnnnnnnnnnnnnnnnnnnnnnnnnnnnnnnnnnnnnnnnnnnnnnnnnnnnnnnnnnnnnnnnnnnnnnnnnnnnnnnnnnnnnnnnnnnnnnnnnnnnnnnnnnnnnnnnnnnnnnnnnnnnnnnnnnnnnnnnnnnnnnnnnnnnnnnnnnnnnnnnnnnnnnnnnnnnnnnnnnnnnnnnnnnnnnnnnnnnnnnnnnnnnnnnnnnnnnnnnnnnnnnnnnnnnnnnnnnnnnnnnnnnnnnnnnnnnnnnnnnnnnnnnnnnnnnnnnnnnnnnnnnnnnnnnnnnnnnnnnnnnnnnnnnnnnnnnnnnnnnnnnnnnnnnnnnnnnnnnnnnnnnnnnnnnnnnnnnnnnnnnnnnnnnnnnnnnnnnnnnnnnnnnnnnnnnnnnnnnnnnnnnnnnnnnnnnnnnnnnnnnnnnnnnnnnnnnnnnnnnnnnnnnnnnnnnnnnnnnnnnnnnnnnnnnnnnnnnnnnnnnnnnnnnnnnnnnnnnnnnnnnnnnnnnnnnnnnnnnnnnnnnnnnnnnnnnnnnnnnnnnnnnnnnnnnnnnnnnnnnnnnnnnnnnnnnnnnnnnnnnnnnnnnnnnnnnnnnnnnnnnnnnnnnnnnnnnnnnnnnnnnnnnnnnnnnnnnnnnnnnnnnnnnnnnnnnnnnnnnnnnnnnnnnnnnnnnnnnnnnnnnnnnnnnnnnnnnnnnnnnnnnnnnnnnnnnnnnnnnnnnnnnnnnnnnnnnnnnnnnnnnnnnnnnnnnnnnnnnnnnnnnnnnnnnnnnnnnnnnnnnnnnnnnnnnnnnnnnnnnnnnnnnnnnnnnnnnnnnnnnnnnnnnnnnnnnnnnnnnnnnnnnnnnnnnnnnnnnnnnnnnnnnnnnnnnnnnnnnnnnnnnnnnnnnnnnnnnnnnnnnnnnnnnnnnnnnnnnnnnnnnnnnnnnnnnnnnnnnnnnnnnnnnnnnnnnnnnnnnnnnnnnnnnnnnnnnnnnnnnnnnnnnnnnnnnnnnnnnnnnnnnnnnnnnnnnnnnnnnnnnnnnnnnnnnnnnnnnnnnnnnnnnnnnnnnnnnnnnnnnnnnnnnnnnnnnnnnnnnnnnnnnnnnnnnnnnnnnnnnnnnnnnnnnnnnnnnnnnnnnnnnnnnnnnnnnnnnnnnnnnnnnnnnnnnnnnnnnnnnnnnnnnnnnnnnnnnnnnnnnnnnnnnnnnnnnnnnnnnnnnnnnnnnnnnnnnnnnnnnnnnnnnnnnnnnnnnnnnnnnnnnnnnnnnnnnnnnnnnnnnnnnnnnnnnnnnnnnnnnnnnnnnnnnnnnnnnnnnnnnnnnnnnnnnnnnnnnnnnnnnnnnnnnnnnnnnnnnnnnnnnnnnnnnnnnnnnnnnnnnnnnnnnnnnnnnnnnnnnnnnnnnnnnnnnnnnnnnnnnnnnnnnnnnnnnnnnnnnnnnnnnnnnnnnnnnnnnnnnnnnnnnnnnnnnnnnnnnnnnnnnnnnnnnnnnnnnnnnnnnnnnnnnnnnnnnnnnnnnnnnnnnnnnnnnnnnnnnnnnnnnnnnnnnnnnnnnnnnnnnnnnnnnnnnnnnnnnnnnnnnnnnnnnnnnnnnnnnnnnnnnnnnnnnnnnnnnnnnnnnnnnnnnnnnnnnnnnnnnnnnnnnnnnnnnnnnnnnnnnnnnnnnnnnnnnnnnnnnnnnnnnnnnnnnnnnnnnnnnnnnnnnnnnnnnnnnnnnnnnnnnnnnnnnnnnnnnnnnnnnnnnnnnnnnnnnnnnnnnnnnnnnnnnnnnnnnnnnnnnnnnnnnnnnnnnnnnnnnnnnnnnnnnnnnnnnnnnnnnnnnnnnnnnnnnnnnnnnnnnnnnnnnnnnnnnnnnnnnnnnnnnnnnnnnnnnnnnnnnnnnnnnnnnnnnnnnnnnnnnnnnnnnnnnnnnnnnnnnnnnnnnnnnnnnnnnnnnnnnnnnnnnnnnnnnnnnnnnnnnnnnnnnnnnnnnnnnnnnnnnnnnnnnnnnnnnnnnnnnnnnnnnnnnnnnnnnnnnnnnnnnnnnnnnnnnnnnnnnnnnnnnnnnnnnnnnnnnnnnnnnnnnnnnnnnnnnnnnnnnnnnnnnnnnnnnnnnnnnnnnnnnnnnnnnnnnnnnnnnnnnnnnnnnnnnnnnnnnnnnnnnnnnnnnnnnnnnnnnnnnnnnnnnnnnnnnnnnnnnnnnnnnnnnnnnnnnnnnnnnnnnnnnnnnnnnnnnnnnnnnnnnnnnnnnnnnnnnnnnnnnnnnnnnnnnnnnnnnnnnnnnnnnnnnnnnnnnnnnnnnnnnnnnnnnnnnnnnnnnnnnnnnnnnnnnnnnnnnnnnnnnnnnnnnnnnnnnnnnnnnnnnnnnnnnnnnnnnnnnnnnnnnnnnnnnnnnnnnnnnnnnnnnnnnnnnnnnnnnnnnnnnnnnnnnnnnnnnnnnnnnnnnnnnnnnnnnnnnnnnnnnnnnnnnnnnnnnnnnnnnnnnnnnnnnnnnnnnnnnnnnnnnnnnnnnnnnnnnnnnnnnnnnnnnnnnnnnnnnnnnnnnnnnnnnnnnnnnnnnnnnnnnnnnnnnnnnnnnnnnnnnnnnnnnnnnnnnnnnnnnnnnnnnnnnnnnnnnnnnnnnnnnnnnnnnnnnnnnnnnnnnnnnnnnnnnnnnnnnnnnnnnnnnnnnnnnnnnnnnnnnnnnnnnnnnnnnnnnnnnnnnnnnnnnnnnnnnnnnnnnnnnnnnnnnnnnnnnnnnnnnnnnnnnnnnnnnnnnnnnnnnnnnnnnnnnnnnnnnnnnnnnnnnnnnnnnnnnnnnnnnnnnnnnnnnnnnnnnnnnnnnnnnnnnnnnnnnnnnnnnnnnnnnnnnnnnnnnnnnnnnnnnnnnnnnnnnnnnnnnnnnnnnnnnnnnnnnnnnnnnnnnnnnnnnnnnnnnnnnnnnnnnnnnnnnnnnnnnnnnnnnnnnnnnnnnnnnnnnnnnnnnnnnnnnnnnnnnnnnnnnnnnnnnnnnnnnnnnnnnnnnnnnnnnnnnnnnnnnnnnnnnnnnnnnnnnnnnnnnnnnnnnnnnnnnnnnnnnnnnnnnnnnnnnnnnnnnnnnnnnnnnnnnnnnnnnnnnnnnnnnnnnnnnnnnnnnnnnnnnnnnnnnnnnnnnnnnnnnnnnnnnnnnnnnnnnnnnnnnnnnnnnnnnnnnnnnnnnnnnnnnnnnnnnnnnnnnnnnnnnnnnnnnnnnnnnnnnnnnnnnnnnnnnnnnnnnnnnnnnnnnnnnnnnnnnnnnnnnnnnnnnnnnnnnnnnnnnnnnnnnnnnnnnnnnnnnnnnnnnnnnnnnnnnnnnnnnnnnnnnnnnnnnnnnnnnnnnnnnnnnnnnnnnnnnnnnnnnnnnnnnnnnnnnnnnnnnnnnnnnnnnnnnnnnnnnnnnnnnnnnnnnnnnnnnnnnnnnnnnnnnnnnnnnnnnnnnnnnnnnnnnnnnnnnnnnnnnnnnnnnnnnnnnnnnnnnnnnnnnnnnnnnnnnnnnnnnnnnnnnnnnnnnnnnnnnnnnnnnnnnnnnnnnnnnnnnnnnnnnnnnnnnnnnnnnnnnnnnnnnnnnnnnnnnnnnnnnnnnnnnnnnnnnnnnnnnnnnnnnnnnnnnnnnnnnnnnnnnnnnnnnnnnnnnnnnnnnnnnnnnnnnnnnnnnnnnnnnnnnnnnnnnnnnnnnnnnnnnnnnnnnnnnnnnnnnnnnnnnnnnnnnnnnnnnnnnnnnnnnnnnnnnnnnnnnnnnnnnnnnnnnnnnnnnnnnnnnnnnnnnnnnnnnnnnnnnnnnnnnnnnnnnnnnnnnnnnnnnnnnnnnnnnnnnnnnnnnnnnnnnnnnnnnnnnnnnnnnnnnnnnnnnnnnnnnnnnnnnnnnnnnnnnnnnnnnnnnnnnnnnnnnnnnnnnnnnnnnnnnnnnnnnnnnnnnnnnnnnnnnnnnnnnnnnnnnnnnnnnnnnnnnnnnnnnnnnnnnnnnnnnnnnnnnnnnnnnnnnnnnnnnnnnnnnnnnnnnnnnnnnnnnnnnnnnnnnnnnnnnnnnnnnnnnnnnnnnnnnnnnnnnnnnnnnnnnnnnnnnnnnnnnnnnnnnnnnnnnnnnnnnnnnnnnnnnnnnnnnnnnnnnnnnnnnnnnnnnnnnnnnnnnnnnnnnnnnnnnnnnnnnnnnnnnnnnnnnnnnnnnnnnnnnnnnnnnnnnnnnnnnnnnnnnnnnnnnnnnnnnnnnnnnnnnnnnnnnnnnnnnnnnnnnnnnnnnnnnnnnnnnnnnnnnnnnnnnnnnnnnnnnnnnnnnnnnnnnnnnnnnnnnnnnnnnnnnnnnnnnnnnnnnnnnnnnnnnnnnnnnnnnnnnnnnnnnnnnnnnnnnnnnnnnnnnnnnnnnnnnnnnnnnnnnnnnnnnnnnnnnnnnnnnnnnnnnnnnnnnnnnnnnnnnnnnnnnnnnnnnnnnnnnnnnnnnnnnnnnnnnnnnnnnnnnnnnnnnnnnnnnnnnnnnnnnnnnnnnnnnnnnnnnnnnnnnnnnnnnnnnnnnnnnnnnnnnnnnnnnnnnnnnnnnnnnnnnnnnnnnnnnnnnnnnnnnnnnnnnnnnnnnnnnnnnnnnnnnnnnnnnnnnnnnnnnnnnnnnnnnnnnnnnnnnnnnnnnnnnnnnnnnnnnnnnnnnnnnnnnnnnnnnnnnnnnnnnnnnnnnnnnnnnnnnnnnnnnnnnnnnnnnnnnnnnnnnnnnnnnnnnnnnnnnnnnnnnnnnnnnnnnnnnnnnnnnnnnnnnnnnnnnnnnnnnnnnnnnnnnnnnnnnnnnnnnnnnnnnnnnnnnnnnnnnnnnnnnnnnnnnnnnnnnnnnnnnnnnnnnnnnnnnnnnnnnnnnnnnnnnnnnnnnnnnnnnnnnnnnnnnnnnnnnnnnnnnnnnnnnnnnnnnnnnnnnnnnnnnnnnnnnnnnnnnnnnnnnnnnnnnnnnnnnnnnnnnnnnnnnnnnnnnnnnnnnnnnnnnnnnnnnnnnnnnnnnnnnnnnnnnnnnnnnnnnnnnnnnnnnnnnnnnnnnnnnnnnnnnnnnnnnnnnnnnnnnnnnnnnnnnnnnnnnnnnnnnnnnnnnnnnnnnnnnnnnnnnnnnnnnnnnnnnnnnnnnnnnnnnnnnnnnnnnnnnnnnnnnnnnnnnnnnnnnnnnnnnnnnnnnnnnnnnnnnnnnnnnnnnnnnnnnnnnnnnnnnnnnnnnnnnnnnnnnnnnnnnnnnnnnnnnnnnnnnnnnnnnnnnnnnnnnnnnnnnnnnnnnnnnnnnnnnnnnnnnnnnnnnnnnnnnnnnnnnnnnnnnnnnnnnnnnnnnnnnnnnnnnnnnnnnnnnnnnnnnnnnnnnnnnnnnnnnnnnnnnnnnnnnnnnnnnnnnnnnnnnnnnnnnnnnnnnnnnnnnnnnnnnnnnnnnnnnnnnnnnnnnnnnnnnnnnnnnnnnnnnnnnnnnnnnnnnnnnnnnnnnnnnnnnnnnnnnnnnnnnnnnnnnnnnnnnnnnnnnnnnnnnnnnnnnnnnnnnnnnnnnnnnnnnnnnnnnnnnnnnnnnnnnnnnnnnnnnnnnnnnnnnnnnnnnnnnnnnnnnnnnnnnnnnnnnnnnnnnnnnnnnnnnnnnnnnnnnnnnnnnnnnnnnnnnnnnnnnnnnnnnnnnnnnnnnnnnnnnnnnnnnnnnnnnnnnnnnnnnnnnnnnnnnnnnnnnnnnnnnnnnnnnnnnnnnnnnnnnnnnnnnnnnnnnnnnnnnnnnnnnnnnnnnnnnnnnnnnnnnnnnnnnnnnnnnnnnnnnnnnnnnnnnnnnnnnnnnnnnnnnnnnnnnnnnnnnnnnnnnnnnnnnnnnnnnnnnnnnnnnnnnnnnnnnnnnnnnnnnnnnnnnnnnnnnnnnnnnnnnnnnnnnnnnnnnnnnnnnnnnnnnnnnnnnnnnnnnnnnnnnnnnnnnnnnnnnnnnnnnnnnnnnnnnnnnnnnnnnnnnnnnnnnnnnnnnnnnnnnnnnnnnnnnnnnnnnnnnnnnnnnnnnnnnnnnnnnnnnnnnnnnnnnnnnnnnnnnnnnnnnnnnnnnnnnnnnnnnnnnnnnnnnnnnnnnnnnnnnnnnnnnnnnnnnnnnnnnnnnnnnnnnnnnnnnnnnnnnnnnnnnnnnnnnnnnnnnnnnnnnnnnnnnnnnnnnnnnnnnnnnnnnnnnnnnnnnnnnnnnnnnnnnnnnnnnnnnnnnnnnnnnnnnnnnnnnnnnnnnnnnnnnnnnnnnnnnnnnnnnnnnnnnnnnnnnnnnnnnnnnnnnnnnnnnnnnnnnnnnnnnnnnnnnnnnnnnnnnnnnnnnnnnnnnnnnnnnnnnnnnnnnnnnnnnnnnnnnnnnnnnnnnnnnnnnnnnnnnnnnnnnnnnnnnnnnnnnnnnnnnnnnnnnnnnnnnnnnnnnnnnnnnnnnnnnnnnnnnnnnnnnnnnnnnnnnnnnnnnnnnnnnnnnnnnnnnnnnnnnnnnnnnnnnnnnnnnnnnnnnnnnnnnnnnnnnnnnnnnnnnnnnnnnnnnnnnnnnnnnnnnnnnnnnnnnnnnnnnnnnnnnnnnnnnnnnnnnnnnnnnnnnnnnnnnnnnnnnnnnnnnnnnnnnnnnnnnnnnnnnnnnnnnnnnnnnnnnnnnnnnnnnnnnnnnnnnnnnnnnnnnnnnnnnnnnnnnnnnnnnnnnnnnnnnnnnnnnnnnnnnnnnnnnnnnnnnnnnnnnnnnnnnnnnnnnnnnnnnnnnnnnnnnnnnnnnnnnnnnnnnnnnnnnnnnnnnnnnnnnnnnnnnnnnnnnnnnnnnnnnnnnnnnnnnnnnnnnnnnnnnnnnnnnnnnnnnnnnnnnnnnnnnnnnnnnnnnnnnnnnnnnnnnnnnnnnnnnnnnnnnnnnnnnnnnnnnnnnnnnnnnnnnnnnnnnnnnnnnnnnnnnnnnnnnnnnnnnnnnnnnnnnnnnnnnnnnnnnnnnnnnnnnnnnnnnnnnnnnnnnnnnnnnnnnnnnnnnnnnnnnnnnnnnnnnnnnnnnnnnnnnnnnnnnnnnnnnnnnnctggtttcgcaggtcaatagttgttctattgaccaagaaagcggtgaagtgggtcaagcaggcaagccgcacagcggcggctcgcaaatatgcgccgtccaggcgaattcccccggccacaccacccgaggacaagtgcagtagatttccttttagtccgacagactcctagaagccacccgtgaatccctctccttcatcgcctcactgcgtcccaatcacagcattgatcccgacctgattctgaaaaataaacacggcaagttacaccacaagttcgacacctcgctgaccaacgtaatgaacagttacacactactcaccgcgccgacggtgacctggtatgcagaaggcaatgccgagctcatttcatgcctgctatcgcccgtgcaatttattggcaagcggcgtgcctctggtttttggttgcgtctcgcattggcaagttgaagccgatgaactggatggtatcgaaggaatgttcggtgaagcgctgcgtccggtgccgattgacttgttcgagggcgacacttcccacccgattgttgatgccgcctggcagcctgcctactggaatcccaatcatcggacggcctgctatgcgccagtttaaggacgtgcaatgctgagttttttcaatgaaaattttggccgtcatctgctgttgcgcaccgatatcagcttgaaattgagcagcggccgcaacgcagcatcagcaccggagacattatcggtttcgagttgcgcgcctgtgtcagcaaaaaactcaaaggccgtcacatctactttcgcacctcggattggcaacgtcggcatagctggatggaacgaaagagggaggcgcatggatttacgcttatcaccgtacattgcagcgcctcgatgcaaaccgtgcagactggcgagagacaatttacggttgatcagacggtctacaccggggttctcaaagtaacggacactgaacgttttaacgcagccctcgccaatggcatcggcattaagacccgtgctttcggctttggcatgttggttatttaacagaaggaatcagtatgaaatctatcatcattaacgccacacttaccaccatcggctccttgtctatcgccttgtctatcgccttgccggtctctgaaggtcagcagggcaacaattcccatcgtcacgcgcggcattgatgtagcgggcaacaagcaacaaaccggctacctgccagccagcacgctacgcggatttttacgcgcgccatcgtggtcgaacaaatgacgcaagccgcccccgcagggcatcactacaccctgcaaaaagcctacgccgacttgattggacaggatgccacctccgaatccagtgacgatattgatctgctcaagttgcgtcaaacccgtgaggacaacgcagtactcgatttatttggctcaggtctaggcattaaatcgcgcctgctggtgtcgcatttcttaccgacacataacgtattaccggaagtcttcaccggcgtgcgcaaggatttggacgataccgacggcgtgctggagctgatttctgaagcggatcgcgcgcgttatccggggcgttccgacgcgaacagcaaacgcgcggccgctgtaacggtggtaaaaggactggaggcaaagttgcgcaaagccaaaaaggccggtgagtcactggtcgaattggaactcgcgcggcaagcggcacaggatattgtcgaacgctacgaatccgacatgggcgagatgaccaatttttcacgcacgctgaccaactattttgccctcccggcaggcatcaaactcaaaggccgattagtgattgagaaagcgcgtgagcgtgatctggccatgatcgaactcgcgctgaatagactttcacagcgtccgattcttggcgcgcaaagcgcgcgcggctgcggggaaattgccggcgtattggatgtattagtggatggcctgcttgccaaaaaaatcaccatctgcgcatggcaagcagcgattattagcaatttttctgctgtcgaatcttgaaaataggtttaataatcaatgcataacaacagattggatcaagccaccccttgtttgggtgcttactataaataaaaatctggcattgtttcacgtgaaacaatcggtttggtcgtttacgaaaaagggaagttgaatgttccgttctgccgagcaaggtaattttgccgctatcgtcgcccggcacatcgcctcggctgacgcaccgttattgctggaaggcggcacggggatcggtaaaactcgtgcctatctttccgcgctgattcaatccggtttgcgcgtcactatcgtgctgcctacccatcagttgattgaccagatgttggcctcaaacgacttggcggcgacgcgaagcgcggccagtattgccgcctttcgtccagcgcgactatttgaaaattggtcggactatgaagctaataagcgcgccgcaatggccgcaaccgtgatgttttgcacagcggccagcgtcatcattgatcagcgtctgggcggcgaatataacggcgcaacaaaccgcgactatttgttgtttgatgaagccgatcaactaccggacatggccgcattgcaaagcgacttcaccattacacaggcggaactgacagcgttgggcataacactcagctgcgtgactgaagccttgcaagccattttggtcaaagcgccaaacgtggttgagccggaaaccagagccgccgcacgcatcattctcgatgccatcgagcaaccagcgtggtatcagtccgctggtgtaagcgatgaaggcgacattatgctgacgcacagcttgcccggtcgtttactgaaataaatcagcaattcagcccatttcgcctttgtctctgccacgctaaccgtcgccagacagctcaaggattttcaaaattcgatgggcattgcgacggtaagtaacttgtcgggcgtgatagaaccggagcgtcacggtacgcttgatttccactttatgccggtggtggttgataccgaggaatggcgcagtgccgtcatccgaatggcgaacgaagcgcctaaaccggtgctgatcgcgaccacatcacaccgtttttccagcctgctcggcgaacaattatcaggtgcaacggtaaggtcggacagcgaatccaccgctcacgccgccgtgcgcgtttcagccaatgggttttttattgcagccggtgcctgggcagggctggatacgccgttgcgctggcgttcgatcatcgtgccgcgcgtgccatacggacaaccagtggtgatagacggcgaaaccaccacccgttatttcgatgcgcacaacacggcgattcgccgtttgcgccaggtgataggccgtggtttacgttcggcggatgcaatctgtagcgtttacatcctcgatggcagggctgaaaaattaacgggctttgtaccggagcgtttttccgccgcatgggcatcacgcaaaacgtatttggagggggcgaggcaagcgctgattttgagcaggaacgaacgctatcccgccgtccgtcgtgccgcactcaattactatggtcgaaaatgtatggcgtgtagctttgtgccgcgcgtggatgcacaactggacgtgcatcatctcgacccgattgccgaaggtgttcgctgcatcaggattgaggatgtggtcgttttgtgtgcaaactgtcaccgtctggttcacgctacccatccccctttagcactcaccgatctaattgcgctactcaacgcaacaatatgattatccttaacgtaaaactcgcgcagcgacgaactgtacccctcgccctctgggagaggggggacgggggtgagggaacgggcatggcgggttttatcatcaggggtggttacttttccatgcccgttagatttttttcaattaaattcccgttagctaacggttttccctagcagcctgtcggacatgatgttaaatcatccgactttcctggcaagccggaagaatttgttcccgatttcataaaaataaccttcaggttgtcataaaaatccatttttggcgttgaagagcgg

SEQ ID NO: 278 - DNA, 11143 bp, Artificial Sequence
  Synthetic Oligonucleotide
  misc_feature (1)..(7036): n is a, c, g, or t
nnnnnnnnnnnnnnnnnnnnnnnnnnnnnnnnnnnnnnnnnnnnnnnnnnnnnnnnnnnnnnnnnnnnnnnnnnnnnnnnnnnnnnnnnnnnnnnnnnnnnnnnnnnnnnnnnnnnnnnnnnnnnnnnnnnnnnnnnnnnnnnnnnnnnnnnnnnnnnnnnnnnnnnnnnnnnnnnnnnnnnnnnnnnnnnnnnnnnnnnnnnnnnnnnnnnnnnnnnnnnnnnnnnnnnnnnnnnnnnnnnnnnnnnnnnnnnnnnnnnnnnnnnnnnnnnnnnnnnnnnnnnnnnnnnnnnnnnnnnnnnnnnnnnnnnnnnnnnnnnnnnnnnnnnnnnnnnnnnnnnnnnnnnnnnnnnnnnnnnnnnnnnnnnnnnnnnnnnnnnnnnnnnnnnnnnnnnnnnnnnnnnnnnnnnnnnnnnnnnnnnnnnnnnnnnnnnnnnnnnnnnnnnnnnnnnnnnnnnnnnnnnnnnnnnnnnnnnnnnnnnnnnnnnnnnnnnnnnnnnnnnnnnnnnnnnnnnnnnnnnnnnnnnnnnnnnnnnnnnnnnnnnnnnnnnnnnnnnnnnnnnnnnnnnnnnnnnnnnnnnnnnnnnnnnnnnnnnnnnnnnnnnnnnnnnnnnnnnnnnnnnnnnnnnnnnnnnnnnnnnnnnnnnnnnnnnnnnnnnnnnnnnnnnnnnnnnnnnnnnnnnnnnnnnnnnnnnnnnnnnnnnnnnnnnnnnnnnnnnnnnnnnnnnnnnnnnnnnnnnnnnnnnnnnnnnnnnnnnnnnnnnnnnnnnnnnnnnnnnnnnnnnnnnnnnnnnnnnnnnnnnnnnnnnnnnnnnnnnnnnnnnnnnnnnnnnnnnnnnnnnnnnnnnnnnnnnnnnnnnnnnnnnnnnnnnnnnnnnnnnnnnnnnnnnnnnnnnnnnnnnnnnnnnnnnnnnnnnnnnnnnnnnnnnnnnnnnnnnnnnnnnnnnnnnnnnnnnnnnnnnnnnnnnnnnnnnnnnnnnnnnnnnnnnnnnnnnnnnnnnnnnnnnnnnnnnnnnnnnnnnnnnnnnnnnnnnnnnnnnnnnnnnnnnnnnnnnnnnnnnnnnnnnnnnnnnnnnnnnnnnnnnnnnnnnnnnnnnnnnnnnnnnnnnnnnnnnnnnnnnnnnnnnnnnnnnnnnnnnnnnnnnnnnnnnnnnnnnnnnnnnnnnnnnnnnnnnnnnnnnnnnnnnnnnnnnnnnnnnnnnnnnnnnnnnnnnnnnnnnnnnnnnnnnnnnnnnnnnnnnnnnnnnnnnnnnnnnnnnnnnnnnnnnnnnnnnnnnnnnnnnnnnnnnnnnnnnnnnnnnnnnnnnnnnnnnnnnnnnnnnnnnnnnnnnnnnnnnnnnnnnnnnnnnnnnnnnnnnnnnnnnnnnnnnnnnnnnnnnnnnnnnnnnnnnnnnnnnnnnnnnnnnnnnnnnnnnnnnnnnnnnnnnnnnnnnnnnnnnnnnnnnnnnnnnnnnnnnnnnnnnnnnnnnnnnnnnnnnnnnnnnnnnnnnnnnnnnnnnnnnnnnnnnnnnnnnnnnnnnnnnnnnnnnnnnnnnnnnnnnnnnnnnnnnnnnnnnnnnnnnnnnnnnnnnnnnnnnnnnnnnnnnnnnnnnnnnnnnnnnnnnnnnnnnnnnnnnnnnnnnnnnnnnnnnnnnnnnnnnnnnnnnnnnnnnnnnnnnnnnnnnnnnnnnnnnnnnnnnnnnnnnnnnnnnnnnnnnnnnnnnnnnnnnnnnnnnnnnnnnnnnnnnnnnnnnnnnnnnnnnnnnnnnnnnnnnnnnnnnnnnnnnnnnnnnnnnnnnnnnnnnnnnnnnnnnnnnnnnnnnnnnnnnnnnnnnnnnnnnnnnnnnnnnnnnnnnnnnnnnnnnnnnnnnnnnnnnnnnnnnnnnnnnnnnnnnnnnnnnnnnnnnnnnnnnnnnnnnnnnnnnnnnnnnnnnnnnnnnnnnnnnnnnnnnnnnnnnnnnnnnnnnnnnnnnnnnnnnnnnnnnnnnnnnnnnnnnnnnnnnnnnnnnnnnnnnnnnnnnnnnnnnnnnnnnnnnnnnnnnnnnnnnnnnnnnnnnnnnnnnnnnnnnnnnnnnnnnnnnnnnnnnnnnnnnnnnnnnnnnnnnnnnnnnnnnnnnnnnnnnnnnnnnnnnnnnnnnnnnnnnnnnnnnnnnnnnnnnnnnnnnnnnnnnnnnnnnnnnnnnnnnnnnnnnnnnnnnnnnnnnnnnnnnnnnnnnnnnnnnnnnnnnnnnnnnnnnnnnnnnnnnnnnnnnnnnnnnnnnnnnnnnnnnnnnnnnnnnnnnnnnnnnnnnnnnnnnnnnnnnnnnnnnnnnnnnnnnnnnnnnnnnnnnnnnnnnnnnnnnnnnnnnnnnnnnnnnnnnnnnnnnnnnnnnnnnnnnnnnnnnnnnnnnnnnnnnnnnnnnnnnnnnnnnnnnnnnnnnnnnnnnnnnnnnnnnnnnnnnnnnnnnnnnnnnnnnnnnnnnnnnnnnnnnnnnnnnnnnnnnnnnnnnnnnnnnnnnnnnnnnnnnnnnnnnnnnnnnnnnnnnnnnnnnnnnnnnnnnnnnnnnnnnnnnnnnnnnnnnnnnnnnnnnnnnnnnnnnnnnnnnnnnnnnnnnnnnnnnnnnnnnnnnnnnnnnnnnnnnnnnnnnnnnnnnnnnnnnnnnnnnnnnnnnnnnnnnnnnnnnnnnnnnnnnnnnnnnnnnnnnnnnnnnnnnnnnnnnnnnnnnnnnnnnnnnnnnnnnnnnnnnnnnnnnnnnnnnnnnnnnnnnnnnnnnnnnnnnnnnnnnnnnnnnnnnnnnnnnnnnnnnnnnnnnnnnnnnnnnnnnnnnnnnnnnnnnnnnnnnnnnnnnnnnnnnnnnnnnnnnnnnnnnnnnnnnnnnnnnnnnnnnnnnnnnnnnnnnnnnnnnnnnnnnnnnnnnnnnnnnnnnnnnnnnnnnnnnnnnnnnnnnnnnnnnnnnnnnnnnnnnnnnnnnnnnnnnnnnnnnnnnnnnnnnnnnnnnnnnnnnnnnnnnnnnnnnnnnnnnnnnnnnnnnnnnnnnnnnnnnnnnnnnnnnnnnnnnnnnnnnnnnnnnnnnnnnnnnnnnnnnnnnnnnnnnnnnnnnnnnnnnnnnnnnnnnnnnnnnnnnnnnnnnnnnnnnnnnnnnnnnnnnnnnnnnnnnnnnnnnnnnnnnnnnnnnnnnnnnnnnnnnnnnnnnnnnnnnnnnnnnnnnnnnnnnnnnnnnnnnnnnnnnnnnnnnnnnnnnnnnnnnnnnnnnnnnnnnnnnnnnnnnnnnnnnnnnnnnnnnnnnnnnnnnnnnnnnnnnnnnnnnnnnnnnnnnnnnnnnnnnnnnnnnnnnnnnnnnnnnnnnnnnnnnnnnnnnnnnnnnnnnnnnnnnnnnnnnnnnnnnnnnnnnnnnnnnnnnnnnnnnnnnnnnnnnnnnnnnnnnnnnnnnnnnnnnnnnnnnnnnnnnnnnnnnnnnnnnnnnnnnnnnnnnnnnnnnnnnnnnnnnnnnnnnnnnnnnnnnnnnnnnnnnnnnnnnnnnnnnnnnnnnnnnnnnnnnnnnnnnnnnnnnnnnnnnnnnnnnnnnnnnnnnnnnnnnnnnnnnnnnnnnnnnnnnnnnnnnnnnnnnnnnnnnnnnnnnnnnnnnnnnnnnnnnnnnnnnnnnnnnnnnnnnnnnnnnnnnnnnnnnnnnnnnnnnnnnnnnnnnnnnnnnnnnnnnnnnnnnnnnnnnnnnnnnnnnnnnnnnnnnnnnnnnnnnnnnnnnnnnnnnnnnnnnnnnnnnnnnnnnnnnnnnnnnnnnnnnnnnnnnnnnnnnnnnnnnnnnnnnnnnnnnnnnnnnnnnnnnnnnnnnnnnnnnnnnnnnnnnnnnnnnnnnnnnnnnnnnnnnnnnnnnnnnnnnnnnnnnnnnnnnnnnnnnnnnnnnnnnnnnnnnnnnnnnnnnnnnnnnnnnnnnnnnnnnnnnnnnnnnnnnnnnnnnnnnnnnnnnnnnnnnnnnnnnnnnnnnnnnnnnnnnnnnnnnnnnnnnnnnnnnnnnnnnnnnnnnnnnnnnnnnnnnnnnnnnnnnnnnnnnnnnnnnnnnnnnnnnnnnnnnnnnnnnnnnnnnnnnnnnnnnnnnnnnnnnnnnnnnnnnnnnnnnnnnnnnnnnnnnnnnnnnnnnnnnnnnnnnnnnnnnnnnnnnnnnnnnnnnnnnnnnnnnnnnnnnnnnnnnnnnnnnnnnnnnnnnnnnnnnnnnnnnnnnnnnnnnnnnnnnnnnnnnnnnnnnnnnnnnnnnnnnnnnnnnnnnnnnnnnnnnnnnnnnnnnnnnnnnnnnnnnnnnnnnnnnnnnnnnnnnnnnnnnnnnnnnnnnnnnnnnnnnnnnnnnnnnnnnnnnnnnnnnnnnnnnnnnnnnnnnnnnnnnnnnnnnnnnnnnnnnnnnnnnnnnnnnnnnnnnnnnnnnnnnnnnnnnnnnnnnnnnnnnnnnnnnnnnnnnnnnnnnnnnnnnnnnnnnnnnnnnnnnnnnnnnnnnnnnnnnnnnnnnnnnnnnnnnnnnnnnnnnnnnnnnnnnnnnnnnnnnnnnnnnnnnnnnnnnnnnnnnnnnnnnnnnnnnnnnnnnnnnnnnnnnnnnnnnnnnnnnnnnnnnnnnnnnnnnnnnnnnnnnnnnnnnnnnnnnnnnnnnnnnnnnnnnnnnnnnnnnnnnnnnnnnnnnnnnnnnnnnnnnnnnnnnnnnnnnnnnnnnnnnnnnnnnnnnnnnnnnnnnnnnnnnnnnnnnnnnnnnnnnnnnnnnnnnnnnnnnnnnnnnnnnnnnnnnnnnnnnnnnnnnnnnnnnnnnnnnnnnnnnnnnnnnnnnnnnnnnnnnnnnnnnnnnnnnnnnnnnnnnnnnnnnnnnnnnnnnnnnnnnnnnnnnnnnnnnnnnnnnnnnnnnnnnnnnnnnnnnnnnnnnnnnnnnnnnnnnnnnnnnnnnnnnnnnnnnnnnnnnnnnnnnnnnnnnnnnnnnnnnnnnnnnnnnnnnnnnnnnnnnnnnnnnnnnnnnnnnnnnnnnnnnnnnnnnnnnnnnnnnnnnnnnnnnnnnnnnnnnnnnnnnnnnnnnnnnnnnnnnnnnnnnnnnnnnnnnnnnnnnnnnnnnnnnnnnnnnnnnnnnnnnnnnnnnnnnnnnnnnnnnnnnnnnnnnnnnnnnnnnnnnnnnnnnnnnnnnnnnnnnnnnnnnnnnnnnnnnnnnnnnnnnnnnnnnnnnnnnnnnnnnnnnnnnnnnnnnnnnnnnnnnnnnnnnnnnnnnnnnnnnnnnnnnnnnnnnnnnnnnnnnnnnnnnnnnnnnnnnnnnnnnnnnnnnnnnnnnnnnnnnnnnnnnnnnnnnnnnnnnnnnnnnnnnnnnnnnnnnnnnnnnnnnnnnnnnnnnnnnnnnnnnnnnnnnnnnnnnnnnnnnnnnnnnnnnnnnnnnnnnnnnnnnnnnnnnnnnnnnnnnnnnnnnnnnnnnnnnnnnnnnnnnnnnnnnnnnnnnnnnnnnnnnnnnnnnnnnnnnnnnnnnnnnnnnnnnnnnnnnnnnnnnnnnnnnnnnnnnnnnnnnnnnnnnnnnnnnnnnnnnnnnnnnnnnnnnnnnnnnnnnnnnnnnnnnnnnnnnnnnnnnnnnnnnnnnnnnnnnnnnnnnnnnnnnnnnnnnnnnnnnnnnnnnnnnnnnnnnnnnnnnnnnnnnnnnnnnnnnnnnnnnnnnnnnnnnnnnnnnnnnnnnnnnnnnnnnnnnnnnnnnnnnnnnnnnnnnnnnnnnnnnnnnnnnnnnnnnnnnnnnnnnnnnnnnnnnnnnnnnnnnnnnnnnnnnnnnnnnnnnnnnnnnnnnnnnnnnnnnnnnnnnnnnnnnnnnnnnnnnnnnnnnnnnnnnnnnnnnnnnnnnnnnnnnnnnnnnnnnnnnnnnnnnnnnnnnnnnnnnnnnnnnnnnnnnnnnnnnnnnnnnnnnnnnnnnnnnnnnnnnnnnnnnnnnnnnnnnnnnnnnnnnnnnnnnnnnnnnnnnnnnnnnnnnnnnnnnnnnnnnnnnnnnnnnnnnnnnnnnnnnnnnnnnnnnnnnnnnnnnnnnnnnnnnnnnnnnnnnnnnnnnnnnnnnnnnnnnnnnnnnnnnnnnnnnnnnnnnnnnnnnnnnnnnnnnnnnnnnnnnnnnnnnnnnnnnnnnnnnnnnnnnnnnnnnnnnnnnnnnnnnnnnnnnnnnnnnnnnnnnnnnnnnnnnnnnnnnnnnnnnnnnnnnnnnnnnnnnnnnnnnnnnnnnnnnnnnnnnnnnnnnnnnnnnnnnnnnnnnnnnnnnnnnnnnnnnnnnnnnnnnnnnnnnnnnnnnnnnnnnnnnnnnnnnnnnnnnnnnnnnnnnnnnnnnnnnnnnnnnnnnnnnnnnnnnnnnnnnnnnnnnnnnnnnnnnnnnnnnnnnnnnnnnnnnnnnnnnnnnnnnnnnnnnnnnnnnnnnnnnnnnnnnnnnnnnnnnnnnnnnnnnnnnnnnnnnnnnnnnnnnnnnnnnnnnnnnnnnnnnnnnnnnnnnnnnnnnnnnnnnnnnnnnnnnnnnnnnnnnnnnnnnnnnnnnnnnnnnnnnnnnnnnnnnnnnnnnnnnnnnnnnnnnnnnnnnnnnnnnnnnnnnnnnnnnnnnnnnnnnnnnnnnnnnnnnnnnnnnnnnnnnnnnnnnnnnnnnnnnnnnnnnnnnnnnnnnnnnnnnnnnnnnnnnnnnnnnnnnnnnnnnnnnnnnnnnnnnnnnnnnnnnnnnnnnnnnnnnnnnnnnnnnnnnnnnnnnnnnnnnnnnnnnnnnnnnnnnnnnnnnnnnnnnnnnnnnnnnnnnnnnnnnnnnnnnnnnnnnnnnnnnnnnnnnnnnnnnnnnnnnnnnnnnnnnnnnnnnnnnnnnnnnnnnnnnnnnnnnnnnnnnnnnnnnnnnnnnnnnnnnnnnnnnnnnnnnnnnnnnnnnnnnnnnnnnnnnnnnnnnnnnnnnnnnnnnnnnnnnnnnnnnnnnnnnnnnnnnnnnnnnnnnnnnnnnnnnnnnnnnnnnnnnnnnnnnnnnnnnnnnnnnnnnnnnnnnnnnnnnnnnnnnnnnnnnnnnnnnnnnnnnnnnnnnnnnnnnnnnnnnnnnnnnnnnnnnnnnnnnnnnnnnnnnnnnnnnnnnnngctgctcgcaaaatttggctgggcgagggcagattttgctggtttcgcaggtcaatagttgttctattgaccaagaaagcggtgaagtgggtcaagcaggcaagccgcacagcggcggctcgcaaatatgcgccgtccaggcgaattcccccggccacaccacccgaggacaagtgcagtagatttccttttagtccgacagactcctagaagccacccgtgaatccctctccttcatcgcctcactgcgtcccaatcacagcattgatcccgacctgattctgaaaaataaacacggcaagttacaccacaagttcgacacctcgctgaccaacgtaatgaacagttacacactactcaccgcgccgacggtgacctggtatgcagaaggcaatgccgagctcatttcatgcctgctatcgcccgtgcaatttattggcaagcggcgtgcctctggtttttggttgcgtctcgcattggcaagttgaagccgatgaactggatggtatcgaaggaatgttcggtgaagcgctgcgtccggtgccgattgacttgttcgagggcgacacttcccacccgattgttgatgccgcctggcagcctgcctactggaatcccaatcatcggacggcctgctatgcgccagtttaaggacgtgcaatgctgagttttttcaatgaaaattttggccgtcatctgctgttgcgcaccgatatcagcttgaaattgagcagcggccgcaacgcagcatcagcaccggagacattatcggtttcgagttgcgcgcctgtgtcagcaaaaaactcaaaggccgtcacatctactttcgcacctcggattggcaacgtcggcatagctggatggaacgaaagagggaggcgcatggatttacgcttatcaccgtacattgcagcgcctcgatgcaaaccgtgcagactggcgagagacaatttacggttgatcagacggtctacaccggggttctcaaagtaacggacactgaacgttttaacgcagccctcgccaatggcatcggcattaagacccgtgctttcggctttggcatgttggttatttaacagaaggaatcagtatgaaatctatcatcattaacgccacacttaccaccatcggctccttgtctatcgccttgtctatcgccttgccggtctctgaaggtcagcagggcaacaattcccatcgtcacgcgcggcattgatgtagcgggcaacaagcaacaaaccggctacctgccagccagcacgctacgcggatttttacgcgcgccatcgtggtcgaacaaatgacgcaagccgcccccgcagggcatcactacaccctgcaaaaagcctacgccgacttgattggacaggatgccacctccgaatccagtgacgatattgatctgctcaagttgcgtcaaacccgtgaggacaacgcagtactcgatttatttggctcaggtctaggcattaaatcgcgcctgctggtgtcgcatttcttaccgacacataacgtattaccggaagtcttcaccggcgtgcgcaaggatttggacgataccgacggcgtgctggagctgatttctgaagcggatcgcgcgcgttatccggggcgttccgacgcgaacagcaaacgcgcggccgctgtaacggtggtaaaaggactggaggcaaagttgcgcaaagccaaaaaggccggtgagtcactggtcgaattggaactcgcgcggcaagcggcacaggatattgtcgaacgctacgaatccgacatgggcgagatgaccaatttttcacgcacgctgaccaactattttgccctcccggcaggcatcaaactcaaaggccgattagtgattgagaaagcgcgtgagcgtgatctggccatgatcgaactcgcgctgaatagactttcacagcgtccgattcttggcgcgcaaagcgcgcgcggctgcggggaaattgccggcgtattggatgtattagtggatggcctgcttgccaaaaaaatcaccatctgcgcatggcaagcagcgattattagcaatttttctgctgtcgaatcttgaaaataggtttaataatcaatgcataacaacagattggatcaagccaccccttgtttgggtgcttactataaataaaaatctggcattgtttcacgtgaaacaatcggtttggtcgtttacgaaaaagggaagttgaatgttccgttctgccgagcaaggtaattttgccgctatcgtcgcccggcacatcgcctcggctgacgcaccgttattgctggaaggcggcacggggatcggtaaaactcgtgcctatctttccgcgctgattcaatccggtttgcgcgtcactatcgtgctgcctacccatcagttgattgaccagatgttggcctcaaacgacttggcggcgacgcgaagcgcggccagtattgccgcctttcgtccagcgcgactatttgaaaattggtcggactatgaagctaataagcgcgccgcaatggccgcaaccgtgatgttttgcacagcggccagcgtcatcattgatcagcgtctgggcggcgaatataacggcgcaacaaaccgcgactatttgttgtttgatgaagccgatcaactaccggacatggccgcattgcaaagcgacttcaccattacacaggcggaactgacagcgttgggcataacactcagctgcgtgactgaagccttgcaagccattttggtcaaagcgccaaacgtggttgagccggaaaccagagccgccgcacgcatcattctcgatgccatcgagcaaccagcgtggtatcagtccgctggtgtaagcgatgaaggcgacattatgctgacgcacagcttgcccggtcgtttactgaaataaatcagcaattcagcccatttcgcctttgtctctgccacgctaaccgtcgccagacagctcaaggattttcaaaattcgatgggcattgcgacggtaagtaacttgtcgggcgtgatagaaccggagcgtcacggtacgcttgatttccactttatgccggtggtggttgataccgaggaatggcgcagtgccgtcatccgaatggcgaacgaagcgcctaaaccggtgctgatcgcgaccacatcacaccgtttttccagcctgctcggcgaacaattatcaggtgcaacggtaaggtcggacagcgaatccaccgctcacgccgccgtgcgcgtttcagccaatgggttttttattgcagccggtgcctgggcagggctggatacgccgttgcgctggcgttcgatcatcgtgccgcgcgtgccatacggacaaccagtggtgatagacggcgaaaccaccacccgttatttcgatgcgcacaacacggcgattcgccgtttgcgccaggtgataggccgtggtttacgttcggcggatgcaatctgtagcgtttacatcctcgatggcagggctgaaaaattaacgggctttgtaccggagcgtttttccgccgcatgggcatcacgcaaaacgtatttggagggggcgaggcaagcgctgattttgagcaggaacgaacgctatcccgccgtccgtcgtgccgcactcaattactatggtcgaaaatgtatggcgtgtagctttgtgccgcgcgtggatgcacaactggacgtgcatcatctcgacccgattgccgaaggtgttcgctgcatcaggattgaggatgtggtcgttttgtgtgcaaactgtcaccgtctggttcacgctacccatccccctttagcactcaccgatctaattgcgctactcaacgcaacaatatgattatccttaacgtaaaactcgcgcagcgacgaactgtacccctcgccctctgggagaggggggacgggggtgagggaacgggcatggcgggttttatcatcaggggtggttacttttccatgcccgttagatttttttcaattaaattcccgttagctaacggttttccctagcagcctgtcggacatgatgttaaatcatccgactttcctggcaagccggaagaatttgttcccgatttcataaaaataaccttcaggttgtcataaaaatccatttttggcgttgaagagcg

SEQ ID NO: 279 - DNA, 11143 bp, Artificial Sequence
  Synthetic Oligonucleotide
  misc_feature (1)..(7096): n is a, c, g, or t
nnnnnnnnnnnnnnnnnnnnnnnnnnnnnnnnnnnnnnnnnnnnnnnnnnnnnnnnnnnnnnnnnnnnnnnnnnnnnnnnnnnnnnnnnnnnnnnnnnnnnnnnnnnnnnnnnnnnnnnnnnnnnnnnnnnnnnnnnnnnnnnnnnnnnnnnnnnnnnnnnnnnnnnnnnnnnnnnnnnnnnnnnnnnnnnnnnnnnnnnnnnnnnnnnnnnnnnnnnnnnnnnnnnnnnnnnnnnnnnnnnnnnnnnnnnnnnnnnnnnnnnnnnnnnnnnnnnnnnnnnnnnnnnnnnnnnnnnnnnnnnnnnnnnnnnnnnnnnnnnnnnnnnnnnnnnnnnnnnnnnnnnnnnnnnnnnnnnnnnnnnnnnnnnnnnnnnnnnnnnnnnnnnnnnnnnnnnnnnnnnnnnnnnnnnnnnnnnnnnnnnnnnnnnnnnnnnnnnnnnnnnnnnnnnnnnnnnnnnnnnnnnnnnnnnnnnnnnnnnnnnnnnnnnnnnnnnnnnnnnnnnnnnnnnnnnnnnnnnnnnnnnnnnnnnnnnnnnnnnnnnnnnnnnnnnnnnnnnnnnnnnnnnnnnnnnnnnnnnnnnnnnnnnnnnnnnnnnnnnnnnnnnnnnnnnnnnnnnnnnnnnnnnnnnnnnnnnnnnnnnnnnnnnnnnnnnnnnnnnnnnnnnnnnnnnnnnnnnnnnnnnnnnnnnnnnnnnnnnnnnnnnnnnnnnnnnnnnnnnnnnnnnnnnnnnnnnnnnnnnnnnnnnnnnnnnnnnnnnnnnnnnnnnnnnnnnnnnnnnnnnnnnnnnnnnnnnnnnnnnnnnnnnnnnnnnnnnnnnnnnnnnnnnnnnnnnnnnnnnnnnnnnnnnnnnnnnnnnnnnnnnnnnnnnnnnnnnnnnnnnnnnnnnnnnnnnnnnnnnnnnnnnnnnnnnnnnnnnnnnnnnnnnnnnnnnnnnnnnnnnnnnnnnnnnnnnnnnnnnnnnnnnnnnnnnnnnnnnnnnnnnnnnnnnnnnnnnnnnnnnnnnnnnnnnnnnnnnnnnnnnnnnnnnnnnnnnnnnnnnnnnnnnnnnnnnnnnnnnnnnnnnnnnnnnnnnnnnnnnnnnnnnnnnnnnnnnnnnnnnnnnnnnnnnnnnnnnnnnnnnnnnnnnnnnnnnnnnnnnnnnnnnnnnnnnnnnnnnnnnnnnnnnnnnnnnnnnnnnnnnnnnnnnnnnnnnnnnnnnnnnnnnnnnnnnnnnnnnnnnnnnnnnnnnnnnnnnnnnnnnnnnnnnnnnnnnnnnnnnnnnnnnnnnnnnnnnnnnnnnnnnnnnnnnnnnnnnnnnnnnnnnnnnnnnnnnnnnnnnnnnnnnnnnnnnnnnnnnnnnnnnnnnnnnnnnnnnnnnnnnnnnnnnnnnnnnnnnnnnnnnnnnnnnnnnnnnnnnnnnnnnnnnnnnnnnnnnnnnnnnnnnnnnnnnnnnnnnnnnnnnnnnnnnnnnnnnnnnnnnnnnnnnnnnnnnnnnnnnnnnnnnnnnnnnnnnnnnnnnnnnnnnnnnnnnnnnnnnnnnnnnnnnnnnnnnnnnnnnnnnnnnnnnnnnnnnnnnnnnnnnnnnnnnnnnnnnnnnnnnnnnnnnnnnnnnnnnnnnnnnnnnnnnnnnnnnnnnnnnnnnnnnnnnnnnnnnnnnnnnnnnnnnnnnnnnnnnnnnnnnnnnnnnnnnnnnnnnnnnnnnnnnnnnnnnnnnnnnnnnnnnnnnnnnnnnnnnnnnnnnnnnnnnnnnnnnnnnnnnnnnnnnnnnnnnnnnnnnnnnnnnnnnnnnnnnnnnnnnnnnnnnnnnnnnnnnnnnnnnnnnnnnnnnnnnnnnnnnnnnnnnnnnnnnnnnnnnnnnnnnnnnnnnnnnnnnnnnnnnnnnnnnnnnnnnnnnnnnnnnnnnnnnnnnnnnnnnnnnnnnnnnnnnnnnnnnnnnnnnnnnnnnnnnnnnnnnnnnnnnnnnnnnnnnnnnnnnnnnnnnnnnnnnnnnnnnnnnnnnnnnnnnnnnnnnnnnnnnnnnnnnnnnnnnnnnnnnnnnnnnnnnnnnnnnnnnnnnnnnnnnnnnnnnnnnnnnnnnnnnnnnnnnnnnnnnnnnnnnnnnnnnnnnnnnnnnnnnnnnnnnnnnnnnnnnnnnnnnnnnnnnnnnnnnnnnnnnnnnnnnnnnnnnnnnnnnnnnnnnnnnnnnnnnnnnnnnnnnnnnnnnnnnnnnnnnnnnnnnnnnnnnnnnnnnnnnnnnnnnnnnnnnnnnnnnnnnnnnnnnnnnnnnnnnnnnnnnnnnnnnnnnnnnnnnnnnnnnnnnnnnnnnnnnnnnnnnnnnnnnnnnnnnnnnnnnnnnnnnnnnnnnnnnnnnnnnnnnnnnnnnnnnnnnnnnnnnnnnnnnnnnnnnnnnnnnnnnnnnnnnnnnnnnnnnnnnnnnnnnnnnnnnnnnnnnnnnnnnnnnnnnnnnnnnnnnnnnnnnnnnnnnnnnnnnnnnnnnnnnnnnnnnnnnnnnnnnnnnnnnnnnnnnnnnnnnnnnnnnnnnnnnnnnnnnnnnnnnnnnnnnnnnnnnnnnnnnnnnnnnnnnnnnnnnnnnnnnnnnnnnnnnnnnnnnnnnnnnnnnnnnnnnnnnnnnnnnnnnnnnnnnnnnnnnnnnnnnnnnnnnnnnnnnnnnnnnnnnnnnnnnnnnnnnnnnnnnnnnnnnnnnnnnnnnnnnnnnnnnnnnnnnnnnnnnnnnnnnnnnnnnnnnnnnnnnnnnnnnnnnnnnnnnnnnnnnnnnnnnnnnnnnnnnnnnnnnnnnnnnnnnnnnnnnnnnnnnnnnnnnnnnnnnnnnnnnnnnnnnnnnnnnnnnnnnnnnnnnnnnnnnnnnnnnnnnnnnnnnnnnnnnnnnnnnnnnnnnnnnnnnnnnnnnnnnnnnnnnnnnnnnnnnnnnnnnnnnnnnnnnnnnnnnnnnnnnnnnnnnnnnnnnnnnnnnnnnnnnnnnnnnnnnnnnnnnnnnnnnnnnnnnnnnnnnnnnnnnnnnnnnnnnnnnnnnnnnnnnnnnnnnnnnnnnnnnnnnnnnnnnnnnnnnnnnnnnnnnnnnnnnnnnnnnnnnnnnnnnnnnnnnnnnnnnnnnnnnnnnnnnnnnnnnnnnnnnnnnnnnnnnnnnnnnnnnnnnnnnnnnnnnnnnnnnnnnnnnnnnnnnnnnnnnnnnnnnnnnnnnnnnnnnnnnnnnnnnnnnnnnnnnnnnnnnnnnnnnnnnnnnnnnnnnnnnnnnnnnnnnnnnnnnnnnnnnnnnnnnnnnnnnnnnnnnnnnnnnnnnnnnnnnnnnnnnnnnnnnnnnnnnnnnnnnnnnnnnnnnnnnnnnnnnnnnnnnnnnnnnnnnnnnnnnnnnnnnnnnnnnnnnnnnnnnnnnnnnnnnnnnnnnnnnnnnnnnnnnnnnnnnnnnnnnnnnnnnnnnnnnnnnnnnnnnnnnnnnnnnnnnnnnnnnnnnnnnnnnnnnnnnnnnnnnnnnnnnnnnnnnnnnnnnnnnnnnnnnnnnnnnnnnnnnnnnnnnnnnnnnnnnnnnnnnnnnnnnnnnnnnnnnnnnnnnnnnnnnnnnnnnnnnnnnnnnnnnnnnnnnnnnnnnnnnnnnnnnnnnnnnnnnnnnnnnnnnnnnnnnnnnnnnnnnnnnnnnnnnnnnnnnnnnnnnnnnnnnnnnnnnnnnnnnnnnnnnnnnnnnnnnnnnnnnnnnnnnnnnnnnnnnnnnnnnnnnnnnnnnnnnnnnnnnnnnnnnnnnnnnnnnnnnnnnnnnnnnnnnnnnnnnnnnnnnnnnnnnnnnnnnnnnnnnnnnnnnnnnnnnnnnnnnnnnnnnnnnnnnnnnnnnnnnnnnnnnnnnnnnnnnnnnnnnnnnnnnnnnnnnnnnnnnnnnnnnnnnnnnnnnnnnnnnnnnnnnnnnnnnnnnnnnnnnnnnnnnnnnnnnnnnnnnnnnnnnnnnnnnnnnnnnnnnnnnnnnnnnnnnnnnnnnnnnnnnnnnnnnnnnnnnnnnnnnnnnnnnnnnnnnnnnnnnnnnnnnnnnnnnnnnnnnnnnnnnnnnnnnnnnnnnnnnnnnnnnnnnnnnnnnnnnnnnnnnnnnnnnnnnnnnnnnnnnnnnnnnnnnnnnnnnnnnnnnnnnnnnnnnnnnnnnnnnnnnnnnnnnnnnnnnnnnnnnnnnnnnnnnnnnnnnnnnnnnnnnnnnnnnnnnnnnnnnnnnnnnnnnnnnnnnnnnnnnnnnnnnnnnnnnnnnnnnnnnnnnnnnnnnnnnnnnnnnnnnnnnnnnnnnnnnnnnnnnnnnnnnnnnnnnnnnnnnnnnnnnnnnnnnnnnnnnnnnnnnnnnnnnnnnnnnnnnnnnnnnnnnnnnnnnnnnnnnnnnnnnnnnnnnnnnnnnnnnnnnnnnnnnnnnnnnnnnnnnnnnnnnnnnnnnnnnnnnnnnnnnnnnnnnnnnnnnnnnnnnnnnnnnnnnnnnnnnnnnnnnnnnnnnnnnnnnnnnnnnnnnnnnnnnnnnnnnnnnnnnnnnnnnnnnnnnnnnnnnnnnnnnnnnnnnnnnnnnnnnnnnnnnnnnnnnnnnnnnnnnnnnnnnnnnnnnnnnnnnnnnnnnnnnnnnnnnnnnnnnnnnnnnnnnnnnnnnnnnnnnnnnnnnnnnnnnnnnnnnnnnnnnnnnnnnnnnnnnnnnnnnnnnnnnnnnnnnnnnnnnnnnnnnnnnnnnnnnnnnnnnnnnnnnnnnnnnnnnnnnnnnnnnnnnnnnnnnnnnnnnnnnnnnnnnnnnnnnnnnnnnnnnnnnnnnnnnnnnnnnnnnnnnnnnnnnnnnnnnnnnnnnnnnnnnnnnnnnnnnnnnnnnnnnnnnnnnnnnnnnnnnnnnnnnnnnnnnnnnnnnnnnnnnnnnnnnnnnnnnnnnnnnnnnnnnnnnnnnnnnnnnnnnnnnnnnnnnnnnnnnnnnnnnnnnnnnnnnnnnnnnnnnnnnnnnnnnnnnnnnnnnnnnnnnnnnnnnnnnnnnnnnnnnnnnnnnnnnnnnnnnnnnnnnnnnnnnnnnnnnnnnnnnnnnnnnnnnnnnnnnnnnnnnnnnnnnnnnnnnnnnnnnnnnnnnnnnnnnnnnnnnnnnnnnnnnnnnnnnnnnnnnnnnnnnnnnnnnnnnnnnnnnnnnnnnnnnnnnnnnnnnnnnnnnnnnnnnnnnnnnnnnnnnnnnnnnnnnnnnnnnnnnnnnnnnnnnnnnnnnnnnnnnnnnnnnnnnnnnnnnnnnnnnnnnnnnnnnnnnnnnnnnnnnnnnnnnnnnnnnnnnnnnnnnnnnnnnnnnnnnnnnnnnnnnnnnnnnnnnnnnnnnnnnnnnnnnnnnnnnnnnnnnnnnnnnnnnnnnnnnnnnnnnnnnnnnnnnnnnnnnnnnnnnnnnnnnnnnnnnnnnnnnnnnnnnnnnnnnnnnnnnnnnnnnnnnnnnnnnnnnnnnnnnnnnnnnnnnnnnnnnnnnnnnnnnnnnnnnnnnnnnnnnnnnnnnnnnnnnnnnnnnnnnnnnnnnnnnnnnnnnnnnnnnnnnnnnnnnnnnnnnnnnnnnnnnnnnnnnnnnnnnnnnnnnnnnnnnnnnnnnnnnnnnnnnnnnnnnnnnnnnnnnnnnnnnnnnnnnnnnnnnnnnnnnnnnnnnnnnnnnnnnnnnnnnnnnnnnnnnnnnnnnnnnnnnnnnnnnnnnnnnnnnnnnnnnnnnnnnnnnnnnnnnnnnnnnnnnnnnnnnnnnnnnnnnnnnnnnnnnnnnnnnnnnnnnnnnnnnnnnnnnnnnnnnnnnnnnnnnnnnnnnnnnnnnnnnnnnnnnnnnnnnnnnnnnnnnnnnnnnnnnnnnnnnnnnnnnnnnnnnnnnnnnnnnnnnnnnnnnnnnnnnnnnnnnnnnnnnnnnnnnnnnnnnnnnnnnnnnnnnnnnnnnnnnnnnnnnnnnnnnnnnnnnnnnnnnnnnnnnnnnnnnnnnnnnnnnnnnnnnnnnnnnnnnnnnnnnnnnnnnnnnnnnnnnnnnnnnnnnnnnnnnnnnnnnnnnnnnnnnnnnnnnnnnnnnnnnnnnnnnnnnnnnnnnnnnnnnnnnnnnnnnnnnnnnnnnnnnnnnnnnnnnnnnnnnnnnnnnnnnnnnnnnnnnnnnnnnnnnnnnnnnnnnnnnnnnnnnnnnnnnnnnnnnnnnnnnnnnnnnnnnnnnnnnnnnnnnnnnnnnnnnnnnnnnnnnnnnnnnnnnnnnnnnnnnnnnnnnnnnnnnnnnnnnnnnnnnnnnnnnnnnnnnnnnnnnnnnnnnnnnnnnnnnnnnnnnnnnnnnnnnnnnnnnnnnnnnnnnnnnnnnnnnnnnnnnnnnnnnnnnnnnnnnnnnnnnnnnnnnnnnnnnnnnnnnnnnnnnnnnnnnnnnnnnnnnnnnnnnnnnnnnnnnnnnnnnnnnnnnnnnnnnnnnnnnnnnnnnnnnnnnnnnnnnnnnnnnnnnnnnnnnnnnnnnnnnnnnnnnnnnnnnnnnnnnnnnnnnnnnnnnnnnnnnnnnnnnnnnnnnnnnnnnnnnnnnnnnnnnnnnnnnnnnnnnnnnnnnnnnnnnnnnnnnnnnnnnnnnnnnnnnnnnnnnnnnnnnnnnnnnnnnnnnnnnnnnnnnnnnnnnnnnnnnnnnnnnnnnnnnnnnnnnnnnnnnnnnnnnnnnnnnnnnnnnnnnnnnnnnnnnnnnnnnnnnnnnnnnnnnnnnnnnnnnnnnnnnnnnnnnnnnnnnnnnnnnnnnnnnnnnnnnnnnnnnnnnnnnnnnnnnnnnnnnnnnnnnnnnnnnnnnnnnnnnnnnnnnnnnnnnnnnnnnnnnnnnnnnnnnnnnnnnnnnnnnnnnnnnnnnnnnnnnnnnnnnnnnnnnnnnnnnnnnnnnnnnnnnnnnnnnnnnnnnnnnnnnnnnnnnnnnnnnnnnnnnnnnnnnnnnnnnnnnnnnnnnnnnnnnnnnnnnnnnnnnnnnnnnnnnnnnnnnnnnnnnnnnnnnnnnnnnnnnnnnnnnnnnnnnnnnnnnnnnnnnnnnnnnnnnnnnnnnnnnnnnnnnnnnnnnnnnnnnnnnnnnnnnnnnnnnnnnnnnnnnnnnnnnnnnnnnnnnnnnnnnnnnnnnnnnnnnnnnnnnnnnnnnnnnnnnnnnnnnnnnnnnnnnnnnnnnnnnnnnnnnnnnnnnnnnnngttctattgaccaagaaagcggtgaagtgggtcaagcaggcaagccgcacagcggcggctcgcaaatatgcgccgtccaggcgaattcccccggccacaccacccgaggacaagtgcagtagatttccttttagtccgacagactcctagaagccacccgtgaatccctctccttcatcgcctcactgcgtcccaatcacagcattgatcccgacctgattctgaaaaataaacacggcaagttacaccacaagttcgacacctcgctgaccaacgtaatgaacagttacacactactcaccgcgccgacggtgacctggtatgcagaaggcaatgccgagctcatttcatgcctgctatcgcccgtgcaatttattggcaagcggcgtgcctctggtttttggttgcgtctcgcattggcaagttgaagccgatgaactggatggtatcgaaggaatgttcggtgaagcgctgcgtccggtgccgattgacttgttcgagggcgacacttcccacccgattgttgatgccgcctggcagcctgcctactggaatcccaatcatcggacggcctgctatgcgccagtttaaggacgtgcaatgctgagttttttcaatgaaaattttggccgtcatctgctgttgcgcaccgatatcagcttgaaattgagcagcggccgcaacgcagcatcagcaccggagacattatcggtttcgagttgcgcgcctgtgtcagcaaaaaactcaaaggccgtcacatctactttcgcacctcggattggcaacgtcggcatagctggatggaacgaaagagggaggcgcatggatttacgcttatcaccgtacattgcagcgcctcgatgcaaaccgtgcagactggcgagagacaatttacggttgatcagacggtctacaccggggttctcaaagtaacggacactgaacgttttaacgcagccctcgccaatggcatcggcattaagacccgtgctttcggctttggcatgttggttatttaacagaaggaatcagtatgaaatctatcatcattaacgccacacttaccaccatcggctccttgtctatcgccttgtctatcgccttgccggtctctgaaggtcagcagggcaacaattcccatcgtcacgcgcggcattgatgtagcgggcaacaagcaacaaaccggctacctgccagccagcacgctacgcggatttttacgcgcgccatcgtggtcgaacaaatgacgcaagccgcccccgcagggcatcactacaccctgcaaaaagcctacgccgacttgattggacaggatgccacctccgaatccagtgacgatattgatctgctcaagttgcgtcaaacccgtgaggacaacgcagtactcgatttatttggctcaggtctaggcattaaatcgcgcctgctggtgtcgcatttcttaccgacacataacgtattaccggaagtcttcaccggcgtgcgcaaggatttggacgataccgacggcgtgctggagctgatttctgaagcggatcgcgcgcgttatccggggcgttccgacgcgaacagcaaacgcgcggccgctgtaacggtggtaaaaggactggaggcaaagttgcgcaaagccaaaaaggccggtgagtcactggtcgaattggaactcgcgcggcaagcggcacaggatattgtcgaacgctacgaatccgacatgggcgagatgaccaatttttcacgcacgctgaccaactattttgccctcccggcaggcatcaaactcaaaggccgattagtgattgagaaagcgcgtgagcgtgatctggccatgatcgaactcgcgctgaatagactttcacagcgtccgattcttggcgcgcaaagcgcgcgcggctgcggggaaattgccggcgtattggatgtattagtggatggcctgcttgccaaaaaaatcaccatctgcgcatggcaagcagcgattattagcaatttttctgctgtcgaatcttgaaaataggtttaataatcaatgcataacaacagattggatcaagccaccccttgtttgggtgcttactataaataaaaatctggcattgtttcacgtgaaacaatcggtttggtcgtttacgaaaaagggaagttgaatgttccgttctgccgagcaaggtaattttgccgctatcgtcgcccggcacatcgcctcggctgacgcaccgttattgctggaaggcggcacggggatcggtaaaactcgtgcctatctttccgcgctgattcaatccggtttgcgcgtcactatcgtgctgcctacccatcagttgattgaccagatgttggcctcaaacgacttggcggcgacgcgaagcgcggccagtattgccgcctttcgtccagcgcgactatttgaaaattggtcggactatgaagctaataagcgcgccgcaatggccgcaaccgtgatgttttgcacagcggccagcgtcatcattgatcagcgtctgggcggcgaatataacggcgcaacaaaccgcgactatttgttgtttgatgaagccgatcaactaccggacatggccgcattgcaaagcgacttcaccattacacaggcggaactgacagcgttgggcataacactcagctgcgtgactgaagccttgcaagccattttggtcaaagcgccaaacgtggttgagccggaaaccagagccgccgcacgcatcattctcgatgccatcgagcaaccagcgtggtatcagtccgctggtgtaagcgatgaaggcgacattatgctgacgcacagcttgcccggtcgtttactgaaataaatcagcaattcagcccatttcgcctttgtctctgccacgctaaccgtcgccagacagctcaaggattttcaaaattcgatgggcattgcgacggtaagtaacttgtcgggcgtgatagaaccggagcgtcacggtacgcttgatttccactttatgccggtggtggttgataccgaggaatggcgcagtgccgtcatccgaatggcgaacgaagcgcctaaaccggtgctgatcgcgaccacatcacaccgtttttccagcctgctcggcgaacaattatcaggtgcaacggtaaggtcggacagcgaatccaccgctcacgccgccgtgcgcgtttcagccaatgggttttttattgcagccggtgcctgggcagggctggatacgccgttgcgctggcgttcgatcatcgtgccgcgcgtgccatacggacaaccagtggtgatagacggcgaaaccaccacccgttatttcgatgcgcacaacacggcgattcgccgtttgcgccaggtgataggccgtggtttacgttcggcggatgcaatctgtagcgtttacatcctcgatggcagggctgaaaaattaacgggctttgtaccggagcgtttttccgccgcatgggcatcacgcaaaacgtatttggagggggcgaggcaagcgctgattttgagcaggaacgaacgctatcccgccgtccgtcgtgccgcactcaattactatggtcgaaaatgtatggcgtgtagctttgtgccgcgcgtggatgcacaactggacgtgcatcatctcgacccgattgccgaaggtgttcgctgcatcaggattgaggatgtggtcgttttgtgtgcaaactgtcaccgtctggttcacgctacccatccccctttagcactcaccgatctaattgcgctactcaacgcaacaatatgattatccttaacgtaaaactcgcgcagcgacgaactgtacccctcgccctctgggagaggggggacgggggtgagggaacgggcatggcgggttttatcatcaggggtggttacttttccatgcccgttagatttttttcaattaaattcccgttagctaacggttttccctagcagcctgtcggacatgatgttaaatcatccgactttcctggcaagccggaagaatttgttcccgatttcataaaaataaccttcaggttgtcataaaaatccatttttggcgttgaagagcg

SEQ ID NO: 280 - DNA, 11142 bp, Artificial Sequence
  Synthetic Oligonucleotide
  misc_feature (1)..(7127): n is a, c, g, or t
nnnnnnnnnnnnnnnnnnnnnnnnnnnnnnnnnnnnnnnnnnnnnnnnnnnnnnnnnnnnnnnnnnnnnnnnnnnnnnnnnnnnnnnnnnnnnnnnnnnnnnnnnnnnnnnnnnnnnnnnnnnnnnnnnnnnnnnnnnnnnnnnnnnnnnnnnnnnnnnnnnnnnnnnnnnnnnnnnnnnnnnnnnnnnnnnnnnnnnnnnnnnnnnnnnnnnnnnnnnnnnnnnnnnnnnnnnnnnnnnnnnnnnnnnnnnnnnnnnnnnnnnnnnnnnnnnnnnnnnnnnnnnnnnnnnnnnnnnnnnnnnnnnnnnnnnnnnnnnnnnnnnnnnnnnnnnnnnnnnnnnnnnnnnnnnnnnnnnnnnnnnnnnnnnnnnnnnnnnnnnnnnnnnnnnnnnnnnnnnnnnnnnnnnnnnnnnnnnnnnnnnnnnnnnnnnnnnnnnnnnnnnnnnnnnnnnnnnnnnnnnnnnnnnnnnnnnnnnnnnnnnnnnnnnnnnnnnnnnnnnnnnnnnnnnnnnnnnnnnnnnnnnnnnnnnnnnnnnnnnnnnnnnnnnnnnnnnnnnnnnnnnnnnnnnnnnnnnnnnnnnnnnnnnnnnnnnnnnnnnnnnnnnnnnnnnnnnnnnnnnnnnnnnnnnnnnnnnnnnnnnnnnnnnnnnnnnnnnnnnnnnnnnnnnnnnnnnnnnnnnnnnnnnnnnnnnnnnnnnnnnnnnnnnnnnnnnnnnnnnnnnnnnnnnnnnnnnnnnnnnnnnnnnnnnnnnnnnnnnnnnnnnnnnnnnnnnnnnnnnnnnnnnnnnnnnnnnnnnnnnnnnnnnnnnnnnnnnnnnnnnnnnnnnnnnnnnnnnnnnnnnnnnnnnnnnnnnnnnnnnnnnnnnnnnnnnnnnnnnnnnnnnnnnnnnnnnnnnnnnnnnnnnnnnnnnnnnnnnnnnnnnnnnnnnnnnnnnnnnnnnnnnnnnnnnnnnnnnnnnnnnnnnnnnnnnnnnnnnnnnnnnnnnnnnnnnnnnnnnnnnnnnnnnnnnnnnnnnnnnnnnnnnnnnnnnnnnnnnnnnnnnnnnnnnnnnnnnnnnnnnnnnnnnnnnnnnnnnnnnnnnnnnnnnnnnnnnnnnnnnnnnnnnnnnnnnnnnnnnnnnnnnnnnnnnnnnnnnnnnnnnnnnnnnnnnnnnnnnnnnnnnnnnnnnnnnnnnnnnnnnnnnnnnnnnnnnnnnnnnnnnnnnnnnnnnnnnnnnnnnnnnnnnnnnnnnnnnnnnnnnnnnnnnnnnnnnnnnnnnnnnnnnnnnnnnnnnnnnnnnnnnnnnnnnnnnnnnnnnnnnnnnnnnnnnnnnnnnnnnnnnnnnnnnnnnnnnnnnnnnnnnnnnnnnnnnnnnnnnnnnnnnnnnnnnnnnnnnnnnnnnnnnnnnnnnnnnnnnnnnnnnnnnnnnnnnnnnnnnnnnnnnnnnnnnnnnnnnnnnnnnnnnnnnnnnnnnnnnnnnnnnnnnnnnnnnnnnnnnnnnnnnnnnnnnnnnnnnnnnnnnnnnnnnnnnnnnnnnnnnnnnnnnnnnnnnnnnnnnnnnnnnnnnnnnnnnnnnnnnnnnnnnnnnnnnnnnnnnnnnnnnnnnnnnnnnnnnnnnnnnnnnnnnnnnnnnnnnnnnnnnnnnnnnnnnnnnnnnnnnnnnnnnnnnnnnnnnnnnnnnnnnnnnnnnnnnnnnnnnnnnnnnnnnnnnnnnnnnnnnnnnnnnnnnnnnnnnnnnnnnnnnnnnnnnnnnnnnnnnnnnnnnnnnnnnnnnnnnnnnnnnnnnnnnnnnnnnnnnnnnnnnnnnnnnnnnnnnnnnnnnnnnnnnnnnnnnnnnnnnnnnnnnnnnnnnnnnnnnnnnnnnnnnnnnnnnnnnnnnnnnnnnnnnnnnnnnnnnnnnnnnnnnnnnnnnnnnnnnnnnnnnnnnnnnnnnnnnnnnnnnnnnnnnnnnnnnnnnnnnnnnnnnnnnnnnnnnnnnnnnnnnnnnnnnnnnnnnnnnnnnnnnnnnnnnnnnnnnnnnnnnnnnnnnnnnnnnnnnnnnnnnnnnnnnnnnnnnnnnnnnnnnnnnnnnnnnnnnnnnnnnnnnnnnnnnnnnnnnnnnnnnnnnnnnnnnnnnnnnnnnnnnnnnnnnnnnnnnnnnnnnnnnnnnnnnnnnnnnnnnnnnnnnnnnnnnnnnnnnnnnnnnnnnnnnnnnnnnnnnnnnnnnnnnnnnnnnnnnnnnnnnnnnnnnnnnnnnnnnnnnnnnnnnnnnnnnnnnnnnnnnnnnnnnnnnnnnnnnnnnnnnnnnnnnnnnnnnnnnnnnnnnnnnnnnnnnnnnnnnnnnnnnnnnnnnnnnnnnnnnnnnnnnnnnnnnnnnnnnnnnnnnnnnnnnnnnnnnnnnnnnnnnnnnnnnnnnnnnnnnnnnnnnnnnnnnnnnnnnnnnnnnnnnnnnnnnnnnnnnnnnnnnnnnnnnnnnnnnnnnnnnnnnnnnnnnnnnnnnnnnnnnnnnnnnnnnnnnnnnnnnnnnnnnnnnnnnnnnnnnnnnnnnnnnnnnnnnnnnnnnnnnnnnnnnnnnnnnnnnnnnnnnnnnnnnnnnnnnnnnnnnnnnnnnnnnnnnnnnnnnnnnnnnnnnnnnnnnnnnnnnnnnnnnnnnnnnnnnnnnnnnnnnnnnnnnnnnnnnnnnnnnnnnnnnnnnnnnnnnnnnnnnnnnnnnnnnnnnnnnnnnnnnnnnnnnnnnnnnnnnnnnnnnnnnnnnnnnnnnnnnnnnnnnnnnnnnnnnnnnnnnnnnnnnnnnnnnnnnnnnnnnnnnnnnnnnnnnnnnnnnnnnnnnnnnnnnnnnnnnnnnnnnnnnnnnnnnnnnnnnnnnnnnnnnnnnnnnnnnnnnnnnnnnnnnnnnnnnnnnnnnnnnnnnnnnnnnnnnnnnnnnnnnnnnnnnnnnnnnnnnnnnnnnnnnnnnnnnnnnnnnnnnnnnnnnnnnnnnnnnnnnnnnnnnnnnnnnnnnnnnnnnnnnnnnnnnnnnnnnnnnnnnnnnnnnnnnnnnnnnnnnnnnnnnnnnnnnnnnnnnnnnnnnnnnnnnnnnnnnnnnnnnnnnnnnnnnnnnnnnnnnnnnnnnnnnnnnnnnnnnnnnnnnnnnnnnnnnnnnnnnnnnnnnnnnnnnnnnnnnnnnnnnnnnnnnnnnnnnnnnnnnnnnnnnnnnnnnnnnnnnnnnnnnnnnnnnnnnnnnnnnnnnnnnnnnnnnnnnnnnnnnnnnnnnnnnnnnnnnnnnnnnnnnnnnnnnnnnnnnnnnnnnnnnnnnnnnnnnnnnnnnnnnnnnnnnnnnnnnnnnnnnnnnnnnnnnnnnnnnnnnnnnnnnnnnnnnnnnnnnnnnnnnnnnnnnnnnnnnnnnnnnnnnnnnnnnnnnnnnnnnnnnnnnnnnnnnnnnnnnnnnnnnnnnnnnnnnnnnnnnnnnnnnnnnnnnnnnnnnnnnnnnnnnnnnnnnnnnnnnnnnnnnnnnnnnnnnnnnnnnnnnnnnnnnnnnnnnnnnnnnnnnnnnnnnnnnnnnnnnnnnnnnnnnnnnnnnnnnnnnnnnnnnnnnnnnnnnnnnnnnnnnnnnnnnnnnnnnnnnnnnnnnnnnnnnnnnnnnnnnnnnnnnnnnnnnnnnnnnnnnnnnnnnnnnnnnnnnnnnnnnnnnnnnnnnnnnnnnnnnnnnnnnnnnnnnnnnnnnnnnnnnnnnnnnnnnnnnnnnnnnnnnnnnnnnnnnnnnnnnnnnnnnnnnnnnnnnnnnnnnnnnnnnnnnnnnnnnnnnnnnnnnnnnnnnnnnnnnnnnnnnnnnnnnnnnnnnnnnnnnnnnnnnnnnnnnnnnnnnnnnnnnnnnnnnnnnnnnnnnnnnnnnnnnnnnnnnnnnnnnnnnnnnnnnnnnnnnnnnnnnnnnnnnnnnnnnnnnnnnnnnnnnnnnnnnnnnnnnnnnnnnnnnnnnnnnnnnnnnnnnnnnnnnnnnnnnnnnnnnnnnnnnnnnnnnnnnnnnnnnnnnnnnnnnnnnnnnnnnnnnnnnnnnnnnnnnnnnnnnnnnnnnnnnnnnnnnnnnnnnnnnnnnnnnnnnnnnnnnnnnnnnnnnnnnnnnnnnnnnnnnnnnnnnnnnnnnnnnnnnnnnnnnnnnnnnnnnnnnnnnnnnnnnnnnnnnnnnnnnnnnnnnnnnnnnnnnnnnnnnnnnnnnnnnnnnnnnnnnnnnnnnnnnnnnnnnnnnnnnnnnnnnnnnnnnnnnnnnnnnnnnnnnnnnnnnnnnnnnnnnnnnnnnnnnnnnnnnnnnnnnnnnnnnnnnnnnnnnnnnnnnnnnnnnnnnnnnnnnnnnnnnnnnnnnnnnnnnnnnnnnnnnnnnnnnnnnnnnnnnnnnnnnnnnnnnnnnnnnnnnnnnnnnnnnnnnnnnnnnnnnnnnnnnnnnnnnnnnnnnnnnnnnnnnnnnnnnnnnnnnnnnnnnnnnnnnnnnnnnnnnnnnnnnnnnnnnnnnnnnnnnnnnnnnnnnnnnnnnnnnnnnnnnnnnnnnnnnnnnnnnnnnnnnnnnnnnnnnnnnnnnnnnnnnnnnnnnnnnnnnnnnnnnnnnnnnnnnnnnnnnnnnnnnnnnnnnnnnnnnnnnnnnnnnnnnnnnnnnnnnnnnnnnnnnnnnnnnnnnnnnnnnnnnnnnnnnnnnnnnnnnnnnnnnnnnnnnnnnnnnnnnnnnnnnnnnnnnnnnnnnnnnnnnnnnnnnnnnnnnnnnnnnnnnnnnnnnnnnnnnnnnnnnnnnnnnnnnnnnnnnnnnnnnnnnnnnnnnnnnnnnnnnnnnnnnnnnnnnnnnnnnnnnnnnnnnnnnnnnnnnnnnnnnnnnnnnnnnnnnnnnnnnnnnnnnnnnnnnnnnnnnnnnnnnnnnnnnnnnnnnnnnnnnnnnnnnnnnnnnnnnnnnnnnnnnnnnnnnnnnnnnnnnnnnnnnnnnnnnnnnnnnnnnnnnnnnnnnnnnnnnnnnnnnnnnnnnnnnnnnnnnnnnnnnnnnnnnnnnnnnnnnnnnnnnnnnnnnnnnnnnnnnnnnnnnnnnnnnnnnnnnnnnnnnnnnnnnnnnnnnnnnnnnnnnnnnnnnnnnnnnnnnnnnnnnnnnnnnnnnnnnnnnnnnnnnnnnnnnnnnnnnnnnnnnnnnnnnnnnnnnnnnnnnnnnnnnnnnnnnnnnnnnnnnnnnnnnnnnnnnnnnnnnnnnnnnnnnnnnnnnnnnnnnnnnnnnnnnnnnnnnnnnnnnnnnnnnnnnnnnnnnnnnnnnnnnnnnnnnnnnnnnnnnnnnnnnnnnnnnnnnnnnnnnnnnnnnnnnnnnnnnnnnnnnnnnnnnnnnnnnnnnnnnnnnnnnnnnnnnnnnnnnnnnnnnnnnnnnnnnnnnnnnnnnnnnnnnnnnnnnnnnnnnnnnnnnnnnnnnnnnnnnnnnnnnnnnnnnnnnnnnnnnnnnnnnnnnnnnnnnnnnnnnnnnnnnnnnnnnnnnnnnnnnnnnnnnnnnnnnnnnnnnnnnnnnnnnnnnnnnnnnnnnnnnnnnnnnnnnnnnnnnnnnnnnnnnnnnnnnnnnnnnnnnnnnnnnnnnnnnnnnnnnnnnnnnnnnnnnnnnnnnnnnnnnnnnnnnnnnnnnnnnnnnnnnnnnnnnnnnnnnnnnnnnnnnnnnnnnnnnnnnnnnnnnnnnnnnnnnnnnnnnnnnnnnnnnnnnnnnnnnnnnnnnnnnnnnnnnnnnnnnnnnnnnnnnnnnnnnnnnnnnnnnnnnnnnnnnnnnnnnnnnnnnnnnnnnnnnnnnnnnnnnnnnnnnnnnnnnnnnnnnnnnnnnnnnnnnnnnnnnnnnnnnnnnnnnnnnnnnnnnnnnnnnnnnnnnnnnnnnnnnnnnnnnnnnnnnnnnnnnnnnnnnnnnnnnnnnnnnnnnnnnnnnnnnnnnnnnnnnnnnnnnnnnnnnnnnnnnnnnnnnnnnnnnnnnnnnnnnnnnnnnnnnnnnnnnnnnnnnnnnnnnnnnnnnnnnnnnnnnnnnnnnnnnnnnnnnnnnnnnnnnnnnnnnnnnnnnnnnnnnnnnnnnnnnnnnnnnnnnnnnnnnnnnnnnnnnnnnnnnnnnnnnnnnnnnnnnnnnnnnnnnnnnnnnnnnnnnnnnnnnnnnnnnnnnnnnnnnnnnnnnnnnnnnnnnnnnnnnnnnnnnnnnnnnnnnnnnnnnnnnnnnnnnnnnnnnnnnnnnnnnnnnnnnnnnnnnnnnnnnnnnnnnnnnnnnnnnnnnnnnnnnnnnnnnnnnnnnnnnnnnnnnnnnnnnnnnnnnnnnnnnnnnnnnnnnnnnnnnnnnnnnnnnnnnnnnnnnnnnnnnnnnnnnnnnnnnnnnnnnnnnnnnnnnnnnnnnnnnnnnnnnnnnnnnnnnnnnnnnnnnnnnnnnnnnnnnnnnnnnnnnnnnnnnnnnnnnnnnnnnnnnnnnnnnnnnnnnnnnnnnnnnnnnnnnnnnnnnnnnnnnnnnnnnnnnnnnnnnnnnnnnnnnnnnnnnnnnnnnnnnnnnnnnnnnnnnnnnnnnnnnnnnnnnnnnnnnnnnnnnnnnnnnnnnnnnnnnnnnnnnnnnnnnnnnnnnnnnnnnnnnnnnnnnnnnnnnnnnnnnnnnnnnnnnnnnnnnnnnnnnnnnnnnnnnnnnnnnnnnnnnnnnnnnnnnnnnnnnnnnnnnnnnnnnnnnnnnnnnnnnnnnnnnnnnnnnnnnnnnnnnnnnnnnnnnnnnnnnnnnnnnnnnnnnnnnnnnnnnnnnnnnnnnnnnnnnnnnnnnnnnnnnnnnnnnnnnnnnnnnnnnnnnnnnnnnnnnnnnnnnnnnnnnnnnnnnnnnnnnnnnnnnnnnnnnnnnnnnnnnnnnnnnnnnnnnnnnnnnnnnnnnnnnnnnnnnnnnnnnnnnnnnnnnnnnnnnnnnnnnnnnnnnnnnnnnnnnnnnnnnnnnnnnnnnnnnnnnnnnnnnnnnnnnnnnnnnnnnnnnnnnnnnnnnnnnnnnnnnnnnnnnnnnnnnnnnnnnnnnnnnnnnnnnnnnnnnnnnnnnnnnnnnnnnnnnnnnnnnnnnnnnnnnnnnnnnnnnnnnnnnnnnnnnnnnnnnnnnnnnnnnnnnnnnnnnnnnnnnnnnnnnnnnnnnnnnnnnnnnnnnnnnnnnnnnnnnnnnnnnnnnnnnnnnnnnnnnnnnnnnnnnnnnnnnnntcaagcaggcaagccgcacagcggcggctcgcaaatatgcgccgtccaggcgaattcccccggccacaccacccgaggacaagtgcagtagatttccttttagtccgacagactcctagaagccacccgtgaatccctctccttcatcgcctcactgcgtcccaatcacagcattgatcccgacctgattctgaaaaataaacacggcaagttacaccacaagttcgacacctcgctgaccaacgtaatgaacagttacacactactcaccgcgccgacggtgacctggtatgcagaaggcaatgccgagctcatttcatgcctgctatcgcccgtgcaatttattggcaagcggcgtgcctctggtttttggttgcgtctcgcattggcaagttgaagccgatgaactggatggtatcgaaggaatgttcggtgaagcgctgcgtccggtgccgattgacttgttcgagggcgacacttcccacccgattgttgatgccgcctggcagcctgcctactggaatcccaatcatcggacggcctgctatgcgccagtttaaggacgtgcaatgctgagttttttcaatgaaaattttggccgtcatctgctgttgcgcaccgatatcagcttgaaattgagcagcggccgcaacgcagcatcagcaccggagacattatcggtttcgagttgcgcgcctgtgtcagcaaaaaactcaaaggccgtcacatctactttcgcacctcggattggcaacgtcggcatagctggatggaacgaaagagggaggcgcatggatttacgcttatcaccgtacattgcagcgcctcgatgcaaaccgtgcagactggcgagagacaatttacggttgatcagacggtctacaccggggttctcaaagtaacggacactgaacgttttaacgcagccctcgccaatggcatcggcattaagacccgtgctttcggctttggcatgttggttatttaacagaaggaatcagtatgaaatctatcatcattaacgccacacttaccaccatcggctccttgtctatcgccttgtctatcgccttgccggtctctgaaggtcagcagggcaacaattcccatcgtcacgcgcggcattgatgtagcgggcaacaagcaacaaaccggctacctgccagccagcacgctacgcggatttttacgcgcgccatcgtggtcgaacaaatgacgcaagccgcccccgcagggcatcactacaccctgcaaaaagcctacgccgacttgattggacaggatgccacctccgaatccagtgacgatattgatctgctcaagttgcgtcaaacccgtgaggacaacgcagtactcgatttatttggctcaggtctaggcattaaatcgcgcctgctggtgtcgcatttcttaccgacacataacgtattaccggaagtcttcaccggcgtgcgcaaggatttggacgataccgacggcgtgctggagctgatttctgaagcggatcgcgcgcgttatccggggcgttccgacgcgaacagcaaacgcgcggccgctgtaacggtggtaaaaggactggaggcaaagttgcgcaaagccaaaaaggccggtgagtcactggtcgaattggaactcgcgcggcaagcggcacaggatattgtcgaacgctacgaatccgacatgggcgagatgaccaatttttcacgcacgctgaccaactattttgccctcccggcaggcatcaaactcaaaggccgattagtgattgagaaagcgcgtgagcgtgatctggccatgatcgaactcgcgctgaatagactttcacagcgtccgattcttggcgcgcaaagcgcgcgcggctgcggggaaattgccggcgtattggatgtattagtggatggcctgcttgccaaaaaaatcaccatctgcgcatggcaagcagcgattattagcaatttttctgctgtcgaatcttgaaaataggtttaataatcaatgcataacaacagattggatcaagccaccccttgtttgggtgcttactataaataaaaatctggcattgtttcacgtgaaacaatcggtttggtcgtttacgaaaaagggaagttgaatgttccgttctgccgagcaaggtaattttgccgctatcgtcgcccggcacatcgcctcggctgacgcaccgttattgctggaaggcggcacggggatcggtaaaactcgtgcctatctttccgcgctgattcaatccggtttgcgcgtcactatcgtgctgcctacccatcagttgattgaccagatgttggcctcaaacgacttggcggcgacgcgaagcgcggccagtattgccgcctttcgtccagcgcgactatttgaaaattggtcggactatgaagctaataagcgcgccgcaatggccgcaaccgtgatgttttgcacagcggccagcgtcatcattgatcagcgtctgggcggcgaatataacggcgcaacaaaccgcgactatttgttgtttgatgaagccgatcaactaccggacatggccgcattgcaaagcgacttcaccattacacaggcggaactgacagcgttgggcataacactcagctgcgtgactgaagccttgcaagccattttggtcaaagcgccaaacgtggttgagccggaaaccagagccgccgcacgcatcattctcgatgccatcgagcaaccagcgtggtatcagtccgctggtgtaagcgatgaaggcgacattatgctgacgcacagcttgcccggtcgtttactgaaataaatcagcaattcagcccatttcgcctttgtctctgccacgctaaccgtcgccagacagctcaaggattttcaaaattcgatgggcattgcgacggtaagtaacttgtcgggcgtgatagaaccggagcgtcacggtacgcttgatttccactttatgccggtggtggttgataccgaggaatggcgcagtgccgtcatccgaatggcgaacgaagcgcctaaaccggtgctgatcgcgaccacatcacaccgtttttccagcctgctcggcgaacaattatcaggtgcaacggtaaggtcggacagcgaatccaccgctcacgccgccgtgcgcgtttcagccaatgggttttttattgcagccggtgcctgggcagggctggatacgccgttgcgctggcgttcgatcatcgtgccgcgcgtgccatacggacaaccagtggtgatagacggcgaaaccaccacccgttatttcgatgcgcacaacacggcgattcgccgtttgcgccaggtgataggccgtggtttacgttcggcggatgcaatctgtagcgtttacatcctcgatggcagggctgaaaaattaacgggctttgtaccggagcgtttttccgccgcatgggcatcacgcaaaacgtatttggagggggcgaggcaagcgctgattttgagcaggaacgaacgctatcccgccgtccgtcgtgccgcactcaattactatggtcgaaaatgtatggcgtgtagctttgtgccgcgcgtggatgcacaactggacgtgcatcatctcgacccgattgccgaaggtgttcgctgcatcaggattgaggatgtggtcgttttgtgtgcaaactgtcaccgtctggttcacgctacccatccccctttagcactcaccgatctaattgcgctactcaacgcaacaatatgattatccttaacgtaaaactcgcgcagcgacgaactgtacccctcgccctctgggagaggggggacgggggtgagggaacgggcatggcgggttttatcatcaggggtggttacttttccatgcccgttagatttttttcaattaaattcccgttagctaacggttttccctagcagcctgtcggacatgatgttaaatcatccgactttcctggcaagccggaagaatttgttcccgatttcataaaaataaccttcaggttgtcataaaaatccatttttggcgttgaagagc

SEQ ID NO: 281 - DNA, 11141 bp, Artificial Sequence
  Synthetic Oligonucleotide
  misc_feature (1)..(7095): n is a, c, g, or t
nnnnnnnnnnnnnnnnnnnnnnnnnnnnnnnnnnnnnnnnnnnnnnnnnnnnnnnnnnnnnnnnnnnnnnnnnnnnnnnnnnnnnnnnnnnnnnnnnnnnnnnnnnnnnnnnnnnnnnnnnnnnnnnnnnnnnnnnnnnnnnnnnnnnnnnnnnnnnnnnnnnnnnnnnnnnnnnnnnnnnnnnnnnnnnnnnnnnnnnnnnnnnnnnnnnnnnnnnnnnnnnnnnnnnnnnnnnnnnnnnnnnnnnnnnnnnnnnnnnnnnnnnnnnnnnnnnnnnnnnnnnnnnnnnnnnnnnnnnnnnnnnnnnnnnnnnnnnnnnnnnnnnnnnnnnnnnnnnnnnnnnnnnnnnnnnnnnnnnnnnnnnnnnnnnnnnnnnnnnnnnnnnnnnnnnnnnnnnnnnnnnnnnnnnnnnnnnnnnnnnnnnnnnnnnnnnnnnnnnnnnnnnnnnnnnnnnnnnnnnnnnnnnnnnnnnnnnnnnnnnnnnnnnnnnnnnnnnnnnnnnnnnnnnnnnnnnnnnnnnnnnnnnnnnnnnnnnnnnnnnnnnnnnnnnnnnnnnnnnnnnnnnnnnnnnnnnnnnnnnnnnnnnnnnnnnnnnnnnnnnnnnnnnnnnnnnnnnnnnnnnnnnnnnnnnnnnnnnnnnnnnnnnnnnnnnnnnnnnnnnnnnnnnnnnnnnnnnnnnnnnnnnnnnnnnnnnnnnnnnnnnnnnnnnnnnnnnnnnnnnnnnnnnnnnnnnnnnnnnnnnnnnnnnnnnnnnnnnnnnnnnnnnnnnnnnnnnnnnnnnnnnnnnnnnnnnnnnnnnnnnnnnnnnnnnnnnnnnnnnnnnnnnnnnnnnnnnnnnnnnnnnnnnnnnnnnnnnnnnnnnnnnnnnnnnnnnnnnnnnnnnnnnnnnnnnnnnnnnnnnnnnnnnnnnnnnnnnnnnnnnnnnnnnnnnnnnnnnnnnnnnnnnnnnnnnnnnnnnnnnnnnnnnnnnnnnnnnnnnnnnnnnnnnnnnnnnnnnnnnnnnnnnnnnnnnnnnnnnnnnnnnnnnnnnnnnnnnnnnnnnnnnnnnnnnnnnnnnnnnnnnnnnnnnnnnnnnnnnnnnnnnnnnnnnnnnnnnnnnnnnnnnnnnnnnnnnnnnnnnnnnnnnnnnnnnnnnnnnnnnnnnnnnnnnnnnnnnnnnnnnnnnnnnnnnnnnnnnnnnnnnnnnnnnnnnnnnnnnnnnnnnnnnnnnnnnnnnnnnnnnnnnnnnnnnnnnnnnnnnnnnnnnnnnnnnnnnnnnnnnnnnnnnnnnnnnnnnnnnnnnnnnnnnnnnnnnnnnnnnnnnnnnnnnnnnnnnnnnnnnnnnnnnnnnnnnnnnnnnnnnnnnnnnnnnnnnnnnnnnnnnnnnnnnnnnnnnnnnnnnnnnnnnnnnnnnnnnnnnnnnnnnnnnnnnnnnnnnnnnnnnnnnnnnnnnnnnnnnnnnnnnnnnnnnnnnnnnnnnnnnnnnnnnnnnnnnnnnnnnnnnnnnnnnnnnnnnnnnnnnnnnnnnnnnnnnnnnnnnnnnnnnnnnnnnnnnnnnnnnnnnnnnnnnnnnnnnnnnnnnnnnnnnnnnnnnnnnnnnnnnnnnnnnnnnnnnnnnnnnnnnnnnnnnnnnnnnnnnnnnnnnnnnnnnnnnnnnnnnnnnnnnnnnnnnnnnnnnnnnnnnnnnnnnnnnnnnnnnnnnnnnnnnnnnnnnnnnnnnnnnnnnnnnnnnnnnnnnnnnnnnnnnnnnnnnnnnnnnnnnnnnnnnnnnnnnnnnnnnnnnnnnnnnnnnnnnnnnnnnnnnnnnnnnnnnnnnnnnnnnnnnnnnnnnnnnnnnnnnnnnnnnnnnnnnnnnnnnnnnnnnnnnnnnnnnnnnnnnnnnnnnnnnnnnnnnnnnnnnnnnnnnnnnnnnnnnnnnnnnnnnnnnnnnnnnnnnnnnnnnnnnnnnnnnnnnnnnnnnnnnnnnnnnnnnnnnnnnnnnnnnnnnnnnnnnnnnnnnnnnnnnnnnnnnnnnnnnnnnnnnnnnnnnnnnnnnnnnnnnnnnnnnnnnnnnnnnnnnnnnnnnnnnnnnnnnnnnnnnnnnnnnnnnnnnnnnnnnnnnnnnnnnnnnnnnnnnnnnnnnnnnnnnnnnnnnnnnnnnnnnnnnnnnnnnnnnnnnnnnnnnnnnnnnnnnnnnnnnnnnnnnnnnnnnnnnnnnnnnnnnnnnnnnnnnnnnnnnnnnnnnnnnnnnnnnnnnnnnnnnnnnnnnnnnnnnnnnnnnnnnnnnnnnnnnnnnnnnnnnnnnnnnnnnnnnnnnnnnnnnnnnnnnnnnnnnnnnnnnnnnnnnnnnnnnnnnnnnnnnnnnnnnnnnnnnnnnnnnnnnnnnnnnnnnnnnnnnnnnnnnnnnnnnnnnnnnnnnnnnnnnnnnnnnnnnnnnnnnnnnnnnnnnnnnnnnnnnnnnnnnnnnnnnnnnnnnnnnnnnnnnnnnnnnnnnnnnnnnnnnnnnnnnnnnnnnnnnnnnnnnnnnnnnnnnnnnnnnnnnnnnnnnnnnnnnnnnnnnnnnnnnnnnnnnnnnnnnnnnnnnnnnnnnnnnnnnnnnnnnnnnnnnnnnnnnnnnnnnnnnnnnnnnnnnnnnnnnnnnnnnnnnnnnnnnnnnnnnnnnnnnnnnnnnnnnnnnnnnnnnnnnnnnnnnnnnnnnnnnnnnnnnnnnnnnnnnnnnnnnnnnnnnnnnnnnnnnnnnnnnnnnnnnnnnnnnnnnnnnnnnnnnnnnnnnnnnnnnnnnnnnnnnnnnnnnnnnnnnnnnnnnnnnnnnnnnnnnnnnnnnnnnnnnnnnnnnnnnnnnnnnnnnnnnnnnnnnnnnnnnnnnnnnnnnnnnnnnnnnnnnnnnnnnnnnnnnnnnnnnnnnnnnnnnnnnnnnnnnnnnnnnnnnnnnnnnnnnnnnnnnnnnnnnnnnnnnnnnnnnnnnnnnnnnnnnnnnnnnnnnnnnnnnnnnnnnnnnnnnnnnnnnnnnnnnnnnnnnnnnnnnnnnnnnnnnnnnnnnnnnnnnnnnnnnnnnnnnnnnnnnnnnnnnnnnnnnnnnnnnnnnnnnnnnnnnnnnnnnnnnnnnnnnnnnnnnnnnnnnnnnnnnnnnnnnnnnnnnnnnnnnnnnnnnnnnnnnnnnnnnnnnnnnnnnnnnnnnnnnnnnnnnnnnnnnnnnnnnnnnnnnnnnnnnnnnnnnnnnnnnnnnnnnnnnnnnnnnnnnnnnnnnnnnnnnnnnnnnnnnnnnnnnnnnnnnnnnnnnnnnnnnnnnnnnnnnnnnnnnnnnnnnnnnnnnnnnnnnnnnnnnnnnnnnnnnnnnnnnnnnnnnnnnnnnnnnnnnnnnnnnnnnnnnnnnnnnnnnnnnnnnnnnnnnnnnnnnnnnnnnnnnnnnnnnnnnnnnnnnnnnnnnnnnnnnnnnnnnnnnnnnnnnnnnnnnnnnnnnnnnnnnnnnnnnnnnnnnnnnnnnnnnnnnnnnnnnnnnnnnnnnnnnnnnnnnnnnnnnnnnnnnnnnnnnnnnnnnnnnnnnnnnnnnnnnnnnnnnnnnnnnnnnnnnnnnnnnnnnnnnnnnnnnnnnnnnnnnnnnnnnnnnnnnnnnnnnnnnnnnnnnnnnnnnnnnnnnnnnnnnnnnnnnnnnnnnnnnnnnnnnnnnnnnnnnnnnnnnnnnnnnnnnnnnnnnnnnnnnnnnnnnnnnnnnnnnnnnnnnnnnnnnnnnnnnnnnnnnnnnnnnnnnnnnnnnnnnnnnnnnnnnnnnnnnnnnnnnnnnnnnnnnnnnnnnnnnnnnnnnnnnnnnnnnnnnnnnnnnnnnnnnnnnnnnnnnnnnnnnnnnnnnnnnnnnnnnnnnnnnnnnnnnnnnnnnnnnnnnnnnnnnnnnnnnnnnnnnnnnnnnnnnnnnnnnnnnnnnnnnnnnnnnnnnnnnnnnnnnnnnnnnnnnnnnnnnnnnnnnnnnnnnnnnnnnnnnnnnnnnnnnnnnnnnnnnnnnnnnnnnnnnnnnnnnnnnnnnnnnnnnnnnnnnnnnnnnnnnnnnnnnnnnnnnnnnnnnnnnnnnnnnnnnnnnnnnnnnnnnnnnnnnnnnnnnnnnnnnnnnnnnnnnnnnnnnnnnnnnnnnnnnnnnnnnnnnnnnnnnnnnnnnnnnnnnnnnnnnnnnnnnnnnnnnnnnnnnnnnnnnnnnnnnnnnnnnnnnnnnnnnnnnnnnnnnnnnnnnnnnnnnnnnnnnnnnnnnnnnnnnnnnnnnnnnnnnnnnnnnnnnnnnnnnnnnnnnnnnnnnnnnnnnnnnnnnnnnnnnnnnnnnnnnnnnnnnnnnnnnnnnnnnnnnnnnnnnnnnnnnnnnnnnnnnnnnnnnnnnnnnnnnnnnnnnnnnnnnnnnnnnnnnnnnnnnnnnnnnnnnnnnnnnnnnnnnnnnnnnnnnnnnnnnnnnnnnnnnnnnnnnnnnnnnnnnnnnnnnnnnnnnnnnnnnnnnnnnnnnnnnnnnnnnnnnnnnnnnnnnnnnnnnnnnnnnnnnnnnnnnnnnnnnnnnnnnnnnnnnnnnnnnnnnnnnnnnnnnnnnnnnnnnnnnnnnnnnnnnnnnnnnnnnnnnnnnnnnnnnnnnnnnnnnnnnnnnnnnnnnnnnnnnnnnnnnnnnnnnnnnnnnnnnnnnnnnnnnnnnnnnnnnnnnnnnnnnnnnnnnnnnnnnnnnnnnnnnnnnnnnnnnnnnnnnnnnnnnnnnnnnnnnnnnnnnnnnnnnnnnnnnnnnnnnnnnnnnnnnnnnnnnnnnnnnnnnnnnnnnnnnnnnnnnnnnnnnnnnnnnnnnnnnnnnnnnnnnnnnnnnnnnnnnnnnnnnnnnnnnnnnnnnnnnnnnnnnnnnnnnnnnnnnnnnnnnnnnnnnnnnnnnnnnnnnnnnnnnnnnnnnnnnnnnnnnnnnnnnnnnnnnnnnnnnnnnnnnnnnnnnnnnnnnnnnnnnnnnnnnnnnnnnnnnnnnnnnnnnnnnnnnnnnnnnnnnnnnnnnnnnnnnnnnnnnnnnnnnnnnnnnnnnnnnnnnnnnnnnnnnnnnnnnnnnnnnnnnnnnnnnnnnnnnnnnnnnnnnnnnnnnnnnnnnnnnnnnnnnnnnnnnnnnnnnnnnnnnnnnnnnnnnnnnnnnnnnnnnnnnnnnnnnnnnnnnnnnnnnnnnnnnnnnnnnnnnnnnnnnnnnnnnnnnnnnnnnnnnnnnnnnnnnnnnnnnnnnnnnnnnnnnnnnnnnnnnnnnnnnnnnnnnnnnnnnnnnnnnnnnnnnnnnnnnnnnnnnnnnnnnnnnnnnnnnnnnnnnnnnnnnnnnnnnnnnnnnnnnnnnnnnnnnnnnnnnnnnnnnnnnnnnnnnnnnnnnnnnnnnnnnnnnnnnnnnnnnnnnnnnnnnnnnnnnnnnnnnnnnnnnnnnnnnnnnnnnnnnnnnnnnnnnnnnnnnnnnnnnnnnnnnnnnnnnnnnnnnnnnnnnnnnnnnnnnnnnnnnnnnnnnnnnnnnnnnnnnnnnnnnnnnnnnnnnnnnnnnnnnnnnnnnnnnnnnnnnnnnnnnnnnnnnnnnnnnnnnnnnnnnnnnnnnnnnnnnnnnnnnnnnnnnnnnnnnnnnnnnnnnnnnnnnnnnnnnnnnnnnnnnnnnnnnnnnnnnnnnnnnnnnnnnnnnnnnnnnnnnnnnnnnnnnnnnnnnnnnnnnnnnnnnnnnnnnnnnnnnnnnnnnnnnnnnnnnnnnnnnnnnnnnnnnnnnnnnnnnnnnnnnnnnnnnnnnnnnnnnnnnnnnnnnnnnnnnnnnnnnnnnnnnnnnnnnnnnnnnnnnnnnnnnnnnnnnnnnnnnnnnnnnnnnnnnnnnnnnnnnnnnnnnnnnnnnnnnnnnnnnnnnnnnnnnnnnnnnnnnnnnnnnnnnnnnnnnnnnnnnnnnnnnnnnnnnnnnnnnnnnnnnnnnnnnnnnnnnnnnnnnnnnnnnnnnnnnnnnnnnnnnnnnnnnnnnnnnnnnnnnnnnnnnnnnnnnnnnnnnnnnnnnnnnnnnnnnnnnnnnnnnnnnnnnnnnnnnnnnnnnnnnnnnnnnnnnnnnnnnnnnnnnnnnnnnnnnnnnnnnnnnnnnnnnnnnnnnnnnnnnnnnnnnnnnnnnnnnnnnnnnnnnnnnnnnnnnnnnnnnnnnnnnnnnnnnnnnnnnnnnnnnnnnnnnnnnnnnnnnnnnnnnnnnnnnnnnnnnnnnnnnnnnnnnnnnnnnnnnnnnnnnnnnnnnnnnnnnnnnnnnnnnnnnnnnnnnnnnnnnnnnnnnnnnnnnnnnnnnnnnnnnnnnnnnnnnnnnnnnnnnnnnnnnnnnnnnnnnnnnnnnnnnnnnnnnnnnnnnnnnnnnnnnnnnnnnnnnnnnnnnnnnnnnnnnnnnnnnnnnnnnnnnnnnnnnnnnnnnnnnnnnnnnnnnnnnnnnnnnnnnnnnnnnnnnnnnnnnnnnnnnnnnnnnnnnnnnnnnnnnnnnnnnnnnnnnnnnnnnnnnnnnnnnnnnnnnnnnnnnnnnnnnnnnnnnnnnnnnnnnnnnnnnnnnnnnnnnnnnnnnnnnnnnnnnnnnnnnnnnnnnnnnnnnnnnnnnnnnnnnnnnnnnnnnnnnnnnnnnnnnnnnnnnnnnnnnnnnnnnnnnnnnnnnnnnnnnnnnnnnnnnnnnnnnnnnnnnnnnnnnnnnnnnnnnnnnnnnnnnnnnnnnnnnnnnnnnnnnnnnnnnnnnnnnnnnnnnnnnnnnnnnnnnnnnnnnnnnnnnnnnnnnnnnnnnnnnnnnnnnnnnnnnnnnnnnnnnnnnnnnnnnnnnnnnnnnnnnnnnnnnnnnnnnnnnnnnnnnnnnnnnnnnnnnnnnnnnnnnnnnnnnnnnnnnnnnnnnnnnnnnnnnnnnnnnnnnnnnnnnnnnnnnnnnnnnnnnnnnnnnnnnnnnnnnnnnnnnnnnnnnnnnnnnnnnnnnnnnnnnnnnnnnnnnnnnnnnnnnnnnnnnnnnnnnnnnnnnnnnnnnnnnnnnnnnnnnnnnnnnnnnnnnnnnnnnnnnnnnnnnnnnnnnnnnnnnnnnnnnnnnnnnnnnnnnnnnnnnnnnnnnnnnnnnnnnnnnnnnnnnnnnnnnnnnnnnnnnnnnnnnnnnnnnnnnnnnnnnnnnnnnnnnnnnnnnnnnnnnnngttctattgaccaagaaagcggtgaagtgggtcaagcaggcaagccgcacagcggcggctcgcaaatatgcgccgtccaggcgaattcccccggccacaccacccgaggacaagtgcagtagatttccttttagtccgacagactcctagaagccacccgtgaatccctctccttcatcgcctcactgcgtcccaatcacagcattgatcccgacctgattctgaaaaataaacacggcaagttacaccacaagttcgacacctcgctgaccaacgtaatgaacagttacacactactcaccgcgccgacggtgacctggtatgcagaaggcaatgccgagctcatttcatgcctgctatcgcccgtgcaatttattggcaagcggcgtgcctctggtttttggttgcgtctcgcattggcaagttgaagccgatgaactggatggtatcgaaggaatgttcggtgaagcgctgcgtccggtgccgattgacttgttcgagggcgacacttcccacccgattgttgatgccgcctggcagcctgcctactggaatcccaatcatcggacggcctgctatgcgccagtttaaggacgtgcaatgctgagttttttcaatgaaaattttggccgtcatctgctgttgcgcaccgatatcagcttgaaattgagcagcggccgcaacgcagcatcagcaccggagacattatcggtttcgagttgcgcgcctgtgtcagcaaaaaactcaaaggccgtcacatctactttcgcacctcggattggcaacgtcggcatagctggatggaacgaaagagggaggcgcatggatttacgcttatcaccgtacattgcagcgcctcgatgcaaaccgtgcagactggcgagagacaatttacggttgatcagacggtctacaccggggttctcaaagtaacggacactgaacgttttaacgcagccctcgccaatggcatcggcattaagacccgtgctttcggctttggcatgttggttatttaacagaaggaatcagtatgaaatctatcatcattaacgccacacttaccaccatcggctccttgtctatcgccttgtctatcgccttgccggtctctgaaggtcagcagggcaacaattcccatcgtcacgcgcggcattgatgtagcgggcaacaagcaacaaaccggctacctgccagccagcacgctacgcggatttttacgcgcgccatcgtggtcgaacaaatgacgcaagccgcccccgcagggcatcactacaccctgcaaaaagcctacgccgacttgattggacaggatgccacctccgaatccagtgacgatattgatctgctcaagttgcgtcaaacccgtgaggacaacgcagtactcgatttatttggctcaggtctaggcattaaatcgcgcctgctggtgtcgcatttcttaccgacacataacgtattaccggaagtcttcaccggcgtgcgcaaggatttggacgataccgacggcgtgctggagctgatttctgaagcggatcgcgcgcgttatccggggcgttccgacgcgaacagcaaacgcgcggccgctgtaacggtggtaaaaggactggaggcaaagttgcgcaaagccaaaaaggccggtgagtcactggtcgaattggaactcgcgcggcaagcggcacaggatattgtcgaacgctacgaatccgacatgggcgagatgaccaatttttcacgcacgctgaccaactattttgccctcccggcaggcatcaaactcaaaggccgattagtgattgagaaagcgcgtgagcgtgatctggccatgatcgaactcgcgctgaatagactttcacagcgtccgattcttggcgcgcaaagcgcgcgcggctgcggggaaattgccggcgtattggatgtattagtggatggcctgcttgccaaaaaaatcaccatctgcgcatggcaagcagcgattattagcaatttttctgctgtcgaatcttgaaaataggtttaataatcaatgcataacaacagattggatcaagccaccccttgtttgggtgcttactataaataaaaatctggcattgtttcacgtgaaacaatcggtttggtcgtttacgaaaaagggaagttgaatgttccgttctgccgagcaaggtaattttgccgctatcgtcgcccggcacatcgcctcggctgacgcaccgttattgctggaaggcggcacggggatcggtaaaactcgtgcctatctttccgcgctgattcaatccggtttgcgcgtcactatcgtgctgcctacccatcagttgattgaccagatgttggcctcaaacgacttggcggcgacgcgaagcgcggccagtattgccgcctttcgtccagcgcgactatttgaaaattggtcggactatgaagctaataagcgcgccgcaatggccgcaaccgtgatgttttgcacagcggccagcgtcatcattgatcagcgtctgggcggcgaatataacggcgcaacaaaccgcgactatttgttgtttgatgaagccgatcaactaccggacatggccgcattgcaaagcgacttcaccattacacaggcggaactgacagcgttgggcataacactcagctgcgtgactgaagccttgcaagccattttggtcaaagcgccaaacgtggttgagccggaaaccagagccgccgcacgcatcattctcgatgccatcgagcaaccagcgtggtatcagtccgctggtgtaagcgatgaaggcgacattatgctgacgcacagcttgcccggtcgtttactgaaataaatcagcaattcagcccatttcgcctttgtctctgccacgctaaccgtcgccagacagctcaaggattttcaaaattcgatgggcattgcgacggtaagtaacttgtcgggcgtgatagaaccggagcgtcacggtacgcttgatttccactttatgccggtggtggttgataccgaggaatggcgcagtgccgtcatccgaatggcgaacgaagcgcctaaaccggtgctgatcgcgaccacatcacaccgtttttccagcctgctcggcgaacaattatcaggtgcaacggtaaggtcggacagcgaatccaccgctcacgccgccgtgcgcgtttcagccaatgggttttttattgcagccggtgcctgggcagggctggatacgccgttgcgctggcgttcgatcatcgtgccgcgcgtgccatacggacaaccagtggtgatagacggcgaaaccaccacccgttatttcgatgcgcacaacacggcgattcgccgtttgcgccaggtgataggccgtggtttacgttcggcggatgcaatctgtagcgtttacatcctcgatggcagggctgaaaaattaacgggctttgtaccggagcgtttttccgccgcatgggcatcacgcaaaacgtatttggagggggcgaggcaagcgctgattttgagcaggaacgaacgctatcccgccgtccgtcgtgccgcactcaattactatggtcgaaaatgtatggcgtgtagctttgtgccgcgcgtggatgcacaactggacgtgcatcatctcgacccgattgccgaaggtgttcgctgcatcaggattgaggatgtggtcgttttgtgtgcaaactgtcaccgtctggttcacgctacccatccccctttagcactcaccgatctaattgcgctactcaacgcaacaatatgattatccttaacgtaaaactcgcgcagcgacgaactgtacccctcgccctctgggagaggggggacgggggtgagggaacgggcatggcgggttttatcatcaggggtggttacttttccatgcccgttagatttttttcaattaaattcccgttagctaacggttttccctagcagcctgtcggacatgatgttaaatcatccgactttcctggcaagccggaagaatttgttcccgatttcataaaaataaccttcaggttgtcataaaaatccatttttggcgttgaagagc

SEQ ID NO: 282 - DNA, 11138 bp, Artificial Sequence
  Synthetic Oligonucleotide
  misc_feature (1)..(7104): n is a, c, g, or t
nnnnnnnnnnnnnnnnnnnnnnnnnnnnnnnnnnnnnnnnnnnnnnnnnnnnnnnnnnnnnnnnnnnnnnnnnnnnnnnnnnnnnnnnnnnnnnnnnnnnnnnnnnnnnnnnnnnnnnnnnnnnnnnnnnnnnnnnnnnnnnnnnnnnnnnnnnnnnnnnnnnnnnnnnnnnnnnnnnnnnnnnnnnnnnnnnnnnnnnnnnnnnnnnnnnnnnnnnnnnnnnnnnnnnnnnnnnnnnnnnnnnnnnnnnnnnnnnnnnnnnnnnnnnnnnnnnnnnnnnnnnnnnnnnnnnnnnnnnnnnnnnnnnnnnnnnnnnnnnnnnnnnnnnnnnnnnnnnnnnnnnnnnnnnnnnnnnnnnnnnnnnnnnnnnnnnnnnnnnnnnnnnnnnnnnnnnnnnnnnnnnnnnnnnnnnnnnnnnnnnnnnnnnnnnnnnnnnnnnnnnnnnnnnnnnnnnnnnnnnnnnnnnnnnnnnnnnnnnnnnnnnnnnnnnnnnnnnnnnnnnnnnnnnnnnnnnnnnnnnnnnnnnnnnnnnnnnnnnnnnnnnnnnnnnnnnnnnnnnnnnnnnnnnnnnnnnnnnnnnnnnnnnnnnnnnnnnnnnnnnnnnnnnnnnnnnnnnnnnnnnnnnnnnnnnnnnnnnnnnnnnnnnnnnnnnnnnnnnnnnnnnnnnnnnnnnnnnnnnnnnnnnnnnnnnnnnnnnnnnnnnnnnnnnnnnnnnnnnnnnnnnnnnnnnnnnnnnnnnnnnnnnnnnnnnnnnnnnnnnnnnnnnnnnnnnnnnnnnnnnnnnnnnnnnnnnnnnnnnnnnnnnnnnnnnnnnnnnnnnnnnnnnnnnnnnnnnnnnnnnnnnnnnnnnnnnnnnnnnnnnnnnnnnnnnnnnnnnnnnnnnnnnnnnnnnnnnnnnnnnnnnnnnnnnnnnnnnnnnnnnnnnnnnnnnnnnnnnnnnnnnnnnnnnnnnnnnnnnnnnnnnnnnnnnnnnnnnnnnnnnnnnnnnnnnnnnnnnnnnnnnnnnnnnnnnnnnnnnnnnnnnnnnnnnnnnnnnnnnnnnnnnnnnnnnnnnnnnnnnnnnnnnnnnnnnnnnnnnnnnnnnnnnnnnnnnnnnnnnnnnnnnnnnnnnnnnnnnnnnnnnnnnnnnnnnnnnnnnnnnnnnnnnnnnnnnnnnnnnnnnnnnnnnnnnnnnnnnnnnnnnnnnnnnnnnnnnnnnnnnnnnnnnnnnnnnnnnnnnnnnnnnnnnnnnnnnnnnnnnnnnnnnnnnnnnnnnnnnnnnnnnnnnnnnnnnnnnnnnnnnnnnnnnnnnnnnnnnnnnnnnnnnnnnnnnnnnnnnnnnnnnnnnnnnnnnnnnnnnnnnnnnnnnnnnnnnnnnnnnnnnnnnnnnnnnnnnnnnnnnnnnnnnnnnnnnnnnnnnnnnnnnnnnnnnnnnnnnnnnnnnnnnnnnnnnnnnnnnnnnnnnnnnnnnnnnnnnnnnnnnnnnnnnnnnnnnnnnnnnnnnnnnnnnnnnnnnnnnnnnnnnnnnnnnnnnnnnnnnnnnnnnnnnnnnnnnnnnnnnnnnnnnnnnnnnnnnnnnnnnnnnnnnnnnnnnnnnnnnnnnnnnnnnnnnnnnnnnnnnnnnnnnnnnnnnnnnnnnnnnnnnnnnnnnnnnnnnnnnnnnnnnnnnnnnnnnnnnnnnnnnnnnnnnnnnnnnnnnnnnnnnnnnnnnnnnnnnnnnnnnnnnnnnnnnnnnnnnnnnnnnnnnnnnnnnnnnnnnnnnnnnnnnnnnnnnnnnnnnnnnnnnnnnnnnnnnnnnnnnnnnnnnnnnnnnnnnnnnnnnnnnnnnnnnnnnnnnnnnnnnnnnnnnnnnnnnnnnnnnnnnnnnnnnnnnnnnnnnnnnnnnnnnnnnnnnnnnnnnnnnnnnnnnnnnnnnnnnnnnnnnnnnnnnnnnnnnnnnnnnnnnnnnnnnnnnnnnnnnnnnnnnnnnnnnnnnnnnnnnnnnnnnnnnnnnnnnnnnnnnnnnnnnnnnnnnnnnnnnnnnnnnnnnnnnnnnnnnnnnnnnnnnnnnnnnnnnnnnnnnnnnnnnnnnnnnnnnnnnnnnnnnnnnnnnnnnnnnnnnnnnnnnnnnnnnnnnnnnnnnnnnnnnnnnnnnnnnnnnnnnnnnnnnnnnnnnnnnnnnnnnnnnnnnnnnnnnnnnnnnnnnnnnnnnnnnnnnnnnnnnnnnnnnnnnnnnnnnnnnnnnnnnnnnnnnnnnnnnnnnnnnnnnnnnnnnnnnnnnnnnnnnnnnnnnnnnnnnnnnnnnnnnnnnnnnnnnnnnnnnnnnnnnnnnnnnnnnnnnnnnnnnnnnnnnnnnnnnnnnnnnnnnnnnnnnnnnnnnnnnnnnnnnnnnnnnnnnnnnnnnnnnnnnnnnnnnnnnnnnnnnnnnnnnnnnnnnnnnnnnnnnnnnnnnnnnnnnnnnnnnnnnnnnnnnnnnnnnnnnnnnnnnnnnnnnnnnnnnnnnnnnnnnnnnnnnnnnnnnnnnnnnnnnnnnnnnnnnnnnnnnnnnnnnnnnnnnnnnnnnnnnnnnnnnnnnnnnnnnnnnnnnnnnnnnnnnnnnnnnnnnnnnnnnnnnnnnnnnnnnnnnnnnnnnnnnnnnnnnnnnnnnnnnnnnnnnnnnnnnnnnnnnnnnnnnnnnnnnnnnnnnnnnnnnnnnnnnnnnnnnnnnnnnnnnnnnnnnnnnnnnnnnnnnnnnnnnnnnnnnnnnnnnnnnnnnnnnnnnnnnnnnnnnnnnnnnnnnnnnnnnnnnnnnnnnnnnnnnnnnnnnnnnnnnnnnnnnnnnnnnnnnnnnnnnnnnnnnnnnnnnnnnnnnnnnnnnnnnnnnnnnnnnnnnnnnnnnnnnnnnnnnnnnnnnnnnnnnnnnnnnnnnnnnnnnnnnnnnnnnnnnnnnnnnnnnnnnnnnnnnnnnnnnnnnnnnnnnnnnnnnnnnnnnnnnnnnnnnnnnnnnnnnnnnnnnnnnnnnnnnnnnnnnnnnnnnnnnnnnnnnnnnnnnnnnnnnnnnnnnnnnnnnnnnnnnnnnnnnnnnnnnnnnnnnnnnnnnnnnnnnnnnnnnnnnnnnnnnnnnnnnnnnnnnnnnnnnnnnnnnnnnnnnnnnnnnnnnnnnnnnnnnnnnnnnnnnnnnnnnnnnnnnnnnnnnnnnnnnnnnnnnnnnnnnnnnnnnnnnnnnnnnnnnnnnnnnnnnnnnnnnnnnnnnnnnnnnnnnnnnnnnnnnnnnnnnnnnnnnnnnnnnnnnnnnnnnnnnnnnnnnnnnnnnnnnnnnnnnnnnnnnnnnnnnnnnnnnnnnnnnnnnnnnnnnnnnnnnnnnnnnnnnnnnnnnnnnnnnnnnnnnnnnnnnnnnnnnnnnnnnnnnnnnnnnnnnnnnnnnnnnnnnnnnnnnnnnnnnnnnnnnnnnnnnnnnnnnnnnnnnnnnnnnnnnnnnnnnnnnnnnnnnnnnnnnnnnnnnnnnnnnnnnnnnnnnnnnnnnnnnnnnnnnnnnnnnnnnnnnnnnnnnnnnnnnnnnnnnnnnnnnnnnnnnnnnnnnnnnnnnnnnnnnnnnnnnnnnnnnnnnnnnnnnnnnnnnnnnnnnnnnnnnnnnnnnnnnnnnnnnnnnnnnnnnnnnnnnnnnnnnnnnnnnnnnnnnnnnnnnnnnnnnnnnnnnnnnnnnnnnnnnnnnnnnnnnnnnnnnnnnnnnnnnnnnnnnnnnnnnnnnnnnnnnnnnnnnnnnnnnnnnnnnnnnnnnnnnnnnnnnnnnnnnnnnnnnnnnnnnnnnnnnnnnnnnnnnnnnnnnnnnnnnnnnnnnnnnnnnnnnnnnnnnnnnnnnnnnnnnnnnnnnnnnnnnnnnnnnnnnnnnnnnnnnnnnnnnnnnnnnnnnnnnnnnnnnnnnnnnnnnnnnnnnnnnnnnnnnnnnnnnnnnnnnnnnnnnnnnnnnnnnnnnnnnnnnnnnnnnnnnnnnnnnnnnnnnnnnnnnnnnnnnnnnnnnnnnnnnnnnnnnnnnnnnnnnnnnnnnnnnnnnnnnnnnnnnnnnnnnnnnnnnnnnnnnnnnnnnnnnnnnnnnnnnnnnnnnnnnnnnnnnnnnnnnnnnnnnnnnnnnnnnnnnnnnnnnnnnnnnnnnnnnnnnnnnnnnnnnnnnnnnnnnnnnnnnnnnnnnnnnnnnnnnnnnnnnnnnnnnnnnnnnnnnnnnnnnnnnnnnnnnnnnnnnnnnnnnnnnnnnnnnnnnnnnnnnnnnnnnnnnnnnnnnnnnnnnnnnnnnnnnnnnnnnnnnnnnnnnnnnnnnnnnnnnnnnnnnnnnnnnnnnnnnnnnnnnnnnnnnnnnnnnnnnnnnnnnnnnnnnnnnnnnnnnnnnnnnnnnnnnnnnnnnnnnnnnnnnnnnnnnnnnnnnnnnnnnnnnnnnnnnnnnnnnnnnnnnnnnnnnnnnnnnnnnnnnnnnnnnnnnnnnnnnnnnnnnnnnnnnnnnnnnnnnnnnnnnnnnnnnnnnnnnnnnnnnnnnnnnnnnnnnnnnnnnnnnnnnnnnnnnnnnnnnnnnnnnnnnnnnnnnnnnnnnnnnnnnnnnnnnnnnnnnnnnnnnnnnnnnnnnnnnnnnnnnnnnnnnnnnnnnnnnnnnnnnnnnnnnnnnnnnnnnnnnnnnnnnnnnnnnnnnnnnnnnnnnnnnnnnnnnnnnnnnnnnnnnnnnnnnnnnnnnnnnnnnnnnnnnnnnnnnnnnnnnnnnnnnnnnnnnnnnnnnnnnnnnnnnnnnnnnnnnnnnnnnnnnnnnnnnnnnnnnnnnnnnnnnnnnnnnnnnnnnnnnnnnnnnnnnnnnnnnnnnnnnnnnnnnnnnnnnnnnnnnnnnnnnnnnnnnnnnnnnnnnnnnnnnnnnnnnnnnnnnnnnnnnnnnnnnnnnnnnnnnnnnnnnnnnnnnnnnnnnnnnnnnnnnnnnnnnnnnnnnnnnnnnnnnnnnnnnnnnnnnnnnnnnnnnnnnnnnnnnnnnnnnnnnnnnnnnnnnnnnnnnnnnnnnnnnnnnnnnnnnnnnnnnnnnnnnnnnnnnnnnnnnnnnnnnnnnnnnnnnnnnnnnnnnnnnnnnnnnnnnnnnnnnnnnnnnnnnnnnnnnnnnnnnnnnnnnnnnnnnnnnnnnnnnnnnnnnnnnnnnnnnnnnnnnnnnnnnnnnnnnnnnnnnnnnnnnnnnnnnnnnnnnnnnnnnnnnnnnnnnnnnnnnnnnnnnnnnnnnnnnnnnnnnnnnnnnnnnnnnnnnnnnnnnnnnnnnnnnnnnnnnnnnnnnnnnnnnnnnnnnnnnnnnnnnnnnnnnnnnnnnnnnnnnnnnnnnnnnnnnnnnnnnnnnnnnnnnnnnnnnnnnnnnnnnnnnnnnnnnnnnnnnnnnnnnnnnnnnnnnnnnnnnnnnnnnnnnnnnnnnnnnnnnnnnnnnnnnnnnnnnnnnnnnnnnnnnnnnnnnnnnnnnnnnnnnnnnnnnnnnnnnnnnnnnnnnnnnnnnnnnnnnnnnnnnnnnnnnnnnnnnnnnnnnnnnnnnnnnnnnnnnnnnnnnnnnnnnnnnnnnnnnnnnnnnnnnnnnnnnnnnnnnnnnnnnnnnnnnnnnnnnnnnnnnnnnnnnnnnnnnnnnnnnnnnnnnnnnnnnnnnnnnnnnnnnnnnnnnnnnnnnnnnnnnnnnnnnnnnnnnnnnnnnnnnnnnnnnnnnnnnnnnnnnnnnnnnnnnnnnnnnnnnnnnnnnnnnnnnnnnnnnnnnnnnnnnnnnnnnnnnnnnnnnnnnnnnnnnnnnnnnnnnnnnnnnnnnnnnnnnnnnnnnnnnnnnnnnnnnnnnnnnnnnnnnnnnnnnnnnnnnnnnnnnnnnnnnnnnnnnnnnnnnnnnnnnnnnnnnnnnnnnnnnnnnnnnnnnnnnnnnnnnnnnnnnnnnnnnnnnnnnnnnnnnnnnnnnnnnnnnnnnnnnnnnnnnnnnnnnnnnnnnnnnnnnnnnnnnnnnnnnnnnnnnnnnnnnnnnnnnnnnnnnnnnnnnnnnnnnnnnnnnnnnnnnnnnnnnnnnnnnnnnnnnnnnnnnnnnnnnnnnnnnnnnnnnnnnnnnnnnnnnnnnnnnnnnnnnnnnnnnnnnnnnnnnnnnnnnnnnnnnnnnnnnnnnnnnnnnnnnnnnnnnnnnnnnnnnnnnnnnnnnnnnnnnnnnnnnnnnnnnnnnnnnnnnnnnnnnnnnnnnnnnnnnnnnnnnnnnnnnnnnnnnnnnnnnnnnnnnnnnnnnnnnnnnnnnnnnnnnnnnnnnnnnnnnnnnnnnnnnnnnnnnnnnnnnnnnnnnnnnnnnnnnnnnnnnnnnnnnnnnnnnnnnnnnnnnnnnnnnnnnnnnnnnnnnnnnnnnnnnnnnnnnnnnnnnnnnnnnnnnnnnnnnnnnnnnnnnnnnnnnnnnnnnnnnnnnnnnnnnnnnnnnnnnnnnnnnnnnnnnnnnnnnnnnnnnnnnnnnnnnnnnnnnnnnnnnnnnnnnnnnnnnnnnnnnnnnnnnnnnnnnnnnnnnnnnnnnnnnnnnnnnnnnnnnnnnnnnnnnnnnnnnnnnnnnnnnnnnnnnnnnnnnnnnnnnnnnnnnnnnnnnnnnnnnnnnnnnnnnnnnnnnnnnnnnnnnnnnnnnnnnnnnnnnnnnnnnnnnnnnnnnnnnnnnnnnnnnnnnnnnnnnnnnnnnnnnnnnnnnnnnnnnnnnnnnnnnnnnnnnnnnnnnnnnnnnnnnnnnnnnnnnnnnnnnnnnnnnnnnnnnnnnnnnnnnnnnnnnnnnnnnnnnnnnnnnnnnnnnnnnnnnnnnnnnnnnnnnnnnnnnnnnnnnnnnnnnnnnnnnnnnnnnnnnnnnnnnnnnnnnnnnnnnnnnnnnnnnnnnnnnnnnnnnnnnnnnnnnnnnnnnnnnnnnnnnnnnnnnnnnnnnnnnnnnnnnnnnnnnnnnnnnnnnnnnnnnnnnnnnnnnnnnnnnnnnnnnnnnnnnnnnnnnnnnnnnnnnnnnnnnnnnnnnnnnnnnnnnnnnnnnnnnnnnnnnnnnnnnnnnnnnnnnnnnnnnnnnnnnnnnnnnnnnnnnnnnnnnnnnnnnnnnnnnnnnnnnnnnnnnnnnnnnnnnnnnnnnnnnnnnnnnnnnnnnnnnnnnnnnnnnnnnnnnnnnnnnnnnnnnnnnnnnnnnnnnnnnnngaccaagaaagcggtgaagtgggtcaagcaggcaagccgcacagcggcggctcgcaaatatgcgccgtccaggcgaattcccccggccacaccacccgaggacaagtgcagtagatttccttttagtccgacagactcctagaagccacccgtgaatccctctccttcatcgcctcactgcgtcccaatcacagcattgatcccgacctgattctgaaaaataaacacggcaagttacaccacaagttcgacacctcgctgaccaacgtaatgaacagttacacactactcaccgcgccgacggtgacctggtatgcagaaggcaatgccgagctcatttcatgcctgctatcgcccgtgcaatttattggcaagcggcgtgcctctggtttttggttgcgtctcgcattggcaagttgaagccgatgaactggatggtatcgaaggaatgttcggtgaagcgctgcgtccggtgccgattgacttgttcgagggcgacacttcccacccgattgttgatgccgcctggcagcctgcctactggaatcccaatcatcggacggcctgctatgcgccagtttaaggacgtgcaatgctgagttttttcaatgaaaattttggccgtcatctgctgttgcgcaccgatatcagcttgaaattgagcagcggccgcaacgcagcatcagcaccggagacattatcggtttcgagttgcgcgcctgtgtcagcaaaaaactcaaaggccgtcacatctactttcgcacctcggattggcaacgtcggcatagctggatggaacgaaagagggaggcgcatggatttacgcttatcaccgtacattgcagcgcctcgatgcaaaccgtgcagactggcgagagacaatttacggttgatcagacggtctacaccggggttctcaaagtaacggacactgaacgttttaacgcagccctcgccaatggcatcggcattaagacccgtgctttcggctttggcatgttggttatttaacagaaggaatcagtatgaaatctatcatcattaacgccacacttaccaccatcggctccttgtctatcgccttgtctatcgccttgccggtctctgaaggtcagcagggcaacaattcccatcgtcacgcgcggcattgatgtagcgggcaacaagcaacaaaccggctacctgccagccagcacgctacgcggatttttacgcgcgccatcgtggtcgaacaaatgacgcaagccgcccccgcagggcatcactacaccctgcaaaaagcctacgccgacttgattggacaggatgccacctccgaatccagtgacgatattgatctgctcaagttgcgtcaaacccgtgaggacaacgcagtactcgatttatttggctcaggtctaggcattaaatcgcgcctgctggtgtcgcatttcttaccgacacataacgtattaccggaagtcttcaccggcgtgcgcaaggatttggacgataccgacggcgtgctggagctgatttctgaagcggatcgcgcgcgttatccggggcgttccgacgcgaacagcaaacgcgcggccgctgtaacggtggtaaaaggactggaggcaaagttgcgcaaagccaaaaaggccggtgagtcactggtcgaattggaactcgcgcggcaagcggcacaggatattgtcgaacgctacgaatccgacatgggcgagatgaccaatttttcacgcacgctgaccaactattttgccctcccggcaggcatcaaactcaaaggccgattagtgattgagaaagcgcgtgagcgtgatctggccatgatcgaactcgcgctgaatagactttcacagcgtccgattcttggcgcgcaaagcgcgcgcggctgcggggaaattgccggcgtattggatgtattagtggatggcctgcttgccaaaaaaatcaccatctgcgcatggcaagcagcgattattagcaatttttctgctgtcgaatcttgaaaataggtttaataatcaatgcataacaacagattggatcaagccaccccttgtttgggtgcttactataaataaaaatctggcattgtttcacgtgaaacaatcggtttggtcgtttacgaaaaagggaagttgaatgttccgttctgccgagcaaggtaattttgccgctatcgtcgcccggcacatcgcctcggctgacgcaccgttattgctggaaggcggcacggggatcggtaaaactcgtgcctatctttccgcgctgattcaatccggtttgcgcgtcactatcgtgctgcctacccatcagttgattgaccagatgttggcctcaaacgacttggcggcgacgcgaagcgcggccagtattgccgcctttcgtccagcgcgactatttgaaaattggtcggactatgaagctaataagcgcgccgcaatggccgcaaccgtgatgttttgcacagcggccagcgtcatcattgatcagcgtctgggcggcgaatataacggcgcaacaaaccgcgactatttgttgtttgatgaagccgatcaactaccggacatggccgcattgcaaagcgacttcaccattacacaggcggaactgacagcgttgggcataacactcagctgcgtgactgaagccttgcaagccattttggtcaaagcgccaaacgtggttgagccggaaaccagagccgccgcacgcatcattctcgatgccatcgagcaaccagcgtggtatcagtccgctggtgtaagcgatgaaggcgacattatgctgacgcacagcttgcccggtcgtttactgaaataaatcagcaattcagcccatttcgcctttgtctctgccacgctaaccgtcgccagacagctcaaggattttcaaaattcgatgggcattgcgacggtaagtaacttgtcgggcgtgatagaaccggagcgtcacggtacgcttgatttccactttatgccggtggtggttgataccgaggaatggcgcagtgccgtcatccgaatggcgaacgaagcgcctaaaccggtgctgatcgcgaccacatcacaccgtttttccagcctgctcggcgaacaattatcaggtgcaacggtaaggtcggacagcgaatccaccgctcacgccgccgtgcgcgtttcagccaatgggttttttattgcagccggtgcctgggcagggctggatacgccgttgcgctggcgttcgatcatcgtgccgcgcgtgccatacggacaaccagtggtgatagacggcgaaaccaccacccgttatttcgatgcgcacaacacggcgattcgccgtttgcgccaggtgataggccgtggtttacgttcggcggatgcaatctgtagcgtttacatcctcgatggcagggctgaaaaattaacgggctttgtaccggagcgtttttccgccgcatgggcatcacgcaaaacgtatttggagggggcgaggcaagcgctgattttgagcaggaacgaacgctatcccgccgtccgtcgtgccgcactcaattactatggtcgaaaatgtatggcgtgtagctttgtgccgcgcgtggatgcacaactggacgtgcatcatctcgacccgattgccgaaggtgttcgctgcatcaggattgaggatgtggtcgttttgtgtgcaaactgtcaccgtctggttcacgctacccatccccctttagcactcaccgatctaattgcgctactcaacgcaacaatatgattatccttaacgtaaaactcgcgcagcgacgaactgtacccctcgccctctgggagaggggggacgggggtgagggaacgggcatggcgggttttatcatcaggggtggttacttttccatgcccgttagatttttttcaattaaattcccgttagctaacggttttccctagcagcctgtcggacatgatgttaaatcatccgactttcctggcaagccggaagaatttgttcccgatttcataaaaataaccttcaggttgtcataaaaatccatttttggcgttgaa

SEQ ID NO: 283 - DNA, 11138 bp, Artificial Sequence; identical to SEQ ID NO: 282
  Synthetic Oligonucleotide
  misc_feature (1)..(7104): n is a, c, g, or t

SEQ ID NO: 284 - DNA, 11138 bp, Artificial Sequence; identical to SEQ ID NO: 282
  Synthetic Oligonucleotide
  misc_feature (1)..(7104): n is a, c, g, or t

SEQ ID NO: 285 - DNA, 11138 bp, Artificial Sequence; identical to SEQ ID NO: 282
  Synthetic Oligonucleotide
  misc_feature (1)..(7104): n is a, c, g, or t

SEQ ID NO: 286 - DNA, 11138 bp, Artificial Sequence
  Synthetic Oligonucleotide
  misc_feature (1)..(7104): n is a, c, g, or t
nnnnnnnnnnnnnnnnnnnnnnnnnnnnnnnnnnnnnnnnnnnnnnnnnnnnnnnnnnnnnnnnnnnnnnnnnnnnnnnnnnnnnnnnnnnnnnnnnnnnnnnnnnnnnnnnnnnnnnnnnnnnnnnnnnnnnnnnnnnnnnnnnnnnnnnnnnnnnnnnnnnnnnnnnnnnnnnnnnnnnnnnnnnnnnnnnnnnnnnnnnnnnnnnnnnnnnnnnnnnnnnnnnnnnnnnnnnnnnnnnnnnnnnnnnnnnnnnnnnnnnnnnnnnnnnnnnnnnnnnnnnnnnnnnnnnnnnnnnnnnnnnnnnnnnnnnnnnnnnnnnnnnnnnnnnnnnnnnnnnnnnnnnnnnnnnnnnnnnnnnnnnnnnnnnnnnnnnnnnnnnnnnnnnnnnnnnnnnnnnnnnnnnnnnnnnnnnnnnnnnnnnnnnnnnnnnnnnnnnnnnnnnnnnnnnnnnnnnnnnnnnnnnnnnnnnnnnnnnnnnnnnnnnnnnnnnnnnnnnnnnnnnnnnnnnnnnnnnnnnnnnnnnnnnnnnnnnnnnnnnnnnnnnnnnnnnnnnnnnnnnnnnnnnnnnnnnnnnnnnnnnnnnnnnnnnnnnnnnnnnnnnnnnnnnnnnnnnnnnnnnnnnnnnnnnnnnnnnnnnnnnnnnnnnnnnnnnnnnnnnnnnnnnnnnnnnnnnnnnnnnnnnnnnnnnnnnnnnnnnnnnnnnnnnnnnnnnnnnnnnnnnnnnnnnnnnnnnnnnnnnnnnnnnnnnnnnnnnnnnnnnnnnnnnnnnnnnnnnnnnnnnnnnnnnnnnnnnnnnnnnnnnnnnnnnnnnnnnnnnnnnnnnnnnnnnnnnnnnnnnnnnnnnnnnnnnnnnnnnnnnnnnnnnnnnnnnnnnnnnnnnnnnnnnnnnnnnnnnnnnnnnnnnnnnnnnnnnnnnnnnnnnnnnnnnnnnnnnnnnnnnnnnnnnnnnnnnnnnnnnnnnnnnnnnnnnnnnnnnnnnnnnnnnnnnnnnnnnnnnnnnnnnnnnnnnnnnnnnnnnnnnnnnnnnnnnnnnnnnnnnnnnnnnnnnnnnnnnnnnnnnnnnnnnnnnnnnnnnnnnnnnnnnnnnnnnnnnnnnnnnnnnnnnnnnnnnnnnnnnnnnnnnnnnnnnnnnnnnnnnnnnnnnnnnnnnnnnnnnnnnnnnnnnnnnnnnnnnnnnnnnnnnnnnnnnnnnnnnnnnnnnnnnnnnnnnnnnnnnnnnnnnnnnnnnnnnnnnnnnnnnnnnnnnnnnnnnnnnnnnnnnnnnnnnnnnnnnnnnnnnnnnnnnnnnnnnnnnnnnnnnnnnnnnnnnnnnnnnnnnnnnnnnnnnnnnnnnnnnnnnnnnnnnnnnnnnnnnnnnnnnnnnnnnnnnnnnnnnnnnnnnnnnnnnnnnnnnnnnnnnnnnnnnnnnnnnnnnnnnnnnnnnnnnnnnnnnnnnnnnnnnnnnnnnnnnnnnnnnnnnnnnnnnnnnnnnnnnnnnnnnnnnnnnnnnnnnnnnnnnnnnnnnnnnnnnnnnnnnnnnnnnnnnnnnnnnnnnnnnnnnnnnnnnnnnnnnnnnnnnnnnnnnnnnnnnnnnnnnnnnnnnnnnnnnnnnnnnnnnnnnnnnnnnnnnnnnnnnnnnnnnnnnnnnnnnnnnnnnnnnnnnnnnnnnnnnnnnnnnnnnnnnnnnnnnnnnnnnnnnnnnnnnnnnnnnnnnnnnnnnnnnnnnnnnnnnnnnnnnnnnnnnnnnnnnnnnnnnnnnnnnnnnnnnnnnnnnnnnnnnnnnnnnnnnnnnnnnnnnnnnnnnnnnnnnnnnnnnnnnnnnnnnnnnnnnnnnnnnnnnnnnnnnnnnnnnnnnnnnnnnnnnnnnnnnnnnnnnnnnnnnnnnnnnnnnnnnnnnnnnnnnnnnnnnnnnnnnnnnnnnnnnnnnnnnnnnnnnnnnnnnnnnnnnnnnnnnnnnnnnnnnnnnnnnnnnnnnnnnnnnnnnnnnnnnnnnnnnnnnnnnnnnnnnnnnnnnnnnnnnnnnnnnnnnnnnnnnnnnnnnnnnnnnnnnnnnnnnnnnnnnnnnnnnnnnnnnnnnnnnnnnnnnnnnnnnnnnnnnnnnnnnnnnnnnnnnnnnnnnnnnnnnnnnnnnnnnnnnnnnnnnnnnnnnnnnnnnnnnnnnnnnnnnnnnnnnnnnnnnnnnnnnnnnnnnnnnnnnnnnnnnnnnnnnnnnnnnnnnnnnnnnnnnnnnnnnnnnnnnnnnnnnnnnnnnnnnnnnnnnnnnnnnnnnnnnnnnnnnnnnnnnnnnnnnnnnnnnnnnnnnnnnnnnnnnnnnnnnnnnnnnnnnnnnnnnnnnnnnnnnnnnnnnnnnnnnnnnnnnnnnnnnnnnnnnnnnnnnnnnnnnnnnnnnnnnnnnnnnnnnnnnnnnnnnnnnnnnnnnnnnnnnnnnnnnnnnnnnnnnnnnnnnnnnnnnnnnnnnnnnnnnnnnnnnnnnnnnnnnnnnnnnnnnnnnnnnnnnnnnnnnnnnnnnnnnnnnnnnnnnnnnnnnnnnnnnnnnnnnnnnnnnnnnnnnnnnnnnnnnnnnnnnnnnnnnnnnnnnnnnnnnnnnnnnnnnnnnnnnnnnnnnnnnnnnnnnnnnnnnnnnnnnnnnnnnnnnnnnnnnnnnnnnnnnnnnnnnnnnnnnnnnnnnnnnnnnnnnnnnnnnnnnnnnnnnnnnnnnnnnnnnnnnnnnnnnnnnnnnnnnnnnnnnnnnnnnnnnnnnnnnnnnnnnnnnnnnnnnnnnnnnnnnnnnnnnnnnnnnnnnnnnnnnnnnnnnnnnnnnnnnnnnnnnnnnnnnnnnnnnnnnnnnnnnnnnnnnnnnnnnnnnnnnnnnnnnnnnnnnnnnnnnnnnnnnnnnnnnnnnnnnnnnnnnnnnnnnnnnnnnnnnnnnnnnnnnnnnnnnnnnnnnnnnnnnnnnnnnnnnnnnnnnnnnnnnnnnnnnnnnnnnnnnnnnnnnnnnnnnnnnnnnnnnnnnnnnnnnnnnnnnnnnnnnnnnnnnnnnnnnnnnnnnnnnnnnnnnnnnnnnnnnnnnnnnnnnnnnnnnnnnnnnnnnnnnnnnnnnnnnnnnnnnnnnnnnnnnnnnnnnnnnnnnnnnnnnnnnnnnnnnnnnnnnnnnnnnnnnnnnnnnnnnnnnnnnnnnnnnnnnnnnnnnnnnnnnnnnnnnnnnnnnnnnnnnnnnnnnnnnnnnnnnnnnnnnnnnnnnnnnnnnnnnnnnnnnnnnnnnnnnnnnnnnnnnnnnnnnnnnnnnnnnnnnnnnnnnnnnnnnnnnnnnnnnnnnnnnnnnnnnnnnnnnnnnnnnnnnnnnnnnnnnnnnnnnnnnnnnnnnnnnnnnnnnnnnnnnnnnnnnnnnnnnnnnnnnnnnnnnnnnnnnnnnnnnnnnnnnnnnnnnnnnnnnnnnnnnnnnnnnnnnnnnnnnnnnnnnnnnnnnnnnnnnnnnnnnnnnnnnnnnnnnnnnnnnnnnnnnnnnnnnnnnnnnnnnnnnnnnnnnnnnnnnnnnnnnnnnnnnnnnnnnnnnnnnnnnnnnnnnnnnnnnnnnnnnnnnnnnnnnnnnnnnnnnnnnnnnnnnnnnnnnnnnnnnnnnnnnnnnnnnnnnnnnnnnnnnnnnnnnnnnnnnnnnnnnnnnnnnnnnnnnnnnnnnnnnnnnnnnnnnnnnnnnnnnnnnnnnnnnnnnnnnnnnnnnnnnnnnnnnnnnnnnnnnnnnnnnnnnnnnnnnnnnnnnnnnnnnnnnnnnnnnnnnnnnnnnnnnnnnnnnnnnnnnnnnnnnnnnnnnnnnnnnnnnnnnnnnnnnnnnnnnnnnnnnnnnnnnnnnnnnnnnnnnnnnnnnnnnnnnnnnnnnnnnnnnnnnnnnnnnnnnnnnnnnnnnnnnnnnnnnnnnnnnnnnnnnnnnnnnnnnnnnnnnnnnnnnnnnnnnnnnnnnnnnnnnnnnnnnnnnnnnnnnnnnnnnnnnnnnnnnnnnnnnnnnnnnnnnnnnnnnnnnnnnnnnnnnnnnnnnnnnnnnnnnnnnnnnnnnnnnnnnnnnnnnnnnnnnnnnnnnnnnnnnnnnnnnnnnnnnnnnnnnnnnnnnnnnnnnnnnnnnnnnnnnnnnnnnnnnnnnnnnnnnnnnnnnnnnnnnnnnnnnnnnnnnnnnnnnnnnnnnnnnnnnnnnnnnnnnnnnnnnnnnnnnnnnnnnnnnnnnnnnnnnnnnnnnnnnnnnnnnnnnnnnnnnnnnnnnnnnnnnnnnnnnnnnnnnnnnnnnnnnnnnnnnnnnnnnnnnnnnnnnnnnnnnnnnnnnnnnnnnnnnnnnnnnnnnnnnnnnnnnnnnnnnnnnnnnnnnnnnnnnnnnnnnnnnnnnnnnnnnnnnnnnnnnnnnnnnnnnnnnnnnnnnnnnnnnnnnnnnnnnnnnnnnnnnnnnnnnnnnnnnnnnnnnnnnnnnnnnnnnnnnnnnnnnnnnnnnnnnnnnnnnnnnnnnnnnnnnnnnnnnnnnnnnnnnnnnnnnnnnnnnnnnnnnnnnnnnnnnnnnnnnnnnnnnnnnnnnnnnnnnnnnnnnnnnnnnnnnnnnnnnnnnnnnnnnnnnnnnnnnnnnnnnnnnnnnnnnnnnnnnnnnnnnnnnnnnnnnnnnnnnnnnnnnnnnnnnnnnnnnnnnnnnnnnnnnnnnnnnnnnnnnnnnnnnnnnnnnnnnnnnnnnnnnnnnnnnnnnnnnnnnnnnnnnnnnnnnnnnnnnnnnnnnnnnnnnnnnnnnnnnnnnnnnnnnnnnnnnnnnnnnnnnnnnnnnnnnnnnnnnnnnnnnnnnnnnnnnnnnnnnnnnnnnnnnnnnnnnnnnnnnnnnnnnnnnnnnnnnnnnnnnnnnnnnnnnnnnnnnnnnnnnnnnnnnnnnnnnnnnnnnnnnnnnnnnnnnnnnnnnnnnnnnnnnnnnnnnnnnnnnnnnnnnnnnnnnnnnnnnnnnnnnnnnnnnnnnnnnnnnnnnnnnnnnnnnnnnnnnnnnnnnnnnnnnnnnnnnnnnnnnnnnnnnnnnnnnnnnnnnnnnnnnnnnnnnnnnnnnnnnnnnnnnnnnnnnnnnnnnnnnnnnnnnnnnnnnnnnnnnnnnnnnnnnnnnnnnnnnnnnnnnnnnnnnnnnnnnnnnnnnnnnnnnnnnnnnnnnnnnnnnnnnnnnnnnnnnnnnnnnnnnnnnnnnnnnnnnnnnnnnnnnnnnnnnnnnnnnnnnnnnnnnnnnnnnnnnnnnnnnnnnnnnnnnnnnnnnnnnnnnnnnnnnnnnnnnnnnnnnnnnnnnnnnnnnnnnnnnnnnnnnnnnnnnnnnnnnnnnnnnnnnnnnnnnnnnnnnnnnnnnnnnnnnnnnnnnnnnnnnnnnnnnnnnnnnnnnnnnnnnnnnnnnnnnnnnnnnnnnnnnnnnnnnnnnnnnnnnnnnnnnnnnnnnnnnnnnnnnnnnnnnnnnnnnnnnnnnnnnnnnnnnnnnnnnnnnnnnnnnnnnnnnnnnnnnnnnnnnnnnnnnnnnnnnnnnnnnnnnnnnnnnnnnnnnnnnnnnnnnnnnnnnnnnnnnnnnnnnnnnnnnnnnnnnnnnnnnnnnnnnnnnnnnnnnnnnnnnnnnnnnnnnnnnnnnnnnnnnnnnnnnnnnnnnnnnnnnnnnnnnnnnnnnnnnnnnnnnnnnnnnnnnnnnnnnnnnnnnnnnnnnnnnnnnnnnnnnnnnnnnnnnnnnnnnnnnnnnnnnnnnnnnnnnnnnnnnnnnnnnnnnnnnnnnnnnnnnnnnnnnnnnnnnnnnnnnnnnnnnnnnnnnnnnnnnnnnnnnnnnnnnnnnnnnnnnnnnnnnnnnnnnnnnnnnnnnnnnnnnnnnnnnnnnnnnnnnnnnnnnnnnnnnnnnnnnnnnnnnnnnnnnnnnnnnnnnnnnnnnnnnnnnnnnnnnnnnnnnnnnnnnnnnnnnnnnnnnnnnnnnnnnnnnnnnnnnnnnnnnnnnnnnnnnnnnnnnnnnnnnnnnnnnnnnnnnnnnnnnnnnnnnnnnnnnnnnnnnnnnnnnnnnnnnnnnnnnnnnnnnnnnnnnnnnnnnnnnnnnnnnnnnnnnnnnnnnnnnnnnnnnnnnnnnnnnnnnnnnnnnnnnnnnnnnnnnnnnnnnnnnnnnnnnnnnnnnnnnnnnnnnnnnnnnnnnnnnnnnnnnnnnnnnnnnnnnnnnnnnnnnnnnnnnnnnnnnnnnnnnnnnnnnnnnnnnnnnnnnnnnnnnnnnnnnnnnnnnnnnnnnnnnnnnnnnnnnnnnnnnnnnnnnnnnnnnnnnnnnnnnnnnnnnnnnnnnnnnnnnnnnnnnnnnnnnnnnnnnnnnnnnnnnnnnnnnnnnnnnnnnnnnnnnnnnnnnnnnnnnnnnnnnnnnnnnnnnnnnnnnnnnnnnnnnnnnnnnnnnnnnnnnnnnnnnnnnnnnnnnnnnnnnnnnnnnnnnnnnnnnnnnnnnnnnnnnnnnnnnnnnnnnnnnnnnnnnnnnnnnnnnnnnnnnnnnnnnnnnnnnnnnnnnnnnnnnnnnnnnnnnnnnnnnnnnnnnnnnnnnnnnnnnnnnnnnnnnnnnnnnnnnnnnnnnnnnnnnnnnnnnnnnnnnnnnnnnnnnnnnnnnnnnnnnnnnnnnnnnnnnnnnnnnnnnnnnnnnnnnnnnnnnnnnnnnnnnnnnnnnnnnnnnnnnnnnnnnnnnnnnnnnnnnnnnnnnnnnnnnnnnnnnnnnnnnnnnnnnnnnnnnnnnnnnnnnnnnnnnnnnnnnnnnnnnnnnnnnnnnnnnnnnnnnnnnnnnnnnnnnnnnnnnnnnnnnnnnnnnnnnnnnnnnnnnnnnnnnnnnnnnnnnnnnnnnnnnnnnnnnnnnnnnnnnnnnnnnnnnnnnnnnnnnnnnnnnnnnnnnnnnnnnnnnnnnnnnnnnnnnnnnnnnnnnnnnnnnnnnnnnnnnnnnnnnnnnnnnnnnnnnnnnnnnnnnnnnnnnnnnnnnnnnnnnnnnnnnnnnnnnnnnnnnnnnnnnnnnnnnnnnnnnnnnnnnnnnnnnnnnnnnnnnnnnnnnnnnnnnnnnnnnnnnnnnnnnnnnnnnnnnnnnnnnnnnnnnnnnnnnnnnnnnnnnnnnnnnnnnnnnnnnnnnnnnnnnnnnnnnnnnnnnnnnnnnnnnnnnnnnnnnnngaccaagaaagcggtgaagtgggtcaagcaggcaagccgcacagcggcggctcgcaaatatgcgccgtccaggcgaattcccccggccacaccacccgaggacaagtgcagtagatttccttttagtccgacagactcctagaagccacccgtgaatccctctccttcatcgcctcactgcgtcccaatcacagcattgatcccgacctgattctgaaaaataaacacggcaagttacaccacaagttcgacacctcgctgaccaacgtaatgaacagttacacactactcaccgcgccgacggtgacctggtatgcagaaggcaatgccgagctcatttcatgcctgctatcgcccgtgcaatttattggcaagcggcgtgcctctggtttttggttgcgtctcgcattggcaagttgaagccgatgaactggatggtatcgaaggaatgttcggtgaagcgctgcgtccggtgccgattgacttgttcgagggcgacacttcccacccgattgttgatgccgcctggcagcctgcctactggaatcccaatcatcggacggcctgctatgcgccagtttaaggacgtgcaatgctgagttttttcaatcaaaattttggccgtcatctgctgttgcgcaccgatatcagcttgaaattgagcagcggccgcaacgcagcatcagcaccggagacattatcggtttcgagttgcgcgcctgtgtcagcaaaaaactcaaaggccgtcacatctactttcgcacctcggattggcaacgtcggcatagctggatggaacgaaagagggaggcgcatggatttacgcttatcaccgtacattgcagcgcctcgatgcaaaccgtgcagactggcgagagacaatttacggttgatcagacggtctacaccggggttctcaaagtaacggacactgaacgttttaacgcagccctcgccaatggcatcggcattaagacccgtgctttcggctttggcatgttggttatttaacagaaggaatcagtatgaaatctatcatcattaacgccacacttaccaccatcggctccttgtctatcgccttgtctatcgccttgccggtctctgaaggtcagcagggcaacaattcccatcgtcacgcgcggcattgatgtagcgggcaacaagcaacaaaccggctacctgccagccagcacgctacgcggatttttacgcgcgccatcgtggtcgaacaaatgacgcaagccgcccccgcagggcatcactacaccctgcaaaaagcctacgccgacttgattggacaggatgccacctccgaatccagtgacgatattgatctgctcaagttgcgtcaaacccgtgaggacaacgcagtactcgatttatttggctcaggtctaggcattaaatcgcgcctgctggtgtcgcatttcttaccgacacataacgtattaccggaagtcttcaccggcgtgcgcaaggatttggacgataccgacggcgtgctggagctgatttctgaagcggatcgcgcgcgttatccggggcgttccgacgcgaacagcaaacgcgcggccgctgtaacggtggtaaaaggactggaggcaaagttgcgcaaagccaaaaaggccggtgagtcactggtcgaattggaactcgcgcggcaagcggcacaggatattgtcgaacgctacgaatccgacatgggcgagatgaccaatttttcacgcacgctgaccaactattttgccctcccggcaggcatcaaactcaaaggccgattagtgattgagaaagcgcgtgagcgtgatctggccatgatcgaactcgcgctgaatagactttcacagcgtccgattcttggcgcgcaaagcgcgcgcggctgcggggaaattgccggcgtattggatgtattagtggatggcctgcttgccaaaaaaatcaccatctgcgcatggcaagcagcgattattagcaatttttctgctgtcgaatcttgaaaataggtttaataatcaatgcataacaacagattggatcaagccaccccttgtttgggtgcttactataaataaaaatctggcattgtttcacgtgaaacaatcggtttggtcgtttacgaaaaagggaagttgaatgttccgttctgccgagcaaggtaattttgccgctatcgtcgcccggcacatcgcctcggctgacgcaccgttattgctggaaggcggcacggggatcggtaaaactcgtgcctatctttccgcgctgattcaatccggtttgcgcgtcactatcgtgctgcctacccatcagttgattgaccagatgttggcctcaaacgacttggcggcgacgcgaagcgcggccagtattgccgcctttcgtccagcgcgactatttgaaaattggtcggactatgaagctaataagcgcgccgcaatggccgcaaccgtgatgttttgcacagcggccagcgtcatcattgatcagcgtctgggcggcgaatataacggcgcaacaaaccgcgactatttgttgtttgatgaagccgatcaactaccggacatggccgcattgcaaagcgacttcaccattacacaggcggaactgacagcgttgggcataacactcagctgcgtgactgaagccttgcaagccattttggtcaaagcgccaaacgtggttgagccggaaaccagagccgccgcacgcatcattctcgatgccatcgagcaaccagcgtggtatcagtccgctggtgtaagcgatgaaggcgacattatgctgacgcacagcttgcccggtcgtttactgaaataaatcagcaattcagcccatttcgcctttgtctctgccacgctaaccgtcgccagacagctcaaggattttcaaaattcgatgggcattgcgacggtaagtaacttgtcgggcgtgatagaaccggagcgtcacggtacgcttgatttccactttatgccggtggtggttgataccgaggaatggcgcagtgccgtcatccgaatggcgaacgaagcgcctaaaccggtgctgatcgcgaccacatcacaccgtttttccagcctgctcggcgaacaattatcaggtgcaacggtaaggtcggacagcgaatccaccgctcacgccgccgtgcgcgtttcagccaatgggttttttattgcagccggtgcctgggcagggctggatacgccgttgcgctggcgttcgatcatcgtgccgcgcgtgccatacggacaaccagtggtgatagacggcgaaaccaccacccgttatttcgatgcgcacaacacggcgattcgccgtttgcgccaggtgataggccgtggtttacgttcggcggatgcaatctgtagcgtttacatcctcgatggcagggctgaaaaattaacgggctttgtaccggagcgtttttccgccgcatgggcatcacgcaaaacgtatttggagggggcgaggcaagcgctgattttgagcaggaacgaacgctatcccgccgtccgtcgtgccgcactcaattactatggtcgaaaatgtatggcgtgtagctttgtgccgcgcgtggatgcacaactggacgtgcatcatctcgacccgattgccgaaggtgttcgctgcatcaggattgaggatgtggtcgttttgtgtgcaaactgtcaccgtctggttcacgctacccatccccctttagcactcaccgatctaattgcgctactcaacgcaacaatatgattatccttaacgtaaaactcgcgcagcgacgaactgtacccctcgccctctgggagaggggggacgggggtgagggaacgggcatggcgggttttatcatcaggggtggttacttttccatgcccgttagatttttttcaattaaattcccgttagctaacggttttccctagcagcctgtcggacatgatgttaaatcatccgactttcctggcaagccggaagaatttgttcccgatttcataaaaataaccttcaggttgtcataaaaatccatttttggcgttgaa

SEQ ID NO: 287 - DNA, 11138 bp, Artificial Sequence; identical to SEQ ID NO: 282
  Synthetic Oligonucleotide
  misc_feature (1)..(7104): n is a, c, g, or t

SEQ ID NO: 288 - DNA, 11138 bp, Artificial Sequence; identical to SEQ ID NO: 282
  Synthetic Oligonucleotide
  misc_feature (1)..(7104): n is a, c, g, or t

SEQ ID NO: 289 - DNA, 11138 bp, Artificial Sequence; identical to SEQ ID NO: 282
  Synthetic Oligonucleotide
  misc_feature (1)..(7104): n is a, c, g, or t

SEQ ID NO: 290 - DNA, 11138 bp, Artificial Sequence
  Synthetic Oligonucleotide
  misc_feature (1)..(7104): n is a, c, g, or t
nnnnnnnnnnnnnnnnnnnnnnnnnnnnnnnnnnnnnnnnnnnnnnnnnnnnnnnnnnnnnnnnnnnnnnnnnnnnnnnnnnnnnnnnnnnnnnnnnnnnnnnnnnnnnnnnnnnnnnnnnnnnnnnnnnnnnnnnnnnnnnnnnnnnnnnnnnnnnnnnnnnnnnnnnnnnnnnnnnnnnnnnnnnnnnnnnnnnnnnnnnnnnnnnnnnnnnnnnnnnnnnnnnnnnnnnnnnnnnnnnnnnnnnnnnnnnnnnnnnnnnnnnnnnnnnnnnnnnnnnnnnnnnnnnnnnnnnnnnnnnnnnnnnnnnnnnnnnnnnnnnnnnnnnnnnnnnnnnnnnnnnnnnnnnnnnnnnnnnnnnnnnnnnnnnnnnnnnnnnnnnnnnnnnnnnnnnnnnnnnnnnnnnnnnnnnnnnnnnnnnnnnnnnnnnnnnnnnnnnnnnnnnnnnnnnnnnnnnnnnnnnnnnnnnnnnnnnnnnnnnnnnnnnnnnnnnnnnnnnnnnnnnnnnnnnnnnnnnnnnnnnnnnnnnnnnnnnnnnnnnnnnnnnnnnnnnnnnnnnnnnnnnnnnnnnnnnnnnnnnnnnnnnnnnnnnnnnnnnnnnnnnnnnnnnnnnnnnnnnnnnnnnnnnnnnnnnnnnnnnnnnnnnnnnnnnnnnnnnnnnnnnnnnnnnnnnnnnnnnnnnnnnnnnnnnnnnnnnnnnnnnnnnnnnnnnnnnnnnnnnnnnnnnnnnnnnnnnnnnnnnnnnnnnnnnnnnnnnnnnnnnnnnnnnnnnnnnnnnnnnnnnnnnnnnnnnnnnnnnnnnnnnnnnnnnnnnnnnnnnnnnnnnnnnnnnnnnnnnnnnnnnnnnnnnnnnnnnnnnnnnnnnnnnnnnnnnnnnnnnnnnnnnnnnnnnnnnnnnnnnnnnnnnnnnnnnnnnnnnnnnnnnnnnnnnnnnnnnnnnnnnnnnnnnnnnnnnnnnnnnnnnnnnnnnnnnnnnnnnnnnnnnnnnnnnnnnnnnnnnnnnnnnnnnnnnnnnnnnnnnnnnnnnnnnnnnnnnnnnnnnnnnnnnnnnnnnnnnnnnnnnnnnnnnnnnnnnnnnnnnnnnnnnnnnnnnnnnnnnnnnnnnnnnnnnnnnnnnnnnnnnnnnnnnnnnnnnnnnnnnnnnnnnnnnnnnnnnnnnnnnnnnnnnnnnnnnnnnnnnnnnnnnnnnnnnnnnnnnnnnnnnnnnnnnnnnnnnnnnnnnnnnnnnnnnnnnnnnnnnnnnnnnnnnnnnnnnnnnnnnnnnnnnnnnnnnnnnnnnnnnnnnnnnnnnnnnnnnnnnnnnnnnnnnnnnnnnnnnnnnnnnnnnnnnnnnnnnnnnnnnnnnnnnnnnnnnnnnnnnnnnnnnnnnnnnnnnnnnnnnnnnnnnnnnnnnnnnnnnnnnnnnnnnnnnnnnnnnnnnnnnnnnnnnnnnnnnnnnnnnnnnnnnnnnnnnnnnnnnnnnnnnnnnnnnnnnnnnnnnnnnnnnnnnnnnnnnnnnnnnnnnnnnnnnnnnnnnnnnnnnnnnnnnnnnnnnnnnnnnnnnnnnnnnnnnnnnnnnnnnnnnnnnnnnnnnnnnnnnnnnnnnnnnnnnnnnnnnnnnnnnnnnnnnnnnnnnnnnnnnnnnnnnnnnnnnnnnnnnnnnnnnnnnnnnnnnnnnnnnnnnnnnnnnnnnnnnnnnnnnnnnnnnnnnnnnnnnnnnnnnnnnnnnnnnnnnnnnnnnnnnnnnnnnnnnnnnnnnnnnnnnnnnnnnnnnnnnnnnnnnnnnnnnnnnnnnnnnnnnnnnnnnnnnnnnnnnnnnnnnnnnnnnnnnnnnnnnnnnnnnnnnnnnnnnnnnnnnnnnnnnnnnnnnnnnnnnnnnnnnnnnnnnnnnnnnnnnnnnnnnnnnnnnnnnnnnnnnnnnnnnnnnnnnnnnnnnnnnnnnnnnnnnnnnnnnnnnnnnnnnnnnnnnnnnnnnnnnnnnnnnnnnnnnnnnnnnnnnnnnnnnnnnnnnnnnnnnnnnnnnnnnnnnnnnnnnnnnnnnnnnnnnnnnnnnnnnnnnnnnnnnnnnnnnnnnnnnnnnnnnnnnnnnnnnnnnnnnnnnnnnnnnnnnnnnnnnnnnnnnnnnnnnnnnnnnnnnnnnnnnnnnnnnnnnnnnnnnnnnnnnnnnnnnnnnnnnnnnnnnnnnnnnnnnnnnnnnnnnnnnnnnnnnnnnnnnnnnnnnnnnnnnnnnnnnnnnnnnnnnnnnnnnnnnnnnnnnnnnnnnnnnnnnnnnnnnnnnnnnnnnnnnnnnnnnnnnnnnnnnnnnnnnnnnnnnnnnnnnnnnnnnnnnnnnnnnnnnnnnnnnnnnnnnnnnnnnnnnnnnnnnnnnnnnnnnnnnnnnnnnnnnnnnnnnnnnnnnnnnnnnnnnnnnnnnnnnnnnnnnnnnnnnnnnnnnnnnnnnnnnnnnnnnnnnnnnnnnnnnnnnnnnnnnnnnnnnnnnnnnnnnnnnnnnnnnnnnnnnnnnnnnnnnnnnnnnnnnnnnnnnnnnnnnnnnnnnnnnnnnnnnnnnnnnnnnnnnnnnnnnnnnnnnnnnnnnnnnnnnnnnnnnnnnnnnnnnnnnnnnnnnnnnnnnnnnnnnnnnnnnnnnnnnnnnnnnnnnnnnnnnnnnnnnnnnnnnnnnnnnnnnnnnnnnnnnnnnnnnnnnnnnnnnnnnnnnnnnnnnnnnnnnnnnnnnnnnnnnnnnnnnnnnnnnnnnnnnnnnnnnnnnnnnnnnnnnnnnnnnnnnnnnnnnnnnnnnnnnnnnnnnnnnnnnnnnnnnnnnnnnnnnnnnnnnnnnnnnnnnnnnnnnnnnnnnnnnnnnnnnnnnnnnnnnnnnnnnnnnnnnnnnnnnnnnnnnnnnnnnnnnnnnnnnnnnnnnnnnnnnnnnnnnnnnnnnnnnnnnnnnnnnnnnnnnnnnnnnnnnnnnnnnnnnnnnnnnnnnnnnnnnnnnnnnnnnnnnnnnnnnnnnnnnnnnnnnnnnnnnnnnnnnnnnnnnnnnnnnnnnnnnnnnnnnnnnnnnnnnnnnnnnnnnnnnnnnnnnnnnnnnnnnnnnnnnnnnnnnnnnnnnnnnnnnnnnnnnnnnnnnnnnnnnnnnnnnnnnnnnnnnnnnnnnnnnnnnnnnnnnnnnnnnnnnnnnnnnnnnnnnnnnnnnnnnnnnnnnnnnnnnnnnnnnnnnnnnnnnnnnnnnnnnnnnnnnnnnnnnnnnnnnnnnnnnnnnnnnnnnnnnnnnnnnnnnnnnnnnnnnnnnnnnnnnnnnnnnnnnnnnnnnnnnnnnnnnnnnnnnnnnnnnnnnnnnnnnnnnnnnnnnnnnnnnnnnnnnnnnnnnnnnnnnnnnnnnnnnnnnnnnnnnnnnnnnnnnnnnnnnnnnnnnnnnnnnnnnnnnnnnnnnnnnnnnnnnnnnnnnnnnnnnnnnnnnnnnnnnnnnnnnnnnnnnnnnnnnnnnnnnnnnnnnnnnnnnnnnnnnnnnnnnnnnnnnnnnnnnnnnnnnnnnnnnnnnnnnnnnnnnnnnnnnnnnnnnnnnnnnnnnnnnnnnnnnnnnnnnnnnnnnnnnnnnnnnnnnnnnnnnnnnnnnnnnnnnnnnnnnnnnnnnnnnnnnnnnnnnnnnnnnnnnnnnnnnnnnnnnnnnnnnnnnnnnnnnnnnnnnnnnnnnnnnnnnnnnnnnnnnnnnnnnnnnnnnnnnnnnnnnnnnnnnnnnnnnnnnnnnnnnnnnnnnnnnnnnnnnnnnnnnnnnnnnnnnnnnnnnnnnnnnnnnnnnnnnnnnnnnnnnnnnnnnnnnnnnnnnnnnnnnnnnnnnnnnnnnnnnnnnnnnnnnnnnnnnnnnnnnnnnnnnnnnnnnnnnnnnnnnnnnnnnnnnnnnnnnnnnnnnnnnnnnnnnnnnnnnnnnnnnnnnnnnnnnnnnnnnnnnnnnnnnnnnnnnnnnnnnnnnnnnnnnnnnnnnnnnnnnnnnnnnnnnnnnnnnnnnnnnnnnnnnnnnnnnnnnnnnnnnnnnnnnnnnnnnnnnnnnnnnnnnnnnnnnnnnnnnnnnnnnnnnnnnnnnnnnnnnnnnnnnnnnnnnnnnnnnnnnnnnnnnnnnnnnnnnnnnnnnnnnnnnnnnnnnnnnnnnnnnnnnnnnnnnnnnnnnnnnnnnnnnnnnnnnnnnnnnnnnnnnnnnnnnnnnnnnnnnnnnnnnnnnnnnnnnnnnnnnnnnnnnnnnnnnnnnnnnnnnnnnnnnnnnnnnnnnnnnnnnnnnnnnnnnnnnnnnnnnnnnnnnnnnnnnnnnnnnnnnnnnnnnnnnnnnnnnnnnnnnnnnnnnnnnnnnnnnnnnnnnnnnnnnnnnnnnnnnnnnnnnnnnnnnnnnnnnnnnnnnnnnnnnnnnnnnnnnnnnnnnnnnnnnnnnnnnnnnnnnnnnnnnnnnnnnnnnnnnnnnnnnnnnnnnnnnnnnnnnnnnnnnnnnnnnnnnnnnnnnnnnnnnnnnnnnnnnnnnnnnnnnnnnnnnnnnnnnnnnnnnnnnnnnnnnnnnnnnnnnnnnnnnnnnnnnnnnnnnnnnnnnnnnnnnnnnnnnnnnnnnnnnnnnnnnnnnnnnnnnnnnnnnnnnnnnnnnnnnnnnnnnnnnnnnnnnnnnnnnnnnnnnnnnnnnnnnnnnnnnnnnnnnnnnnnnnnnnnnnnnnnnnnnnnnnnnnnnnnnnnnnnnnnnnnnnnnnnnnnnnnnnnnnnnnnnnnnnnnnnnnnnnnnnnnnnnnnnnnnnnnnnnnnnnnnnnnnnnnnnnnnnnnnnnnnnnnnnnnnnnnnnnnnnnnnnnnnnnnnnnnnnnnnnnnnnnnnnnnnnnnnnnnnnnnnnnnnnnnnnnnnnnnnnnnnnnnnnnnnnnnnnnnnnnnnnnnnnnnnnnnnnnnnnnnnnnnnnnnnnnnnnnnnnnnnnnnnnnnnnnnnnnnnnnnnnnnnnnnnnnnnnnnnnnnnnnnnnnnnnnnnnnnnnnnnnnnnnnnnnnnnnnnnnnnnnnnnnnnnnnnnnnnnnnnnnnnnnnnnnnnnnnnnnnnnnnnnnnnnnnnnnnnnnnnnnnnnnnnnnnnnnnnnnnnnnnnnnnnnnnnnnnnnnnnnnnnnnnnnnnnnnnnnnnnnnnnnnnnnnnnnnnnnnnnnnnnnnnnnnnnnnnnnnnnnnnnnnnnnnnnnnnnnnnnnnnnnnnnnnnnnnnnnnnnnnnnnnnnnnnnnnnnnnnnnnnnnnnnnnnnnnnnnnnnnnnnnnnnnnnnnnnnnnnnnnnnnnnnnnnnnnnnnnnnnnnnnnnnnnnnnnnnnnnnnnnnnnnnnnnnnnnnnnnnnnnnnnnnnnnnnnnnnnnnnnnnnnnnnnnnnnnnnnnnnnnnnnnnnnnnnnnnnnnnnnnnnnnnnnnnnnnnnnnnnnnnnnnnnnnnnnnnnnnnnnnnnnnnnnnnnnnnnnnnnnnnnnnnnnnnnnnnnnnnnnnnnnnnnnnnnnnnnnnnnnnnnnnnnnnnnnnnnnnnnnnnnnnnnnnnnnnnnnnnnnnnnnnnnnnnnnnnnnnnnnnnnnnnnnnnnnnnnnnnnnnnnnnnnnnnnnnnnnnnnnnnnnnnnnnnnnnnnnnnnnnnnnnnnnnnnnnnnnnnnnnnnnnnnnnnnnnnnnnnnnnnnnnnnnnnnnnnnnnnnnnnnnnnnnnnnnnnnnnnnnnnnnnnnnnnnnnnnnnnnnnnnnnnnnnnnnnnnnnnnnnnnnnnnnnnnnnnnnnnnnnnnnnnnnnnnnnnnnnnnnnnnnnnnnnnnnnnnnnnnnnnnnnnnnnnnnnnnnnnnnnnnnnnnnnnnnnnnnnnnnnnnnnnnnnnnnnnnnnnnnnnnnnnnnnnnnnnnnnnnnnnnnnnnnnnnnnnnnnnnnnnnnnnnnnnnnnnnnnnnnnnnnnnnnnnnnnnnnnnnnnnnnnnnnnnnnnnnnnnnnnnnnnnnnnnnnnnnnnnnnnnnnnnnnnnnnnnnnnnnnnnnnnnnnnnnnnnnnnnnnnnnnnnnnnnnnnnnnnnnnnnnnnnnnnnnnnnnnnnnnnnnnnnnnnnnnnnnnnnnnnnnnnnnnnnnnnnnnnnnnnnnnnnnnnnnnnnnnnnnnnnnnnnnnnnnnnnnnnnnnnnnnnnnnnnnnnnnnnnnnnnnnnnnnnnnnnnnnnnnnnnnnnnnnnnnnnnnnnnnnnnnnnnnnnnnnnnnnnnnnnnnnnnnnnnnnnnnnnnnnnnnnnnnnnnnnnnnnnnnnnnnnnnnnnnnnnnnnnnnnnnnnnnnnnnnnnnnnnnnnnnnnnnnnnnnnnnnnnnnnnnnnnnnnnnnnnnnnnnnnnnnnnnnnnnnnnnnnnnnnnnnnnnnnnnnnnnnnnnnnnnnnnnnnnnnnnnnnnnnnnnnnnnnnnnnnnnnnnnnnnnnnnnnnnnnnnnnnnnnnnnnnnnnnnnnnnnnnnnnnnnnnnnnnnnnnnnnnnnnnnnnnnnnnnnnnnnnnnnnnnnnnnnnnnnnnnnnnnnnnnnnnnnnnnnnnnnnnnnnnnnnnnnnnnnnnnnnnnnnnnnnnnnnnnnnnnnnnnnnnnnnnnnnnnnnnnnnnnnnnnnnnnnnnnnnnnnnnnnnnnnnnnnnnnnnnnnnnnnnnnnnnnnnnnnnnnnnnnnnnnnnnnnnnnnnnnnnnnnnnnnnnnnnnnnnnnnnnnnnnnnnnnnnnnnnnnnnnnnnnnnnnnnnnnnnnnnnnnnnnnnnnnnnnnnnnnnnnnnnnnnnnnnnnnnnnnnnnnnnnnnnnnnnnnnnnnnnnnnnnnnnnnnnnnnnnnnnnnnnnnnnnnnnnnnnnnnnnnnnnnnnnnnnnnnnnnnnnnnnnnnnnnnnnnnnnnnnnnnnnnnnnnnnnnnnnnnnnnnnnnnnnnnnnnnnnnnnnnnnnnnnnnnnnnnnnnnnnnnnnnnnnnnnnnnnnnnnnnnnnnnnnnnnnnnnnnnnnnnnnnnnnnnnnnnnnnnnnnnnnnnnnnnnnnnnnnnnnnnnnnnnnnnnnnnnnnnnnnnnnnnnnnnnnnnnnnnnnnnnnnnnnnnnnnnnnnnnnnnnnnnnnnnnnnnnnnnnnnnnnnnnnnnnnnnnnnnnnnnnnnnnnnnnnnnnnnnnnnnnnnnnnnnnnnnngaccaagaaagcggtgaagtgggtcaagcaggcaagccgcacagcggcggctcgcaaatatgcgccgtccaggcgaattcccccggccacaccacccgaggacaagtgcagtagatttccttttagtccgacagactcctagaagccacccgtgaatccctctccttcatcgcctcactgcgtcccaatcacagcattgatcccgacctgattctgaaaaataaacacggcaagttacaccacaagttcgacacctcgctgaccaacgtaatgaacagttacacactactcaccgcgccgacggtgacctggtatgcagaaggcaatgccgagctcatttcatgcctgctatcgcccgtgcaatttattggcaagcggcgtgcctctggtttttggttgcgtctcgcattggcaagttgaagccgatgaactggatggtatcgaaggaatgttcggtgaagcgctgcgtccggtgccgattgacttgttcgagggcgacacttcccacccgattgttgatgccgcctggcagcctgcctactggaatcccaatcatcggacggcctgctatgcgccagtttaaggacgtgcaatgctgagttttttcaatgaaaattttggccgtcatctgctgttgcgcaccgatatcagcttgaaattgagcagcggccgcaacgcagcatcagcaccggagacattatcggtttcgagttgcgcgcctgtgtcagcaaaaaactcaaaggccgtcacatctactttcgcacctcggattggcaacgtcggcatagctggatggaacgaaagagggaggcgcatggatttacgcttatcaccgtacattgcagcgcctcgatgcaaaccgtgcagactggcgagagacaatttacggttgatcagacggtctacaccggggttctcaaagtaacggacactgaacgttttaacgcagccctcgccaatggcatcggcattaagacccgtgctttcggctttggcatgttggttatttaacagaaggaatcagtatgaaatctatcatcattaacgccacacttaccaccatcggctccttgtctatcgccttgtctatcgccttgccggtctctgaaggtcagcagggcaacaattcccatcgtcacgcgcggcattgatgtagcgggcaacaagcaacaaaccggctacctgccagccagcacgctacgcggatttttacgcgcgccatcgtggtcgaacaaatgacgcaagccgcccccgcagggcatcactacaccctgcaaaaagcctacgccgacttgattggacaggatgccacctccgaatccagtgacgatattgatctgctcaagttgcgtcaaacccgtgaggacaacgcagtactcgatttatttggctcaggtctaggcattaaatcgcgcctgctggtgtcgcatttcttaccgacacataacgtattaccggaagtcttcaccggcgtgcgcaaggatttggacgataccgacggcgtgctggagctgatttctgaagcggatcgcgcgcgttatccggggcgttccgacgcgaacagcaaacgcgcggccgctgtaacggtggtaaaaggactggaggcaaagttgcgcaaagccaaaaaggccggtgagtcactggtcgaattggaactcgcgcggcaagcggcacaggatattgtcgaacgctacgaatccgacatgggcgagatgaccaatttttcacgcacgctgaccaactattttgccctcccggcaggcatcaaactcaaaggccgattagtgattgagaaagcgcgtgagcgtgatctggccatgatcgaactcgcgctgaatagactttcacagcgtccgattcttggcgcgcaaagcgcgcgcggctgcggggaaattgccggcgtattggatgtattagtggatggcctgcttgccaaaaaaatcaccatcggcgcatggcaagcagcgattattagcaatttttctgctgtcgaatcttgaaaataggtttaataatcaatgcataacaacagattggatcaagccaccccttgtttgggtgcttactataaataaaaatctggcattgtttcacgtgaaacaatcggtttggtcgtttacgaaaaagggaagttgaatgttccgttctgccgagcaaggtaattttgccgctatcgtcgcccggcacatcgcctcggctgacgcaccgttattgctggaaggcggcacggggatcggtaaaactcgtgcctatctttccgcgctgattcaatccggtttgcgcgtcactatcgtgctgcctacccatcagttgattgaccagatgttggcctcaaacgacttggcggcgacgcgaagcgcggccagtattgccgcctttcgtccagcgcgactatttgaaaattggtcggactatgaagctaataagcgcgccgcaatggccgcaaccgtgatgttttgcacagcggccagcgtcatcattgatcagcgtctgggcggcgaatataacggcgcaacaaaccgcgactatttgttgtttgatgaagccgatcaactaccggacatggccgcattgcaaagcgacttcaccattacacaggcggaactgacagcgttgggcataacactcagctgcgtgactgaagccttgcaagccattttggtcaaagcgccaaacgtggttgagccggaaaccagagccgccgcacgcatcattctcgatgccatcgagcaaccagcgtggtatcagtccgctggtgtaagcgatgaaggcgacattatgctgacgcacagcttgcccggtcgtttactgaaataaatcagcaattcagcccatttcgcctttgtctctgccacgctaaccgtcgccagacagctcaaggattttcaaaattcgatgggcattgcgacggtaagtaacttgtcgggcgtgatagaaccggagcgtcacggtacgcttgatttccactttatgccggtggtggttgataccgaggaatggcgcagtgccgtcatccgaatggcgaacgaagcgcctaaaccggtgctgatcgcgaccacatcacaccgtttttccagcctgctcggcgaacaattatcaggtgcaacggtaaggtcggacagcgaatccaccgctcacgccgccgtgcgcgtttcagccaatgggttttttattgcagccggtgcctgggcagggctggatacgccgttgcgctggcgttcgatcatcgtgccgcgcgtgccatacggacaaccagtggtgatagacggcgaaaccaccacccgttatttcgatgcgcacaacacggcgattcgccgtttgcgccaggtgataggccgtggtttacgttcggcggatgcaatctgtagcgtttacatcctcgatggcagggctgaaaaattaacgggctttgtaccggagcgtttttccgccgcatgggcatcacgcaaaacgtatttggagggggcgaggcaagcgctgattttgagcaggaacgaacgctatcccgccgtccgtcgtgccgcactcaattactatggtcgaaaatgtatggcgtgtagctttgtgccgcgcgtggatgcacaactggacgtgcatcatctcgacccgattgccgaaggtgttcgctgcatcaggattgaggatgtggtcgttttgtgtgcaaactgtcaccgtctggttcacgctacccatccccctttagcactcaccgatctaattgcgctactcaacgcaacaatatgattatccttaacgtaaaactcgcgcagcgacgaactgtacccctcgccctctgggagaggggggacgggggtgagggaacgggcatggcgggttttatcatcaggggtggttacttttccatgcccgttagatttttttcaattaaattcccgttagctaacggttttccctagcagcctgtcggacatgatgttaaatcatccgactttcctggcaagccggaagaatttgttcccgatttcataaaaataaccttcaggttgtcataaaaatccatttttggcgttgaa

SEQ ID NO: 291 - DNA, 11138 bp, Artificial Sequence; identical to SEQ ID NO: 282
  Synthetic Oligonucleotide
  misc_feature (1)..(7104): n is a, c, g, or t

SEQ ID NO: 292 - DNA, 11138 bp, Artificial Sequence; identical to SEQ ID NO: 282
  Synthetic Oligonucleotide
  misc_feature (1)..(7104): n is a, c, g, or t

SEQ ID NO: 293 - DNA, 11138 bp, Artificial Sequence; identical to SEQ ID NO: 282
  Synthetic Oligonucleotide
  misc_feature (1)..(7104): n is a, c, g, or t

SEQ ID NO: 294 - DNA, 11138 bp, Artificial Sequence; identical to SEQ ID NO: 282
  Synthetic Oligonucleotide
  misc_feature (1)..(7104): n is a, c, g, or t

SEQ ID NO: 295 - DNA, 11136 bp, Artificial Sequence
  Synthetic Oligonucleotide
  misc_feature (1)..(7104): n is a, c, g, or t
nnnnnnnnnnnnnnnnnnnnnnnnnnnnnnnnnnnnnnnnnnnnnnnnnnnnnnnnnnnnnnnnnnnnnnnnnnnnnnnnnnnnnnnnnnnnnnnnnnnnnnnnnnnnnnnnnnnnnnnnnnnnnnnnnnnnnnnnnnnnnnnnnnnnnnnnnnnnnnnnnnnnnnnnnnnnnnnnnnnnnnnnnnnnnnnnnnnnnnnnnnnnnnnnnnnnnnnnnnnnnnnnnnnnnnnnnnnnnnnnnnnnnnnnnnnnnnnnnnnnnnnnnnnnnnnnnnnnnnnnnnnnnnnnnnnnnnnnnnnnnnnnnnnnnnnnnnnnnnnnnnnnnnnnnnnnnnnnnnnnnnnnnnnnnnnnnnnnnnnnnnnnnnnnnnnnnnnnnnnnnnnnnnnnnnnnnnnnnnnnnnnnnnnnnnnnnnnnnnnnnnnnnnnnnnnnnnnnnnnnnnnnnnnnnnnnnnnnnnnnnnnnnnnnnnnnnnnnnnnnnnnnnnnnnnnnnnnnnnnnnnnnnnnnnnnnnnnnnnnnnnnnnnnnnnnnnnnnnnnnnnnnnnnnnnnnnnnnnnnnnnnnnnnnnnnnnnnnnnnnnnnnnnnnnnnnnnnnnnnnnnnnnnnnnnnnnnnnnnnnnnnnnnnnnnnnnnnnnnnnnnnnnnnnnnnnnnnnnnnnnnnnnnnnnnnnnnnnnnnnnnnnnnnnnnnnnnnnnnnnnnnnnnnnnnnnnnnnnnnnnnnnnnnnnnnnnnnnnnnnnnnnnnnnnnnnnnnnnnnnnnnnnnnnnnnnnnnnnnnnnnnnnnnnnnnnnnnnnnnnnnnnnnnnnnnnnnnnnnnnnnnnnnnnnnnnnnnnnnnnnnnnnnnnnnnnnnnnnnnnnnnnnnnnnnnnnnnnnnnnnnnnnnnnnnnnnnnnnnnnnnnnnnnnnnnnnnnnnnnnnnnnnnnnnnnnnnnnnnnnnnnnnnnnnnnnnnnnnnnnnnnnnnnnnnnnnnnnnnnnnnnnnnnnnnnnnnnnnnnnnnnnnnnnnnnnnnnnnnnnnnnnnnnnnnnnnnnnnnnnnnnnnnnnnnnnnnnnnnnnnnnnnnnnnnnnnnnnnnnnnnnnnnnnnnnnnnnnnnnnnnnnnnnnnnnnnnnnnnnnnnnnnnnnnnnnnnnnnnnnnnnnnnnnnnnnnnnnnnnnnnnnnnnnnnnnnnnnnnnnnnnnnnnnnnnnnnnnnnnnnnnnnnnnnnnnnnnnnnnnnnnnnnnnnnnnnnnnnnnnnnnnnnnnnnnnnnnnnnnnnnnnnnnnnnnnnnnnnnnnnnnnnnnnnnnnnnnnnnnnnnnnnnnnnnnnnnnnnnnnnnnnnnnnnnnnnnnnnnnnnnnnnnnnnnnnnnnnnnnnnnnnnnnnnnnnnnnnnnnnnnnnnnnnnnnnnnnnnnnnnnnnnnnnnnnnnnnnnnnnnnnnnnnnnnnnnnnnnnnnnnnnnnnnnnnnnnnnnnnnnnnnnnnnnnnnnnnnnnnnnnnnnnnnnnnnnnnnnnnnnnnnnnnnnnnnnnnnnnnnnnnnnnnnnnnnnnnnnnnnnnnnnnnnnnnnnnnnnnnnnnnnnnnnnnnnnnnnnnnnnnnnnnnnnnnnnnnnnnnnnnnnnnnnnnnnnnnnnnnnnnnnnnnnnnnnnnnnnnnnnnnnnnnnnnnnnnnnnnnnnnnnnnnnnnnnnnnnnnnnnnnnnnnnnnnnnnnnnnnnnnnnnnnnnnnnnnnnnnnnnnnnnnnnnnnnnnnnnnnnnnnnnnnnnnnnnnnnnnnnnnnnnnnnnnnnnnnnnnnnnnnnnnnnnnnnnnnnnnnnnnnnnnnnnnnnnnnnnnnnnnnnnnnnnnnnnnnnnnnnnnnnnnnnnnnnnnnnnnnnnnnnnnnnnnnnnnnnnnnnnnnnnnnnnnnnnnnnnnnnnnnnnnnnnnnnnnnnnnnnnnnnnnnnnnnnnnnnnnnnnnnnnnnnnnnnnnnnnnnnnnnnnnnnnnnnnnnnnnnnnnnnnnnnnnnnnnnnnnnnnnnnnnnnnnnnnnnnnnnnnnnnnnnnnnnnnnnnnnnnnnnnnnnnnnnnnnnnnnnnnnnnnnnnnnnnnnnnnnnnnnnnnnnnnnnnnnnnnnnnnnnnnnnnnnnnnnnnnnnnnnnnnnnnnnnnnnnnnnnnnnnnnnnnnnnnnnnnnnnnnnnnnnnnnnnnnnnnnnnnnnnnnnnnnnnnnnnnnnnnnnnnnnnnnnnnnnnnnnnnnnnnnnnnnnnnnnnnnnnnnnnnnnnnnnnnnnnnnnnnnnnnnnnnnnnnnnnnnnnnnnnnnnnnnnnnnnnnnnnnnnnnnnnnnnnnnnnnnnnnnnnnnnnnnnnnnnnnnnnnnnnnnnnnnnnnnnnnnnnnnnnnnnnnnnnnnnnnnnnnnnnnnnnnnnnnnnnnnnnnnnnnnnnnnnnnnnnnnnnnnnnnnnnnnnnnnnnnnnnnnnnnnnnnnnnnnnnnnnnnnnnnnnnnnnnnnnnnnnnnnnnnnnnnnnnnnnnnnnnnnnnnnnnnnnnnnnnnnnnnnnnnnnnnnnnnnnnnnnnnnnnnnnnnnnnnnnnnnnnnnnnnnnnnnnnnnnnnnnnnnnnnnnnnnnnnnnnnnnnnnnnnnnnnnnnnnnnnnnnnnnnnnnnnnnnnnnnnnnnnnnnnnnnnnnnnnnnnnnnnnnnnnnnnnnnnnnnnnnnnnnnnnnnnnnnnnnnnnnnnnnnnnnnnnnnnnnnnnnnnnnnnnnnnnnnnnnnnnnnnnnnnnnnnnnnnnnnnnnnnnnnnnnnnnnnnnnnnnnnnnnnnnnnnnnnnnnnnnnnnnnnnnnnnnnnnnnnnnnnnnnnnnnnnnnnnnnnnnnnnnnnnnnnnnnnnnnnnnnnnnnnnnnnnnnnnnnnnnnnnnnnnnnnnnnnnnnnnnnnnnnnnnnnnnnnnnnnnnnnnnnnnnnnnnnnnnnnnnnnnnnnnnnnnnnnnnnnnnnnnnnnnnnnnnnnnnnnnnnnnnnnnnnnnnnnnnnnnnnnnnnnnnnnnnnnnnnnnnnnnnnnnnnnnnnnnnnnnnnnnnnnnnnnnnnnnnnnnnnnnnnnnnnnnnnnnnnnnnnnnnnnnnnnnnnnnnnnnnnnnnnnnnnnnnnnnnnnnnnnnnnnnnnnnnnnnnnnnnnnnnnnnnnnnnnnnnnnnnnnnnnnnnnnnnnnnnnnnnnnnnnnnnnnnnnnnnnnnnnnnnnnnnnnnnnnnnnnnnnnnnnnnnnnnnnnnnnnnnnnnnnnnnnnnnnnnnnnnnnnnnnnnnnnnnnnnnnnnnnnnnnnnnnnnnnnnnnnnnnnnnnnnnnnnnnnnnnnnnnnnnnnnnnnnnnnnnnnnnnnnnnnnnnnnnnnnnnnnnnnnnnnnnnnnnnnnnnnnnnnnnnnnnnnnnnnnnnnnnnnnnnnnnnnnnnnnnnnnnnnnnnnnnnnnnnnnnnnnnnnnnnnnnnnnnnnnnnnnnnnnnnnnnnnnnnnnnnnnnnnnnnnnnnnnnnnnnnnnnnnnnnnnnnnnnnnnnnnnnnnnnnnnnnnnnnnnnnnnnnnnnnnnnnnnnnnnnnnnnnnnnnnnnnnnnnnnnnnnnnnnnnnnnnnnnnnnnnnnnnnnnnnnnnnnnnnnnnnnnnnnnnnnnnnnnnnnnnnnnnnnnnnnnnnnnnnnnnnnnnnnnnnnnnnnnnnnnnnnnnnnnnnnnnnnnnnnnnnnnnnnnnnnnnnnnnnnnnnnnnnnnnnnnnnnnnnnnnnnnnnnnnnnnnnnnnnnnnnnnnnnnnnnnnnnnnnnnnnnnnnnnnnnnnnnnnnnnnnnnnnnnnnnnnnnnnnnnnnnnnnnnnnnnnnnnnnnnnnnnnnnnnnnnnnnnnnnnnnnnnnnnnnnnnnnnnnnnnnnnnnnnnnnnnnnnnnnnnnnnnnnnnnnnnnnnnnnnnnnnnnnnnnnnnnnnnnnnnnnnnnnnnnnnnnnnnnnnnnnnnnnnnnnnnnnnnnnnnnnnnnnnnnnnnnnnnnnnnnnnnnnnnnnnnnnnnnnnnnnnnnnnnnnnnnnnnnnnnnnnnnnnnnnnnnnnnnnnnnnnnnnnnnnnnnnnnnnnnnnnnnnnnnnnnnnnnnnnnnnnnnnnnnnnnnnnnnnnnnnnnnnnnnnnnnnnnnnnnnnnnnnnnnnnnnnnnnnnnnnnnnnnnnnnnnnnnnnnnnnnnnnnnnnnnnnnnnnnnnnnnnnnnnnnnnnnnnnnnnnnnnnnnnnnnnnnnnnnnnnnnnnnnnnnnnnnnnnnnnnnnnnnnnnnnnnnnnnnnnnnnnnnnnnnnnnnnnnnnnnnnnnnnnnnnnnnnnnnnnnnnnnnnnnnnnnnnnnnnnnnnnnnnnnnnnnnnnnnnnnnnnnnnnnnnnnnnnnnnnnnnnnnnnnnnnnnnnnnnnnnnnnnnnnnnnnnnnnnnnnnnnnnnnnnnnnnnnnnnnnnnnnnnnnnnnnnnnnnnnnnnnnnnnnnnnnnnnnnnnnnnnnnnnnnnnnnnnnnnnnnnnnnnnnnnnnnnnnnnnnnnnnnnnnnnnnnnnnnnnnnnnnnnnnnnnnnnnnnnnnnnnnnnnnnnnnnnnnnnnnnnnnnnnnnnnnnnnnnnnnnnnnnnnnnnnnnnnnnnnnnnnnnnnnnnnnnnnnnnnnnnnnnnnnnnnnnnnnnnnnnnnnnnnnnnnnnnnnnnnnnnnnnnnnnnnnnnnnnnnnnnnnnnnnnnnnnnnnnnnnnnnnnnnnnnnnnnnnnnnnnnnnnnnnnnnnnnnnnnnnnnnnnnnnnnnnnnnnnnnnnnnnnnnnnnnnnnnnnnnnnnnnnnnnnnnnnnnnnnnnnnnnnnnnnnnnnnnnnnnnnnnnnnnnnnnnnnnnnnnnnnnnnnnnnnnnnnnnnnnnnnnnnnnnnnnnnnnnnnnnnnnnnnnnnnnnnnnnnnnnnnnnnnnnnnnnnnnnnnnnnnnnnnnnnnnnnnnnnnnnnnnnnnnnnnnnnnnnnnnnnnnnnnnnnnnnnnnnnnnnnnnnnnnnnnnnnnnnnnnnnnnnnnnnnnnnnnnnnnnnnnnnnnnnnnnnnnnnnnnnnnnnnnnnnnnnnnnnnnnnnnnnnnnnnnnnnnnnnnnnnnnnnnnnnnnnnnnnnnnnnnnnnnnnnnnnnnnnnnnnnnnnnnnnnnnnnnnnnnnnnnnnnnnnnnnnnnnnnnnnnnnnnnnnnnnnnnnnnnnnnnnnnnnnnnnnnnnnnnnnnnnnnnnnnnnnnnnnnnnnnnnnnnnnnnnnnnnnnnnnnnnnnnnnnnnnnnnnnnnnnnnnnnnnnnnnnnnnnnnnnnnnnnnnnnnnnnnnnnnnnnnnnnnnnnnnnnnnnnnnnnnnnnnnnnnnnnnnnnnnnnnnnnnnnnnnnnnnnnnnnnnnnnnnnnnnnnnnnnnnnnnnnnnnnnnnnnnnnnnnnnnnnnnnnnnnnnnnnnnnnnnnnnnnnnnnnnnnnnnnnnnnnnnnnnnnnnnnnnnnnnnnnnnnnnnnnnnnnnnnnnnnnnnnnnnnnnnnnnnnnnnnnnnnnnnnnnnnnnnnnnnnnnnnnnnnnnnnnnnnnnnnnnnnnnnnnnnnnnnnnnnnnnnnnnnnnnnnnnnnnnnnnnnnnnnnnnnnnnnnnnnnnnnnnnnnnnnnnnnnnnnnnnnnnnnnnnnnnnnnnnnnnnnnnnnnnnnnnnnnnnnnnnnnnnnnnnnnnnnnnnnnnnnnnnnnnnnnnnnnnnnnnnnnnnnnnnnnnnnnnnnnnnnnnnnnnnnnnnnnnnnnnnnnnnnnnnnnnnnnnnnnnnnnnnnnnnnnnnnnnnnnnnnnnnnnnnnnnnnnnnnnnnnnnnnnnnnnnnnnnnnnnnnnnnnnnnnnnnnnnnnnnnnnnnnnnnnnnnnnnnnnnnnnnnnnnnnnnnnnnnnnnnnnnnnnnnnnnnnnnnnnnnnnnnnnnnnnnnnnnnnnnnnnnnnnnnnnnnnnnnnnnnnnnnnnnnnnnnnnnnnnnnnnnnnnnnnnnnnnnnnnnnnnnnnnnnnnnnnnnnnnnnnnnnnnnnnnnnnnnnnnnnnnnnnnnnnnnnnnnnnnnnnnnnnnnnnnnnnnnnnnnnnnnnnnnnnnnnnnnnnnnnnnnnnnnnnnnnnnnnnnnnnnnnnnnnnnnnnnnnnnnnnnnnnnnnnnnnnnnnnnnnnnnnnnnnnnnnnnnnnnnnnnnnnnnnnnnnnnnnnnnnnnnnnnnnnnnnnnnnnnnnnnnnnnnnnnnnnnnnnnnnnnnnnnnnnnnnnnnnnnnnnnnnnnnnnnnnnnnnnnnnnnnnnnnnnnnnnnnnnnnnnnnnnnnnnnnnnnnnnnnnnnnnnnnnnnnnnnnnnnnnnnnnnnnnnnnnnnnnnnnnnnnnnnnnnnnnnnnnnnnnnnnnnnnnnnnnnnnnnnnnnnnnnnnnnnnnnnnnnnnnnnnnnnnnnnnnnnnnnnnnnnnnnnnnnnnnnnnnnnnnnnnnnnnnnnnnnnnnnnnnnnnnnnnnnnnnnnnnnnnnnnnnnnnnnnnnnnnnnnnnnnnnnnnnnnnnnnnnnnnnnnnnnnnnnnnnnnnnnnnnnnnnnnnnnnnnnnnnnnnnnnnnnnnnnnnnnnnnnnnnnnnnnnnnnnnnnnnnnnnnnnnnnnnnnnnnnnnnnnnnnnnnnnnnnnnnnnnnnnnnnnnnnnnnnnnnnnnnnnnnnnnnnnnnnnnnnnnnnnnnnnnnnnnnnnnnnnnnnnnnnnnnnnnnnnnnnnnnnnnnnnnnnnnnnnnnnnnnnnnnnnnnnnnnnnnnnnnnnnnnnnnnnnnnnnnnnnnnnnnnnnnnnnnnnnnnnnnnnnnnnnnnnnnnnnnnnnnnnnnnnnnnnnnnnnnnnnnnnnnnnnnnnnnnnnnnnnnnnnnnnnnnnnnnnnnnnnnnnnnnnnnnnnnnnnnnnnnnnnnnnnnnnnnnnnnnnnnnnnnnnnnnnnnnnnnnnnnnnnnnnnnnnnnnnnnnnnnnnnnnnnnnnnnnnnnnnnnnnnnnnnnnnnnnnnnnnnnnnnnnnnnnnnnnnnnnnnnnnnnnnnnnnnnnnnnnnnnnnnnnnnnnnnnnnnnnnnnnnnnnnnnnnnnnnnnnnnnnnnnnnngaccaagaaagcggtgaagtgggtcaagcaggcaagccgcacagcggcggctcgcaaatatgcgccgtccaggcgaattcccccggccacaccacccgaggacaagtgcagtagatttccttttagtccgacagactcctagaagccacccgtgaatccctctccttcatcgcctcactgcgtcccaatcacagcattgatcccgacctgattctgaaaaataaacacggcaagttacaccacaagttcgacacctcgctgaccaacgtaatgaacagttacacactactcaccgcgccgacggtgacctggtatgcagaaggcaatgccgagctcatttcatgcctgctatcgcccgtgcaatttattggcaagcggcgtgcctctggtttttggttgcgtctcgcattggcaagttgaagccgatgaactggatggtatcgaaggaatgttcggtgaagcgctgcgtccggtgccgattgacttgttcgagggcgacacttcccacccgattgttgatgccgcctggcagcctgcctactggaatcccaatcatcggacggcctgctatgcgccagtttaaggacgtgcaatgctgagttttttcaatgaaaattttggccgtcatctgctgttgcgcaccgatatcagcttgaaattgagcagcggccgcaacgcagcatcagcaccggagacattatcggtttcgagttgcgcgcctgtgtcagcaaaaaactcaaaggccgtcacatctactttcgcacctcggattggcaacgtcggcatagctggatggaacgaaagagggaggcgcatggatttacgcttatcaccgtacattgcagcgcctcgatgcaaaccgtgcagactggcgagagacaatttacggttgatcagacggtctacaccggggttctcaaagtaacggacactgaacgttttaacgcagccctcgccaatggcatcggcattaagacccgtgctttcggctttggcatgttggttatttaacagaaggaatcagtatgaaatctatcatcattaacgccacacttaccaccatcggctccttgtctatcgccttgtctatcgccttgccggtctctgaaggtcagcagggcaacaattcccatcgtcacgcgcggcattgatgtagcgggcaacaagcaacaaaccggctacctgccagccagcacgctacgcggatttttacgcgcgccatcgtggtcgaacaaatgacgcaagccgcccccgcagggcatcactacaccctgcaaaaagcctacgccgacttgattggacaggatgccacctccgaatccagtgacgatattgatctgctcaagttgcgtcaaacccgtgaggacaacgcagtactcgatttatttggctcaggtctaggcattaaatcgcgcctgctggtgtcgcatttcttaccgacacataacgtattaccggaagtcttcaccggcgtgcgcaaggatttggacgataccgacggcgtgctggagctgatttctgaagcggatcgcgcgcgttatccggggcgttccgacgcgaacagcaaacgcgcggccgctgtaacggtggtaaaaggactggaggcaaagttgcgcaaagccaaaaaggccggtgagtcactggtcgaattggaactcgcgcggcaagcggcacaggatattgtcgaacgctacgaatccgacatgggcgagatgaccaatttttcacgcacgctgaccaactattttgccctcccggcaggcatcaaactcaaaggccgattagtgattgagaaagcgcgtgagcgtgatctggccatgatcgaactcgcgctgaatagactttcacagcgtccgattcttggcgcgcaaagcgcgcgcggctgcggggaaattgccggcgtattggatgtattagtggatggcctgcttgccaaaaaaatcaccatctgcgcatggcaagcagcgattattagcaatttttctgctgtcgaatcttgaaaataggtttaataatcaatgcataacaacagattggatcaagccaccccttgtttgggtgcttactataaataaaaatctggcattgtttcacgtgaaacaatcggtttggtcgtttacgaaaaagggaagttgaatgttccgttctgccgagcaaggtaattttgccgctatcgtcgcccggcacatcgcctcggctgacgcaccgttattgctggaaggcggcacggggatcggtaaaactcgtgcctatctttccgcgctgattcaatccggtttgcgcgtcactatcgtgctgcctacccatcagttgattgaccagatgttggcctcaaacgacttggcggcgacgcgaagcgcggccagtattgccgcctttcgtccagcgcgactatttgaaaattggtcggactatgaagctaataagcgcgccgcaatggccgcaaccgtgatgttttgcacagcggccagcgtcatcattgatcagcgtctgggcggcgaatataacggcgcaacaaaccgcgactatttgttgtttgatgaagccgatcaactaccggacatggccgcattgcaaagcgacttcaccattacacaggcggaactgacagcgttgggcataacactcagctgcgtgactgaagccttgcaagccattttggtcaaagcgccaaacgtggttgagccggaaaccagagccgccgcacgcatcattctcgatgccatcgagcaaccagcgtggtatcagtccgctggtgtaagcgatgaaggcgacattatgctgacgcacagcttgcccggtcgtttactgaaataaatcagcaattcagcccatttcgcctttgtctctgccacgctaaccgtcgccagacagctcaaggattttcaaaattcgatgggcattgcgacggtaagtaacttgtcgggcgtgatagaaccggagcgtcacggtacgcttgatttccactttatgccggtggtggttgataccgaggaatggcgcagtgccgtcatccgaatggcgaacgaagcgcctaaaccggtgctgatcgcgaccacatcacaccgtttttccagcctgctcggcgaacaattatcaggtgcaacggtaaggtcggacagcgaatccaccgctcacgccgccgtgcgcgtttcagccaatgggttttttattgcagccggtgcctgggcagggctggatacgccgttgcgctggcgttcgatcatcgtgccgcgcgtgccatacggacaaccagtggtgatagacggcgaaaccaccacccgttatttcgatgcgcacaacacggcgattcgccgtttgcgccaggtgataggccgtggtttacgttcggcggatgcaatctgtagcgtttacatcctcgatggcagggctgaaaaattaacgggctttgtaccggagcgtttttccgccgcatgggcatcacgcaaaacgtatttggagggggcgaggcaagcgctgattttgagcaggaacgaacgctatcccgccgtccgtcgtgccgcactcaattactatggtcgaaaatgtatggcgtgtagctttgtgccgcgcgtggatgcacaactggacgtgcatcatctcgacccgattgccgaaggtgttcgctgcatcaggattgaggatgtggtcgttttgtgtgcaaactgtcaccgtctggttcacgctacccatccccctttagcactcaccgatctaattgcgctactcaacgcaacaatatgattatccttaacgtaaaactcgcgcagcgacgaactgtacccctcgccctctgggagaggggggacgggggtgagggaacgggcatggcgggttttatcatcaggggtggttacttttccatgcccgttagatttttttcaattaaattcccgttagctaacggttttccctagcagcctgtcggacatgatgttaaatcatccgactttcctggcaagccggaagaatttgttcccgatttcataaaaataaccttcaggttgtcataaaaatccatttttggcgttg

SEQ ID NO: 296 - DNA, 11136 bp, Artificial Sequence; identical to SEQ ID NO: 295
  Synthetic Oligonucleotide
  misc_feature (1)..(7104): n is a, c, g, or t

SEQ ID NO: 297 - DNA, 11136 bp, Artificial Sequence; identical to SEQ ID NO: 295
  Synthetic Oligonucleotide
  misc_feature (1)..(7104): n is a, c, g, or t

SEQ ID NO: 298 - DNA, 11136 bp, Artificial Sequence; identical to SEQ ID NO: 295
  Synthetic Oligonucleotide
  misc_feature (1)..(7104): n is a, c, g, or t

SEQ ID NO: 299 - DNA, 11135 bp, Artificial Sequence
  Synthetic Oligonucleotide
  misc_feature (1)..(7101): n is a, c, g, or t
nnnnnnnnnnnnnnnnnnnnnnnnnnnnnnnnnnnnnnnnnnnnnnnnnnnnnnnnnnnnnnnnnnnnnnnnnnnnnnnnnnnnnnnnnnnnnnnnnnnnnnnnnnnnnnnnnnnnnnnnnnnnnnnnnnnnnnnnnnnnnnnnnnnnnnnnnnnnnnnnnnnnnnnnnnnnnnnnnnnnnnnnnnnnnnnnnnnnnnnnnnnnnnnnnnnnnnnnnnnnnnnnnnnnnnnnnnnnnnnnnnnnnnnnnnnnnnnnnnnnnnnnnnnnnnnnnnnnnnnnnnnnnnnnnnnnnnnnnnnnnnnnnnnnnnnnnnnnnnnnnnnnnnnnnnnnnnnnnnnnnnnnnnnnnnnnnnnnnnnnnnnnnnnnnnnnnnnnnnnnnnnnnnnnnnnnnnnnnnnnnnnnnnnnnnnnnnnnnnnnnnnnnnnnnnnnnnnnnnnnnnnnnnnnnnnnnnnnnnnnnnnnnnnnnnnnnnnnnnnnnnnnnnnnnnnnnnnnnnnnnnnnnnnnnnnnnnnnnnnnnnnnnnnnnnnnnnnnnnnnnnnnnnnnnnnnnnnnnnnnnnnnnnnnnnnnnnnnnnnnnnnnnnnnnnnnnnnnnnnnnnnnnnnnnnnnnnnnnnnnnnnnnnnnnnnnnnnnnnnnnnnnnnnnnnnnnnnnnnnnnnnnnnnnnnnnnnnnnnnnnnnnnnnnnnnnnnnnnnnnnnnnnnnnnnnnnnnnnnnnnnnnnnnnnnnnnnnnnnnnnnnnnnnnnnnnnnnnnnnnnnnnnnnnnnnnnnnnnnnnnnnnnnnnnnnnnnnnnnnnnnnnnnnnnnnnnnnnnnnnnnnnnnnnnnnnnnnnnnnnnnnnnnnnnnnnnnnnnnnnnnnnnnnnnnnnnnnnnnnnnnnnnnnnnnnnnnnnnnnnnnnnnnnnnnnnnnnnnnnnnnnnnnnnnnnnnnnnnnnnnnnnnnnnnnnnnnnnnnnnnnnnnnnnnnnnnnnnnnnnnnnnnnnnnnnnnnnnnnnnnnnnnnnnnnnnnnnnnnnnnnnnnnnnnnnnnnnnnnnnnnnnnnnnnnnnnnnnnnnnnnnnnnnnnnnnnnnnnnnnnnnnnnnnnnnnnnnnnnnnnnnnnnnnnnnnnnnnnnnnnnnnnnnnnnnnnnnnnnnnnnnnnnnnnnnnnnnnnnnnnnnnnnnnnnnnnnnnnnnnnnnnnnnnnnnnnnnnnnnnnnnnnnnnnnnnnnnnnnnnnnnnnnnnnnnnnnnnnnnnnnnnnnnnnnnnnnnnnnnnnnnnnnnnnnnnnnnnnnnnnnnnnnnnnnnnnnnnnnnnnnnnnnnnnnnnnnnnnnnnnnnnnnnnnnnnnnnnnnnnnnnnnnnnnnnnnnnnnnnnnnnnnnnnnnnnnnnnnnnnnnnnnnnnnnnnnnnnnnnnnnnnnnnnnnnnnnnnnnnnnnnnnnnnnnnnnnnnnnnnnnnnnnnnnnnnnnnnnnnnnnnnnnnnnnnnnnnnnnnnnnnnnnnnnnnnnnnnnnnnnnnnnnnnnnnnnnnnnnnnnnnnnnnnnnnnnnnnnnnnnnnnnnnnnnnnnnnnnnnnnnnnnnnnnnnnnnnnnnnnnnnnnnnnnnnnnnnnnnnnnnnnnnnnnnnnnnnnnnnnnnnnnnnnnnnnnnnnnnnnnnnnnnnnnnnnnnnnnnnnnnnnnnnnnnnnnnnnnnnnnnnnnnnnnnnnnnnnnnnnnnnnnnnnnnnnnnnnnnnnnnnnnnnnnnnnnnnnnnnnnnnnnnnnnnnnnnnnnnnnnnnnnnnnnnnnnnnnnnnnnnnnnnnnnnnnnnnnnnnnnnnnnnnnnnnnnnnnnnnnnnnnnnnnnnnnnnnnnnnnnnnnnnnnnnnnnnnnnnnnnnnnnnnnnnnnnnnnnnnnnnnnnnnnnnnnnnnnnnnnnnnnnnnnnnnnnnnnnnnnnnnnnnnnnnnnnnnnnnnnnnnnnnnnnnnnnnnnnnnnnnnnnnnnnnnnnnnnnnnnnnnnnnnnnnnnnnnnnnnnnnnnnnnnnnnnnnnnnnnnnnnnnnnnnnnnnnnnnnnnnnnnnnnnnnnnnnnnnnnnnnnnnnnnnnnnnnnnnnnnnnnnnnnnnnnnnnnnnnnnnnnnnnnnnnnnnnnnnnnnnnnnnnnnnnnnnnnnnnnnnnnnnnnnnnnnnnnnnnnnnnnnnnnnnnnnnnnnnnnnnnnnnnnnnnnnnnnnnnnnnnnnnnnnnnnnnnnnnnnnnnnnnnnnnnnnnnnnnnnnnnnnnnnnnnnnnnnnnnnnnnnnnnnnnnnnnnnnnnnnnnnnnnnnnnnnnnnnnnnnnnnnnnnnnnnnnnnnnnnnnnnnnnnnnnnnnnnnnnnnnnnnnnnnnnnnnnnnnnnnnnnnnnnnnnnnnnnnnnnnnnnnnnnnnnnnnnnnnnnnnnnnnnnnnnnnnnnnnnnnnnnnnnnnnnnnnnnnnnnnnnnnnnnnnnnnnnnnnnnnnnnnnnnnnnnnnnnnnnnnnnnnnnnnnnnnnnnnnnnnnnnnnnnnnnnnnnnnnnnnnnnnnnnnnnnnnnnnnnnnnnnnnnnnnnnnnnnnnnnnnnnnnnnnnnnnnnnnnnnnnnnnnnnnnnnnnnnnnnnnnnnnnnnnnnnnnnnnnnnnnnnnnnnnnnnnnnnnnnnnnnnnnnnnnnnnnnnnnnnnnnnnnnnnnnnnnnnnnnnnnnnnnnnnnnnnnnnnnnnnnnnnnnnnnnnnnnnnnnnnnnnnnnnnnnnnnnnnnnnnnnnnnnnnnnnnnnnnnnnnnnnnnnnnnnnnnnnnnnnnnnnnnnnnnnnnnnnnnnnnnnnnnnnnnnnnnnnnnnnnnnnnnnnnnnnnnnnnnnnnnnnnnnnnnnnnnnnnnnnnnnnnnnnnnnnnnnnnnnnnnnnnnnnnnnnnnnnnnnnnnnnnnnnnnnnnnnnnnnnnnnnnnnnnnnnnnnnnnnnnnnnnnnnnnnnnnnnnnnnnnnnnnnnnnnnnnnnnnnnnnnnnnnnnnnnnnnnnnnnnnnnnnnnnnnnnnnnnnnnnnnnnnnnnnnnnnnnnnnnnnnnnnnnnnnnnnnnnnnnnnnnnnnnnnnnnnnnnnnnnnnnnnnnnnnnnnnnnnnnnnnnnnnnnnnnnnnnnnnnnnnnnnnnnnnnnnnnnnnnnnnnnnnnnnnnnnnnnnnnnnnnnnnnnnnnnnnnnnnnnnnnnnnnnnnnnnnnnnnnnnnnnnnnnnnnnnnnnnnnnnnnnnnnnnnnnnnnnnnnnnnnnnnnnnnnnnnnnnnnnnnnnnnnnnnnnnnnnnnnnnnnnnnnnnnnnnnnnnnnnnnnnnnnnnnnnnnnnnnnnnnnnnnnnnnnnnnnnnnnnnnnnnnnnnnnnnnnnnnnnnnnnnnnnnnnnnnnnnnnnnnnnnnnnnnnnnnnnnnnnnnnnnnnnnnnnnnnnnnnnnnnnnnnnnnnnnnnnnnnnnnnnnnnnnnnnnnnnnnnnnnnnnnnnnnnnnnnnnnnnnnnnnnnnnnnnnnnnnnnnnnnnnnnnnnnnnnnnnnnnnnnnnnnnnnnnnnnnnnnnnnnnnnnnnnnnnnnnnnnnnnnnnnnnnnnnnnnnnnnnnnnnnnnnnnnnnnnnnnnnnnnnnnnnnnnnnnnnnnnnnnnnnnnnnnnnnnnnnnnnnnnnnnnnnnnnnnnnnnnnnnnnnnnnnnnnnnnnnnnnnnnnnnnnnnnnnnnnnnnnnnnnnnnnnnnnnnnnnnnnnnnnnnnnnnnnnnnnnnnnnnnnnnnnnnnnnnnnnnnnnnnnnnnnnnnnnnnnnnnnnnnnnnnnnnnnnnnnnnnnnnnnnnnnnnnnnnnnnnnnnnnnnnnnnnnnnnnnnnnnnnnnnnnnnnnnnnnnnnnnnnnnnnnnnnnnnnnnnnnnnnnnnnnnnnnnnnnnnnnnnnnnnnnnnnnnnnnnnnnnnnnnnnnnnnnnnnnnnnnnnnnnnnnnnnnnnnnnnnnnnnnnnnnnnnnnnnnnnnnnnnnnnnnnnnnnnnnnnnnnnnnnnnnnnnnnnnnnnnnnnnnnnnnnnnnnnnnnnnnnnnnnnnnnnnnnnnnnnnnnnnnnnnnnnnnnnnnnnnnnnnnnnnnnnnnnnnnnnnnnnnnnnnnnnnnnnnnnnnnnnnnnnnnnnnnnnnnnnnnnnnnnnnnnnnnnnnnnnnnnnnnnnnnnnnnnnnnnnnnnnnnnnnnnnnnnnnnnnnnnnnnnnnnnnnnnnnnnnnnnnnnnnnnnnnnnnnnnnnnnnnnnnnnnnnnnnnnnnnnnnnnnnnnnnnnnnnnnnnnnnnnnnnnnnnnnnnnnnnnnnnnnnnnnnnnnnnnnnnnnnnnnnnnnnnnnnnnnnnnnnnnnnnnnnnnnnnnnnnnnnnnnnnnnnnnnnnnnnnnnnnnnnnnnnnnnnnnnnnnnnnnnnnnnnnnnnnnnnnnnnnnnnnnnnnnnnnnnnnnnnnnnnnnnnnnnnnnnnnnnnnnnnnnnnnnnnnnnnnnnnnnnnnnnnnnnnnnnnnnnnnnnnnnnnnnnnnnnnnnnnnnnnnnnnnnnnnnnnnnnnnnnnnnnnnnnnnnnnnnnnnnnnnnnnnnnnnnnnnnnnnnnnnnnnnnnnnnnnnnnnnnnnnnnnnnnnnnnnnnnnnnnnnnnnnnnnnnnnnnnnnnnnnnnnnnnnnnnnnnnnnnnnnnnnnnnnnnnnnnnnnnnnnnnnnnnnnnnnnnnnnnnnnnnnnnnnnnnnnnnnnnnnnnnnnnnnnnnnnnnnnnnnnnnnnnnnnnnnnnnnnnnnnnnnnnnnnnnnnnnnnnnnnnnnnnnnnnnnnnnnnnnnnnnnnnnnnnnnnnnnnnnnnnnnnnnnnnnnnnnnnnnnnnnnnnnnnnnnnnnnnnnnnnnnnnnnnnnnnnnnnnnnnnnnnnnnnnnnnnnnnnnnnnnnnnnnnnnnnnnnnnnnnnnnnnnnnnnnnnnnnnnnnnnnnnnnnnnnnnnnnnnnnnnnnnnnnnnnnnnnnnnnnnnnnnnnnnnnnnnnnnnnnnnnnnnnnnnnnnnnnnnnnnnnnnnnnnnnnnnnnnnnnnnnnnnnnnnnnnnnnnnnnnnnnnnnnnnnnnnnnnnnnnnnnnnnnnnnnnnnnnnnnnnnnnnnnnnnnnnnnnnnnnnnnnnnnnnnnnnnnnnnnnnnnnnnnnnnnnnnnnnnnnnnnnnnnnnnnnnnnnnnnnnnnnnnnnnnnnnnnnnnnnnnnnnnnnnnnnnnnnnnnnnnnnnnnnnnnnnnnnnnnnnnnnnnnnnnnnnnnnnnnnnnnnnnnnnnnnnnnnnnnnnnnnnnnnnnnnnnnnnnnnnnnnnnnnnnnnnnnnnnnnnnnnnnnnnnnnnnnnnnnnnnnnnnnnnnnnnnnnnnnnnnnnnnnnnnnnnnnnnnnnnnnnnnnnnnnnnnnnnnnnnnnnnnnnnnnnnnnnnnnnnnnnnnnnnnnnnnnnnnnnnnnnnnnnnnnnnnnnnnnnnnnnnnnnnnnnnnnnnnnnnnnnnnnnnnnnnnnnnnnnnnnnnnnnnnnnnnnnnnnnnnnnnnnnnnnnnnnnnnnnnnnnnnnnnnnnnnnnnnnnnnnnnnnnnnnnnnnnnnnnnnnnnnnnnnnnnnnnnnnnnnnnnnnnnnnnnnnnnnnnnnnnnnnnnnnnnnnnnnnnnnnnnnnnnnnnnnnnnnnnnnnnnnnnnnnnnnnnnnnnnnnnnnnnnnnnnnnnnnnnnnnnnnnnnnnnnnnnnnnnnnnnnnnnnnnnnnnnnnnnnnnnnnnnnnnnnnnnnnnnnnnnnnnnnnnnnnnnnnnnnnnnnnnnnnnnnnnnnnnnnnnnnnnnnnnnnnnnnnnnnnnnnnnnnnnnnnnnnnnnnnnnnnnnnnnnnnnnnnnnnnnnnnnnnnnnnnnnnnnnnnnnnnnnnnnnnnnnnnnnnnnnnnnnnnnnnnnnnnnnnnnnnnnnnnnnnnnnnnnnnnnnnnnnnnnnnnnnnnnnnnnnnnnnnnnnnnnnnnnnnnnnnnnnnnnnnnnnnnnnnnnnnnnnnnnnnnnnnnnnnnnnnnnnnnnnnnnnnnnnnnnnnnnnnnnnnnnnnnnnnnnnnnnnnnnnnnnnnnnnnnnnnnnnnnnnnnnnnnnnnnnnnnnnnnnnnnnnnnnnnnnnnnnnnnnnnnnnnnnnnnnnnnnnnnnnnnnnnnnnnnnnnnnnnnnnnnnnnnnnnnnnnnnnnnnnnnnnnnnnnnnnnnnnnnnnnnnnnnnnnnnnnnnnnnnnnnnnnnnnnnnnnnnnnnnnnnnnnnnnnnnnnnnnnnnnnnnnnnnnnnnnnnnnnnnnnnnnnnnnnnnnnnnnnnnnnnnnnnnnnnnnnnnnnnnnnnnnnnnnnnnnnnnnnnnnnnnnnnnnnnnnnnnnnnnnnnnnnnnnnnnnnnnnnnnnnnnnnnnnnnnnnnnnnnnnnnnnnnnnnnnnnnnnnnnnnnnnnnnnnnnnnnnnnnnnnnnnnnnnnnnnnnnnnnnnnnnnnnnnnnnnnnnnnnnnnnnnnnnnnnnnnnnnnnnnnnnnnnnnnnnnnnnnnnnnnnnnnnnnnnnnnnnnnnnnnnnnnnnnnnnnnnnnnnnnnnnnnnnnnnnnnnnnnnnnnnnnnnnnnnnnnnnnnnnnnnnnnnnnnnnnnnnnnnnnnnnnnnnnnnnnnnnnnnnnnnnnnnnnnnnnnnnnnnnnnnnnnnnnnnnnnnnnnnnnnnnnnnnnnnnnnnnnnnnnnnnnnnnnnnnnnnnnnnnnnnnnnnnnnnnnnnnnnnnnnnnnnnnnnnnnnnnnnnnnnnnnnnnnnnnnnnnnnnnnnnnnnnnnnnnnnnnnnnnnnnnnnnnnnnnnnnnnnnnnnnnnnnnnnnnnnnnnnnnnnnnnnnnnnnnnnnnnnnnnnnnnnnnnnnnnnnnnnnnnnnnnnnnnnnnnnnnnnnnnnnnnnnnnnnnnnnnnnnnnnnnnnnnnnnnnnnnnnnnnnnnnnnnnnnnnnnnnnnnnnnnnnnnnnnnnnnnnnnnnnnnnnnnnnnnnnnnnnnnnnnnnnnnnnnnnnnnnnnnnnnnnnnnnnnnnnnnnnnnnnnnnnnnnnnnnnnnnnnnnnnnnnnnnnnnnnnnnnnnnnnattgaccaagaaagcggtgaagtgggtcaagcaggcaagccgcacagcggcggctcgcaaatatgcgccgtccaggcgaattcccccggccacaccacccgaggacaagtgcagtagatttccttttagtccgacagactcctagaagccacccgtgaatccctctccttcatcgcctcactgcgtcccaatcacagcattgatcccgacctgattctgaaaaataaacacggcaagttacaccacaagttcgacacctcgctgaccaacgtaatgaacagttacacactactcaccgcgccgacggtgacctggtatgcagaaggcaatgccgagctcatttcatgcctgctatcgcccgtgcaatttattggcaagcggcgtgcctctggtttttggttgcgtctcgcattggcaagttgaagccgatgaactggatggtatcgaaggaatgttcggtgaagcgctgcgtccggtgccgattgacttgttcgagggcgacacttcccacccgattgttgatgccgcctggcagcctgcctactggaatcccaatcatcggacggcctgctatgcgccagtttaaggacgtgcaatgctgagttttttcaatgaaaattttggccgtcatctgctgttgcgcaccgatatcagcttgaaattgagcagcggccgcaacgcagcatcagcaccggagacattatcggtttcgagttgcgcgcctgtgtcagcaaaaaactcaaaggccgtcacatctactttcgcacctcggattggcaacgtcggcatagctggatggaacgaaagagggaggcgcatggatttacgcttatcaccgtacattgcagcgcctcgatgcaaaccgtgcagactggcgagagacaatttacggttgatcagacggtctacaccggggttctcaaagtaacggacactgaacgttttaacgcagccctcgccaatggcatcggcattaagacccgtgctttcggctttggcatgttggttatttaacagaaggaatcagtatgaaatctatcatcattaacgccacacttaccaccatcggctccttgtctatcgccttgtctatcgccttgccggtctctgaaggtcagcagggcaacaattcccatcgtcacgcgcggcattgatgtagcgggcaacaagcaacaaaccggctacctgccagccagcacgctacgcggatttttacgcgcgccatcgtggtcgaacaaatgacgcaagccgcccccgcagggcatcactacaccctgcaaaaagcctacgccgacttgattggacaggatgccacctccgaatccagtgacgatattgatctgctcaagttgcgtcaaacccgtgaggacaacgcagtactcgatttatttggctcaggtctaggcattaaatcgcgcctgctggtgtcgcatttcttaccgacacataacgtattaccggaagtcttcaccggcgtgcgcaaggatttggacgataccgacggcgtgctggagctgatttctgaagcggatcgcgcgcgttatccggggcgttccgacgcgaacagcaaacgcgcggccgctgtaacggtggtaaaaggactggaggcaaagttgcgcaaagccaaaaaggccggtgagtcactggtcgaattggaactcgcgcggcaagcggcacaggatattgtcgaacgctacgaatccgacatgggcgagatgaccaatttttcacgcacgctgaccaactattttgccctcccggcaggcatcaaactcaaaggccgattagtgattgagaaagcgcgtgagcgtgatctggccatgatcgaactcgcgctgaatagactttcacagcgtccgattcttggcgcgcaaagcgcgcgcggctgcggggaaattgccggcgtattggatgtattagtggatggcctgcttgccaaaaaaatcaccatctgcgcatggcaagcagcgattattagcaatttttctgctgtcgaatcttgaaaataggtttaataatcaatgcataacaacagattggatcaagccaccccttgtttgggtgcttactataaataaaaatctggcattgtttcacgtgaaacaatcggtttggtcgtttacgaaaaagggaagttgaatgttccgttctgccgagcaaggtaattttgccgctatcgtcgcccggcacatcgcctcggctgacgcaccgttattgctggaaggcggcacggggatcggtaaaactcgtgcctatctttccgcgctgattcaatccggtttgcgcgtcactatcgtgctgcctacccatcagttgattgaccagatgttggcctcaaacgacttggcggcgacgcgaagcgcggccagtattgccgcctttcgtccagcgcgactatttgaaaattggtcggactatgaagctaataagcgcgccgcaatggccgcaaccgtgatgttttgcacagcggccagcgtcatcattgatcagcgtctgggcggcgaatataacggcgcaacaaaccgcgactatttgttgtttgatgaagccgatcaactaccggacatggccgcattgcaaagcgacttcaccattacacaggcggaactgacagcgttgggcataacactcagctgcgtgactgaagccttgcaagccattttggtcaaagcgccaaacgtggttgagccggaaaccagagccgccgcacgcatcattctcgatgccatcgagcaaccagcgtggtatcagtccgctggtgtaagcgatgaaggcgacattatgctgacgcacagcttgcccggtcgtttactgaaataaatcagcaattcagcccatttcgcctttgtctctgccacgctaaccgtcgccagacagctcaaggattttcaaaattcgatgggcattgcgacggtaagtaacttgtcgggcgtgatagaaccggagcgtcacggtacgcttgatttccactttatgccggtggtggttgataccgaggaatggcgcagtgccgtcatccgaatggcgaacgaagcgcctaaaccggtgctgatcgcgaccacatcacaccgtttttccagcctgctcggcgaacaattatcaggtgcaacggtaaggtcggacagcgaatccaccgctcacgccgccgtgcgcgtttcagccaatgggttttttattgcagccggtgcctgggcagggctggatacgccgttgcgctggcgttcgatcatcgtgccgcgcgtgccatacggacaaccagtggtgatagacggcgaaaccaccacccgttatttcgatgcgcacaacacggcgattcgccgtttgcgccaggtgataggccgtggtttacgttcggcggatgcaatctgtagcgtttacatcctcgatggcagggctgaaaaattaacgggctttgtaccggagcgtttttccgccgcatgggcatcacgcaaaacgtatttggagggggcgaggcaagcgctgattttgagcaggaacgaacgctatcccgccgtccgtcgtgccgcactcaattactatggtcgaaaatgtatggcgtgtagctttgtgccgcgcgtggatgcacaactggacgtgcatcatctcgacccgattgccgaaggtgttcgctgcatcaggattgaggatgtggtcgttttgtgtgcaaactgtcaccgtctggttcacgctacccatccccctttagcactcaccgatctaattgcgctactcaacgcaacaatatgattatccttaacgtaaaactcgcgcagcgacgaactgtacccctcgccctctgggagaggggggacgggggtgagggaacgggcatggcgggttttatcatcaggggtggttacttttccatgcccgttagatttttttcaattaaattcccgttagctaacggttttccctagcagcctgtcggacatgatgttaaatcatccgactttcctggcaagccggaagaatttgttcccgatttcataaaaataaccttcaggttgtcataaaaatccatttttggcgtt

SEQ ID NO: 300 - DNA, 11127 bp, Artificial Sequence
  Synthetic Oligonucleotide
  misc_feature (1)..(7129): n is a, c, g, or t
nnnnnnnnnnnnnnnnnnnnnnnnnnnnnnnnnnnnnnnnnnnnnnnnnnnnnnnnnnnnnnnnnnnnnnnnnnnnnnnnnnnnnnnnnnnnnnnnnnnnnnnnnnnnnnnnnnnnnnnnnnnnnnnnnnnnnnnnnnnnnnnnnnnnnnnnnnnnnnnnnnnnnnnnnnnnnnnnnnnnnnnnnnnnnnnnnnnnnnnnnnnnnnnnnnnnnnnnnnnnnnnnnnnnnnnnnnnnnnnnnnnnnnnnnnnnnnnnnnnnnnnnnnnnnnnnnnnnnnnnnnnnnnnnnnnnnnnnnnnnnnnnnnnnnnnnnnnnnnnnnnnnnnnnnnnnnnnnnnnnnnnnnnnnnnnnnnnnnnnnnnnnnnnnnnnnnnnnnnnnnnnnnnnnnnnnnnnnnnnnnnnnnnnnnnnnnnnnnnnnnnnnnnnnnnnnnnnnnnnnnnnnnnnnnnnnnnnnnnnnnnnnnnnnnnnnnnnnnnnnnnnnnnnnnnnnnnnnnnnnnnnnnnnnnnnnnnnnnnnnnnnnnnnnnnnnnnnnnnnnnnnnnnnnnnnnnnnnnnnnnnnnnnnnnnnnnnnnnnnnnnnnnnnnnnnnnnnnnnnnnnnnnnnnnnnnnnnnnnnnnnnnnnnnnnnnnnnnnnnnnnnnnnnnnnnnnnnnnnnnnnnnnnnnnnnnnnnnnnnnnnnnnnnnnnnnnnnnnnnnnnnnnnnnnnnnnnnnnnnnnnnnnnnnnnnnnnnnnnnnnnnnnnnnnnnnnnnnnnnnnnnnnnnnnnnnnnnnnnnnnnnnnnnnnnnnnnnnnnnnnnnnnnnnnnnnnnnnnnnnnnnnnnnnnnnnnnnnnnnnnnnnnnnnnnnnnnnnnnnnnnnnnnnnnnnnnnnnnnnnnnnnnnnnnnnnnnnnnnnnnnnnnnnnnnnnnnnnnnnnnnnnnnnnnnnnnnnnnnnnnnnnnnnnnnnnnnnnnnnnnnnnnnnnnnnnnnnnnnnnnnnnnnnnnnnnnnnnnnnnnnnnnnnnnnnnnnnnnnnnnnnnnnnnnnnnnnnnnnnnnnnnnnnnnnnnnnnnnnnnnnnnnnnnnnnnnnnnnnnnnnnnnnnnnnnnnnnnnnnnnnnnnnnnnnnnnnnnnnnnnnnnnnnnnnnnnnnnnnnnnnnnnnnnnnnnnnnnnnnnnnnnnnnnnnnnnnnnnnnnnnnnnnnnnnnnnnnnnnnnnnnnnnnnnnnnnnnnnnnnnnnnnnnnnnnnnnnnnnnnnnnnnnnnnnnnnnnnnnnnnnnnnnnnnnnnnnnnnnnnnnnnnnnnnnnnnnnnnnnnnnnnnnnnnnnnnnnnnnnnnnnnnnnnnnnnnnnnnnnnnnnnnnnnnnnnnnnnnnnnnnnnnnnnnnnnnnnnnnnnnnnnnnnnnnnnnnnnnnnnnnnnnnnnnnnnnnnnnnnnnnnnnnnnnnnnnnnnnnnnnnnnnnnnnnnnnnnnnnnnnnnnnnnnnnnnnnnnnnnnnnnnnnnnnnnnnnnnnnnnnnnnnnnnnnnnnnnnnnnnnnnnnnnnnnnnnnnnnnnnnnnnnnnnnnnnnnnnnnnnnnnnnnnnnnnnnnnnnnnnnnnnnnnnnnnnnnnnnnnnnnnnnnnnnnnnnnnnnnnnnnnnnnnnnnnnnnnnnnnnnnnnnnnnnnnnnnnnnnnnnnnnnnnnnnnnnnnnnnnnnnnnnnnnnnnnnnnnnnnnnnnnnnnnnnnnnnnnnnnnnnnnnnnnnnnnnnnnnnnnnnnnnnnnnnnnnnnnnnnnnnnnnnnnnnnnnnnnnnnnnnnnnnnnnnnnnnnnnnnnnnnnnnnnnnnnnnnnnnnnnnnnnnnnnnnnnnnnnnnnnnnnnnnnnnnnnnnnnnnnnnnnnnnnnnnnnnnnnnnnnnnnnnnnnnnnnnnnnnnnnnnnnnnnnnnnnnnnnnnnnnnnnnnnnnnnnnnnnnnnnnnnnnnnnnnnnnnnnnnnnnnnnnnnnnnnnnnnnnnnnnnnnnnnnnnnnnnnnnnnnnnnnnnnnnnnnnnnnnnnnnnnnnnnnnnnnnnnnnnnnnnnnnnnnnnnnnnnnnnnnnnnnnnnnnnnnnnnnnnnnnnnnnnnnnnnnnnnnnnnnnnnnnnnnnnnnnnnnnnnnnnnnnnnnnnnnnnnnnnnnnnnnnnnnnnnnnnnnnnnnnnnnnnnnnnnnnnnnnnnnnnnnnnnnnnnnnnnnnnnnnnnnnnnnnnnnnnnnnnnnnnnnnnnnnnnnnnnnnnnnnnnnnnnnnnnnnnnnnnnnnnnnnnnnnnnnnnnnnnnnnnnnnnnnnnnnnnnnnnnnnnnnnnnnnnnnnnnnnnnnnnnnnnnnnnnnnnnnnnnnnnnnnnnnnnnnnnnnnnnnnnnnnnnnnnnnnnnnnnnnnnnnnnnnnnnnnnnnnnnnnnnnnnnnnnnnnnnnnnnnnnnnnnnnnnnnnnnnnnnnnnnnnnnnnnnnnnnnnnnnnnnnnnnnnnnnnnnnnnnnnnnnnnnnnnnnnnnnnnnnnnnnnnnnnnnnnnnnnnnnnnnnnnnnnnnnnnnnnnnnnnnnnnnnnnnnnnnnnnnnnnnnnnnnnnnnnnnnnnnnnnnnnnnnnnnnnnnnnnnnnnnnnnnnnnnnnnnnnnnnnnnnnnnnnnnnnnnnnnnnnnnnnnnnnnnnnnnnnnnnnnnnnnnnnnnnnnnnnnnnnnnnnnnnnnnnnnnnnnnnnnnnnnnnnnnnnnnnnnnnnnnnnnnnnnnnnnnnnnnnnnnnnnnnnnnnnnnnnnnnnnnnnnnnnnnnnnnnnnnnnnnnnnnnnnnnnnnnnnnnnnnnnnnnnnnnnnnnnnnnnnnnnnnnnnnnnnnnnnnnnnnnnnnnnnnnnnnnnnnnnnnnnnnnnnnnnnnnnnnnnnnnnnnnnnnnnnnnnnnnnnnnnnnnnnnnnnnnnnnnnnnnnnnnnnnnnnnnnnnnnnnnnnnnnnnnnnnnnnnnnnnnnnnnnnnnnnnnnnnnnnnnnnnnnnnnnnnnnnnnnnnnnnnnnnnnnnnnnnnnnnnnnnnnnnnnnnnnnnnnnnnnnnnnnnnnnnnnnnnnnnnnnnnnnnnnnnnnnnnnnnnnnnnnnnnnnnnnnnnnnnnnnnnnnnnnnnnnnnnnnnnnnnnnnnnnnnnnnnnnnnnnnnnnnnnnnnnnnnnnnnnnnnnnnnnnnnnnnnnnnnnnnnnnnnnnnnnnnnnnnnnnnnnnnnnnnnnnnnnnnnnnnnnnnnnnnnnnnnnnnnnnnnnnnnnnnnnnnnnnnnnnnnnnnnnnnnnnnnnnnnnnnnnnnnnnnnnnnnnnnnnnnnnnnnnnnnnnnnnnnnnnnnnnnnnnnnnnnnnnnnnnnnnnnnnnnnnnnnnnnnnnnnnnnnnnnnnnnnnnnnnnnnnnnnnnnnnnnnnnnnnnnnnnnnnnnnnnnnnnnnnnnnnnnnnnnnnnnnnnnnnnnnnnnnnnnnnnnnnnnnnnnnnnnnnnnnnnnnnnnnnnnnnnnnnnnnnnnnnnnnnnnnnnnnnnnnnnnnnnnnnnnnnnnnnnnnnnnnnnnnnnnnnnnnnnnnnnnnnnnnnnnnnnnnnnnnnnnnnnnnnnnnnnnnnnnnnnnnnnnnnnnnnnnnnnnnnnnnnnnnnnnnnnnnnnnnnnnnnnnnnnnnnnnnnnnnnnnnnnnnnnnnnnnnnnnnnnnnnnnnnnnnnnnnnnnnnnnnnnnnnnnnnnnnnnnnnnnnnnnnnnnnnnnnnnnnnnnnnnnnnnnnnnnnnnnnnnnnnnnnnnnnnnnnnnnnnnnnnnnnnnnnnnnnnnnnnnnnnnnnnnnnnnnnnnnnnnnnnnnnnnnnnnnnnnnnnnnnnnnnnnnnnnnnnnnnnnnnnnnnnnnnnnnnnnnnnnnnnnnnnnnnnnnnnnnnnnnnnnnnnnnnnnnnnnnnnnnnnnnnnnnnnnnnnnnnnnnnnnnnnnnnnnnnnnnnnnnnnnnnnnnnnnnnnnnnnnnnnnnnnnnnnnnnnnnnnnnnnnnnnnnnnnnnnnnnnnnnnnnnnnnnnnnnnnnnnnnnnnnnnnnnnnnnnnnnnnnnnnnnnnnnnnnnnnnnnnnnnnnnnnnnnnnnnnnnnnnnnnnnnnnnnnnnnnnnnnnnnnnnnnnnnnnnnnnnnnnnnnnnnnnnnnnnnnnnnnnnnnnnnnnnnnnnnnnnnnnnnnnnnnnnnnnnnnnnnnnnnnnnnnnnnnnnnnnnnnnnnnnnnnnnnnnnnnnnnnnnnnnnnnnnnnnnnnnnnnnnnnnnnnnnnnnnnnnnnnnnnnnnnnnnnnnnnnnnnnnnnnnnnnnnnnnnnnnnnnnnnnnnnnnnnnnnnnnnnnnnnnnnnnnnnnnnnnnnnnnnnnnnnnnnnnnnnnnnnnnnnnnnnnnnnnnnnnnnnnnnnnnnnnnnnnnnnnnnnnnnnnnnnnnnnnnnnnnnnnnnnnnnnnnnnnnnnnnnnnnnnnnnnnnnnnnnnnnnnnnnnnnnnnnnnnnnnnnnnnnnnnnnnnnnnnnnnnnnnnnnnnnnnnnnnnnnnnnnnnnnnnnnnnnnnnnnnnnnnnnnnnnnnnnnnnnnnnnnnnnnnnnnnnnnnnnnnnnnnnnnnnnnnnnnnnnnnnnnnnnnnnnnnnnnnnnnnnnnnnnnnnnnnnnnnnnnnnnnnnnnnnnnnnnnnnnnnnnnnnnnnnnnnnnnnnnnnnnnnnnnnnnnnnnnnnnnnnnnnnnnnnnnnnnnnnnnnnnnnnnnnnnnnnnnnnnnnnnnnnnnnnnnnnnnnnnnnnnnnnnnnnnnnnnnnnnnnnnnnnnnnnnnnnnnnnnnnnnnnnnnnnnnnnnnnnnnnnnnnnnnnnnnnnnnnnnnnnnnnnnnnnnnnnnnnnnnnnnnnnnnnnnnnnnnnnnnnnnnnnnnnnnnnnnnnnnnnnnnnnnnnnnnnnnnnnnnnnnnnnnnnnnnnnnnnnnnnnnnnnnnnnnnnnnnnnnnnnnnnnnnnnnnnnnnnnnnnnnnnnnnnnnnnnnnnnnnnnnnnnnnnnnnnnnnnnnnnnnnnnnnnnnnnnnnnnnnnnnnnnnnnnnnnnnnnnnnnnnnnnnnnnnnnnnnnnnnnnnnnnnnnnnnnnnnnnnnnnnnnnnnnnnnnnnnnnnnnnnnnnnnnnnnnnnnnnnnnnnnnnnnnnnnnnnnnnnnnnnnnnnnnnnnnnnnnnnnnnnnnnnnnnnnnnnnnnnnnnnnnnnnnnnnnnnnnnnnnnnnnnnnnnnnnnnnnnnnnnnnnnnnnnnnnnnnnnnnnnnnnnnnnnnnnnnnnnnnnnnnnnnnnnnnnnnnnnnnnnnnnnnnnnnnnnnnnnnnnnnnnnnnnnnnnnnnnnnnnnnnnnnnnnnnnnnnnnnnnnnnnnnnnnnnnnnnnnnnnnnnnnnnnnnnnnnnnnnnnnnnnnnnnnnnnnnnnnnnnnnnnnnnnnnnnnnnnnnnnnnnnnnnnnnnnnnnnnnnnnnnnnnnnnnnnnnnnnnnnnnnnnnnnnnnnnnnnnnnnnnnnnnnnnnnnnnnnnnnnnnnnnnnnnnnnnnnnnnnnnnnnnnnnnnnnnnnnnnnnnnnnnnnnnnnnnnnnnnnnnnnnnnnnnnnnnnnnnnnnnnnnnnnnnnnnnnnnnnnnnnnnnnnnnnnnnnnnnnnnnnnnnnnnnnnnnnnnnnnnnnnnnnnnnnnnnnnnnnnnnnnnnnnnnnnnnnnnnnnnnnnnnnnnnnnnnnnnnnnnnnnnnnnnnnnnnnnnnnnnnnnnnnnnnnnnnnnnnnnnnnnnnnnnnnnnnnnnnnnnnnnnnnnnnnnnnnnnnnnnnnnnnnnnnnnnnnnnnnnnnnnnnnnnnnnnnnnnnnnnnnnnnnnnnnnnnnnnnnnnnnnnnnnnnnnnnnnnnnnnnnnnnnnnnnnnnnnnnnnnnnnnnnnnnnnnnnnnnnnnnnnnnnnnnnnnnnnnnnnnnnnnnnnnnnnnnnnnnnnnnnnnnnnnnnnnnnnnnnnnnnnnnnnnnnnnnnnnnnnnnnnnnnnnnnnnnnnnnnnnnnnnnnnnnnnnnnnnnnnnnnnnnnnnnnnnnnnnnnnnnnnnnnnnnnnnnnnnnnnnnnnnnnnnnnnnnnnnnnnnnnnnnnnnnnnnnnnnnnnnnnnnnnnnnnnnnnnnnnnnnnnnnnnnnnnnnnnnnnnnnnnnnnnnnnnnnnnnnnnnnnnnnnnnnnnnnnnnnnnnnnnnnnnnnnnnnnnnnnnnnnnnnnnnnnnnnnnnnnnnnnnnnnnnnnnnnnnnnnnnnnnnnnnnnnnnnnnnnnnnnnnnnnnnnnnnnnnnnnnnnnnnnnnnnnnnnnnnnnnnnnnnnnnnnnnnnnnnnnnnnnnnnnnnnnnnnnnnnnnnnnnnnnnnnnnnnnnnnnnnnnnnnnnnnnnnnnnnnnnnnnnnnnnnnnnnnnnnnnnnnnnnnnnnnnnnnnnnnnnnnnnnnnnnnnnnnnnnnnnnnnnnnnnnnnnnnnnnnnnnnnnnnnnnnnnnnnnnnnnnnnnnnnnnnnnnnnnnnnnnnnnnnnnnnnnnnnnnnnnnnnnnnnnnnnnnnnnnnnnnnnnnnnnnnnnnnnnnnnnnnnnnnnnnnnnnnnnnnnnnnnnnnnnnnnnnnnnnnnnnnnnnnnnnnnnnnnnnnnnnnnnnnnnnnnnnnnnnnnnnnnnnnnnnnnnnnnnnnnnnnnnnnnnnnnnnnnnnnnnnnnnnnnnnnnnnnnnnnnnnnnnnnnnnnnnnnnnnnnnnnnnnnnnnnnnnnnnnnnnnnnnnnnnnnnnnnnnnnnnnnnnnnnnnnnnnnnnnnnnnnnnnnnnnnnnnnnnnnnnnnnnnnnnnnnnnnnnnnnnnnnnnnnnnnnnnnnnnnnnnnnnnnnnnnnnnnnnnnnnnnnnnnnnnnnnnnnnnnnnnnnnnnnnnnnnnnnnnnnnnnnnnnnnnnnnnnnnnnnnnnnnnnnnnnnnnnnnnnnnnnnnnnnnnnnnnnnnnnnnnnnnnnnnnnnnnnnnnnnnnnnnnnnnnnnnnnnnnnnnnnnnnnnnnnnnnnnnnnnnnnnnnnnnnnnnnnnnnnnnnnnnnnnnnnnnnnnnnnnnnnnnnnnnnnnnnnnnnnnnnnnnnnnnnnnnnnnnnnaagcaggcaagccgcacagcggcggctcgcaaatatgcgccgtccaggcgaattcccccggccacaccacccgaggacaagtgcagtagatttccttttagtccgacagactcctagaagccacccgtgaatccctctccttcatcgcctcactgcgtcccaatcacagcattgatcccgacctgattctgaaaaataaacacggcaagttacaccacaagttcgacacctcgctgaccaacgtaatgaacagttacacactactcaccgcgccgacggtgacctggtatgcagaaggcaatgccgagctcatttcatgcctgctatcgcccgtgcaatttattggcaagcggcgtgcctctggtttttggttgcgtctcgcattggcaagttgaagccgatgaactggatggtatcgaaggaatgttcggtgaagcgctgcgtccggtgccgattgacttgttcgagggcgacacttcccacccgattgttgatgccgcctggcagcctgcctactggaatcccaatcatcggacggcctgctatgcgccagtttaaggacgtgcaatgctgagttttttcaatgaaaattttggccgtcatctgctgttgcgcaccgatatcagcttgaaattgagcagcggccgcaacgcagcatcagcaccggagacattatcggtttcgagttgcgcgcctgtgtcagcaaaaaactcaaaggccgtcacatctactttcgcacctcggattggcaacgtcggcatagctggatggaacgaaagagggaggcgcatggatttacgcttatcaccgtacattgcagcgcctcgatgcaaaccgtgcagactggcgagagacaatttacggttgatcagacggtctacaccggggttctcaaagtaacggacactgaacgttttaacgcagccctcgccaatggcatcggcattaagacccgtgctttcggctttggcatgttggttatttaacagaaggaatcagtatgaaatctatcatcattaacgccacacttaccaccatcggctccttgtctatcgccttgtctatcgccttgccggtctctgaaggtcagcagggcaacaattcccatcgtcacgcgcggcattgatgtagcgggcaacaagcaacaaaccggctacctgccagccagcacgctacgcggatttttacgcgcgccatcgtggtcgaacaaatgacgcaagccgcccccgcagggcatcactacaccctgcaaaaagcctacgccgacttgattggacaggatgccacctccgaatccagtgacgatattgatctgctcaagttgcgtcaaacccgtgaggacaacgcagtactcgatttatttggctcaggtctaggcattaaatcgcgcctgctggtgtcgcatttcttaccgacacataacgtattaccggaagtcttcaccggcgtgcgcaaggatttggacgataccgacggcgtgctggagctgatttctgaagcggatcgcgcgcgttatccggggcgttccgacgcgaacagcaaacgcgcggccgctgtaacggtggtaaaaggactggaggcaaagttgcgcaaagccaaaaaggccggtgagtcactggtcgaattggaactcgcgcggcaagcggcacaggatattgtcgaacgctacgaatccgacatgggcgagatgaccaatttttcacgcacgctgaccaactattttgccctcccggcaggcatcaaactcaaaggccgattagtgattgagaaagcgcgtgagcgtgatctggccatgatcgaactcgcgctgaatagactttcacagcgtccgattcttggcgcgcaaagcgcgcgcggctgcggggaaattgccggcgtattggatgtattagtggatggcctgcttgccaaaaaaatcaccatctgcgcatggcaagcagcgattattagcaatttttctgctgtcgaatcttgaaaataggtttaataatcaatgcataacaacagattggatcaagccaccccttgtttgggtgcttactataaataaaaatctggcattgtttcacgtgaaacaatcggtttggtcgtttacgaaaaagggaagttgaatgttccgttctgccgagcaaggtaattttgccgctatcgtcgcccggcacatcgcctcggctgacgcaccgttattgctggaaggcggcacggggatcggtaaaactcgtgcctatctttccgcgctgattcaatccggtttgcgcgtcactatcgtgctgcctacccatcagttgattgaccagatgttggcctcaaacgacttggcggcgacgcgaagcgcggccagtattgccgcctttcgtccagcgcgactatttgaaaattggtcggactatgaagctaataagcgcgccgcaatggccgcaaccgtgatgttttgcacagcggccagcgtcatcattgatcagcgtctgggcggcgaatataacggcgcaacaaaccgcgactatttgttgtttgatgaagccgatcaactaccggacatggccgcattgcaaagcgacttcaccattacacaggcggaactgacagcgttgggcataacactcagctgcgtgactgaagccttgcaagccattttggtcaaagcgccaaacgtggttgagccggaaaccagagccgccgcacgcatcattctcgatgccatcgagcaaccagcgtggtatcagtccgctggtgtaagcgatgaaggcgacattatgctgacgcacagcttgcccggtcgtttactgaaataaatcagcaattcagcccatttcgcctttgtctctgccacgctaaccgtcgccagacagctcaaggattttcaaaattcgatgggcattgcgacggtaagtaacttgtcgggcgtgatagaaccggagcgtcacggtacgcttgatttccactttatgccggtggtggttgataccgaggaatggcgcagtgccgtcatccgaatggcgaacgaagcgcctaaaccggtgctgatcgcgaccacatcacaccgtttttccagcctgctcggcgaacaattatcaggtgcaacggtaaggtcggacagcgaatccaccgctcacgccgccgtgcgcgtttcagccaatgggttttttattgcagccggtgcctgggcagggctggatacgccgttgcgctggcgttcgatcatcgtgccgcgcgtgccatacggacaaccagtggtgatagacggcgaaaccaccacccgttatttcgatgcgcacaacacggcgattcgccgtttgcgccaggtgataggccgtggtttacgttcggcggatgcaatctgtagcgtttacatcctcgatggcagggctgaaaaattaacgggctttgtaccggagcgtttttccgccgcatgggcatcacgcaaaacgtatttggagggggcgaggcaagcgctgattttgagcaggaacgaacgctatcccgccgtccgtcgtgccgcactcaattactatggtcgaaaatgtatggcgtgtagctttgtgccgcgcgtggatgcacaactggacgtgcatcatctcgacccgattgccgaaggtgttcgctgcatcaggattgaggatgtggtcgttttgtgtgcaaactgtcaccgtctggttcacgctacccatccccctttagcactcaccgatctaattgcgctactcaacgcaacaatatgattatccttaacgtaaaactcgcgcagcgacgaactgtacccctcgccctctgggagaggggggacgggggtgagggaacgggcatggcgggttttatcatcaggggtggttacttttccatgcccgttagatttttttcaattaaattcccgttagctaacggttttccctagcagcctgtcggacatgatgttaaatcatccgactttcctggcaagccggaagaatttgttcccgatttcataaaaataaccttcaggttgtcataaaaatccattt

SEQ ID NO: 301 - DNA, 11114 bp, Artificial Sequence
  Synthetic Oligonucleotide
  misc_feature (1)..(7129): n is a, c, g, or t
nnnnnnnnnnnnnnnnnnnnnnnnnnnnnnnnnnnnnnnnnnnnnnnnnnnnnnnnnnnnnnnnnnnnnnnnnnnnnnnnnnnnnnnnnnnnnnnnnnnnnnnnnnnnnnnnnnnnnnnnnnnnnnnnnnnnnnnnnnnnnnnnnnnnnnnnnnnnnnnnnnnnnnnnnnnnnnnnnnnnnnnnnnnnnnnnnnnnnnnnnnnnnnnnnnnnnnnnnnnnnnnnnnnnnnnnnnnnnnnnnnnnnnnnnnnnnnnnnnnnnnnnnnnnnnnnnnnnnnnnnnnnnnnnnnnnnnnnnnnnnnnnnnnnnnnnnnnnnnnnnnnnnnnnnnnnnnnnnnnnnnnnnnnnnnnnnnnnnnnnnnnnnnnnnnnnnnnnnnnnnnnnnnnnnnnnnnnnnnnnnnnnnnnnnnnnnnnnnnnnnnnnnnnnnnnnnnnnnnnnnnnnnnnnnnnnnnnnnnnnnnnnnnnnnnnnnnnnnnnnnnnnnnnnnnnnnnnnnnnnnnnnnnnnnnnnnnnnnnnnnnnnnnnnnnnnnnnnnnnnnnnnnnnnnnnnnnnnnnnnnnnnnnnnnnnnnnnnnnnnnnnnnnnnnnnnnnnnnnnnnnnnnnnnnnnnnnnnnnnnnnnnnnnnnnnnnnnnnnnnnnnnnnnnnnnnnnnnnnnnnnnnnnnnnnnnnnnnnnnnnnnnnnnnnnnnnnnnnnnnnnnnnnnnnnnnnnnnnnnnnnnnnnnnnnnnnnnnnnnnnnnnnnnnnnnnnnnnnnnnnnnnnnnnnnnnnnnnnnnnnnnnnnnnnnnnnnnnnnnnnnnnnnnnnnnnnnnnnnnnnnnnnnnnnnnnnnnnnnnnnnnnnnnnnnnnnnnnnnnnnnnnnnnnnnnnnnnnnnnnnnnnnnnnnnnnnnnnnnnnnnnnnnnnnnnnnnnnnnnnnnnnnnnnnnnnnnnnnnnnnnnnnnnnnnnnnnnnnnnnnnnnnnnnnnnnnnnnnnnnnnnnnnnnnnnnnnnnnnnnnnnnnnnnnnnnnnnnnnnnnnnnnnnnnnnnnnnnnnnnnnnnnnnnnnnnnnnnnnnnnnnnnnnnnnnnnnnnnnnnnnnnnnnnnnnnnnnnnnnnnnnnnnnnnnnnnnnnnnnnnnnnnnnnnnnnnnnnnnnnnnnnnnnnnnnnnnnnnnnnnnnnnnnnnnnnnnnnnnnnnnnnnnnnnnnnnnnnnnnnnnnnnnnnnnnnnnnnnnnnnnnnnnnnnnnnnnnnnnnnnnnnnnnnnnnnnnnnnnnnnnnnnnnnnnnnnnnnnnnnnnnnnnnnnnnnnnnnnnnnnnnnnnnnnnnnnnnnnnnnnnnnnnnnnnnnnnnnnnnnnnnnnnnnnnnnnnnnnnnnnnnnnnnnnnnnnnnnnnnnnnnnnnnnnnnnnnnnnnnnnnnnnnnnnnnnnnnnnnnnnnnnnnnnnnnnnnnnnnnnnnnnnnnnnnnnnnnnnnnnnnnnnnnnnnnnnnnnnnnnnnnnnnnnnnnnnnnnnnnnnnnnnnnnnnnnnnnnnnnnnnnnnnnnnnnnnnnnnnnnnnnnnnnnnnnnnnnnnnnnnnnnnnnnnnnnnnnnnnnnnnnnnnnnnnnnnnnnnnnnnnnnnnnnnnnnnnnnnnnnnnnnnnnnnnnnnnnnnnnnnnnnnnnnnnnnnnnnnnnnnnnnnnnnnnnnnnnnnnnnnnnnnnnnnnnnnnnnnnnnnnnnnnnnnnnnnnnnnnnnnnnnnnnnnnnnnnnnnnnnnnnnnnnnnnnnnnnnnnnnnnnnnnnnnnnnnnnnnnnnnnnnnnnnnnnnnnnnnnnnnnnnnnnnnnnnnnnnnnnnnnnnnnnnnnnnnnnnnnnnnnnnnnnnnnnnnnnnnnnnnnnnnnnnnnnnnnnnnnnnnnnnnnnnnnnnnnnnnnnnnnnnnnnnnnnnnnnnnnnnnnnnnnnnnnnnnnnnnnnnnnnnnnnnnnnnnnnnnnnnnnnnnnnnnnnnnnnnnnnnnnnnnnnnnnnnnnnnnnnnnnnnnnnnnnnnnnnnnnnnnnnnnnnnnnnnnnnnnnnnnnnnnnnnnnnnnnnnnnnnnnnnnnnnnnnnnnnnnnnnnnnnnnnnnnnnnnnnnnnnnnnnnnnnnnnnnnnnnnnnnnnnnnnnnnnnnnnnnnnnnnnnnnnnnnnnnnnnnnnnnnnnnnnnnnnnnnnnnnnnnnnnnnnnnnnnnnnnnnnnnnnnnnnnnnnnnnnnnnnnnnnnnnnnnnnnnnnnnnnnnnnnnnnnnnnnnnnnnnnnnnnnnnnnnnnnnnnnnnnnnnnnnnnnnnnnnnnnnnnnnnnnnnnnnnnnnnnnnnnnnnnnnnnnnnnnnnnnnnnnnnnnnnnnnnnnnnnnnnnnnnnnnnnnnnnnnnnnnnnnnnnnnnnnnnnnnnnnnnnnnnnnnnnnnnnnnnnnnnnnnnnnnnnnnnnnnnnnnnnnnnnnnnnnnnnnnnnnnnnnnnnnnnnnnnnnnnnnnnnnnnnnnnnnnnnnnnnnnnnnnnnnnnnnnnnnnnnnnnnnnnnnnnnnnnnnnnnnnnnnnnnnnnnnnnnnnnnnnnnnnnnnnnnnnnnnnnnnnnnnnnnnnnnnnnnnnnnnnnnnnnnnnnnnnnnnnnnnnnnnnnnnnnnnnnnnnnnnnnnnnnnnnnnnnnnnnnnnnnnnnnnnnnnnnnnnnnnnnnnnnnnnnnnnnnnnnnnnnnnnnnnnnnnnnnnnnnnnnnnnnnnnnnnnnnnnnnnnnnnnnnnnnnnnnnnnnnnnnnnnnnnnnnnnnnnnnnnnnnnnnnnnnnnnnnnnnnnnnnnnnnnnnnnnnnnnnnnnnnnnnnnnnnnnnnnnnnnnnnnnnnnnnnnnnnnnnnnnnnnnnnnnnnnnnnnnnnnnnnnnnnnnnnnnnnnnnnnnnnnnnnnnnnnnnnnnnnnnnnnnnnnnnnnnnnnnnnnnnnnnnnnnnnnnnnnnnnnnnnnnnnnnnnnnnnnnnnnnnnnnnnnnnnnnnnnnnnnnnnnnnnnnnnnnnnnnnnnnnnnnnnnnnnnnnnnnnnnnnnnnnnnnnnnnnnnnnnnnnnnnnnnnnnnnnnnnnnnnnnnnnnnnnnnnnnnnnnnnnnnnnnnnnnnnnnnnnnnnnnnnnnnnnnnnnnnnnnnnnnnnnnnnnnnnnnnnnnnnnnnnnnnnnnnnnnnnnnnnnnnnnnnnnnnnnnnnnnnnnnnnnnnnnnnnnnnnnnnnnnnnnnnnnnnnnnnnnnnnnnnnnnnnnnnnnnnnnnnnnnnnnnnnnnnnnnnnnnnnnnnnnnnnnnnnnnnnnnnnnnnnnnnnnnnnnnnnnnnnnnnnnnnnnnnnnnnnnnnnnnnnnnnnnnnnnnnnnnnnnnnnnnnnnnnnnnnnnnnnnnnnnnnnnnnnnnnnnnnnnnnnnnnnnnnnnnnnnnnnnnnnnnnnnnnnnnnnnnnnnnnnnnnnnnnnnnnnnnnnnnnnnnnnnnnnnnnnnnnnnnnnnnnnnnnnnnnnnnnnnnnnnnnnnnnnnnnnnnnnnnnnnnnnnnnnnnnnnnnnnnnnnnnnnnnnnnnnnnnnnnnnnnnnnnnnnnnnnnnnnnnnnnnnnnnnnnnnnnnnnnnnnnnnnnnnnnnnnnnnnnnnnnnnnnnnnnnnnnnnnnnnnnnnnnnnnnnnnnnnnnnnnnnnnnnnnnnnnnnnnnnnnnnnnnnnnnnnnnnnnnnnnnnnnnnnnnnnnnnnnnnnnnnnnnnnnnnnnnnnnnnnnnnnnnnnnnnnnnnnnnnnnnnnnnnnnnnnnnnnnnnnnnnnnnnnnnnnnnnnnnnnnnnnnnnnnnnnnnnnnnnnnnnnnnnnnnnnnnnnnnnnnnnnnnnnnnnnnnnnnnnnnnnnnnnnnnnnnnnnnnnnnnnnnnnnnnnnnnnnnnnnnnnnnnnnnnnnnnnnnnnnnnnnnnnnnnnnnnnnnnnnnnnnnnnnnnnnnnnnnnnnnnnnnnnnnnnnnnnnnnnnnnnnnnnnnnnnnnnnnnnnnnnnnnnnnnnnnnnnnnnnnnnnnnnnnnnnnnnnnnnnnnnnnnnnnnnnnnnnnnnnnnnnnnnnnnnnnnnnnnnnnnnnnnnnnnnnnnnnnnnnnnnnnnnnnnnnnnnnnnnnnnnnnnnnnnnnnnnnnnnnnnnnnnnnnnnnnnnnnnnnnnnnnnnnnnnnnnnnnnnnnnnnnnnnnnnnnnnnnnnnnnnnnnnnnnnnnnnnnnnnnnnnnnnnnnnnnnnnnnnnnnnnnnnnnnnnnnnnnnnnnnnnnnnnnnnnnnnnnnnnnnnnnnnnnnnnnnnnnnnnnnnnnnnnnnnnnnnnnnnnnnnnnnnnnnnnnnnnnnnnnnnnnnnnnnnnnnnnnnnnnnnnnnnnnnnnnnnnnnnnnnnnnnnnnnnnnnnnnnnnnnnnnnnnnnnnnnnnnnnnnnnnnnnnnnnnnnnnnnnnnnnnnnnnnnnnnnnnnnnnnnnnnnnnnnnnnnnnnnnnnnnnnnnnnnnnnnnnnnnnnnnnnnnnnnnnnnnnnnnnnnnnnnnnnnnnnnnnnnnnnnnnnnnnnnnnnnnnnnnnnnnnnnnnnnnnnnnnnnnnnnnnnnnnnnnnnnnnnnnnnnnnnnnnnnnnnnnnnnnnnnnnnnnnnnnnnnnnnnnnnnnnnnnnnnnnnnnnnnnnnnnnnnnnnnnnnnnnnnnnnnnnnnnnnnnnnnnnnnnnnnnnnnnnnnnnnnnnnnnnnnnnnnnnnnnnnnnnnnnnnnnnnnnnnnnnnnnnnnnnnnnnnnnnnnnnnnnnnnnnnnnnnnnnnnnnnnnnnnnnnnnnnnnnnnnnnnnnnnnnnnnnnnnnnnnnnnnnnnnnnnnnnnnnnnnnnnnnnnnnnnnnnnnnnnnnnnnnnnnnnnnnnnnnnnnnnnnnnnnnnnnnnnnnnnnnnnnnnnnnnnnnnnnnnnnnnnnnnnnnnnnnnnnnnnnnnnnnnnnnnnnnnnnnnnnnnnnnnnnnnnnnnnnnnnnnnnnnnnnnnnnnnnnnnnnnnnnnnnnnnnnnnnnnnnnnnnnnnnnnnnnnnnnnnnnnnnnnnnnnnnnnnnnnnnnnnnnnnnnnnnnnnnnnnnnnnnnnnnnnnnnnnnnnnnnnnnnnnnnnnnnnnnnnnnnnnnnnnnnnnnnnnnnnnnnnnnnnnnnnnnnnnnnnnnnnnnnnnnnnnnnnnnnnnnnnnnnnnnnnnnnnnnnnnnnnnnnnnnnnnnnnnnnnnnnnnnnnnnnnnnnnnnnnnnnnnnnnnnnnnnnnnnnnnnnnnnnnnnnnnnnnnnnnnnnnnnnnnnnnnnnnnnnnnnnnnnnnnnnnnnnnnnnnnnnnnnnnnnnnnnnnnnnnnnnnnnnnnnnnnnnnnnnnnnnnnnnnnnnnnnnnnnnnnnnnnnnnnnnnnnnnnnnnnnnnnnnnnnnnnnnnnnnnnnnnnnnnnnnnnnnnnnnnnnnnnnnnnnnnnnnnnnnnnnnnnnnnnnnnnnnnnnnnnnnnnnnnnnnnnnnnnnnnnnnnnnnnnnnnnnnnnnnnnnnnnnnnnnnnnnnnnnnnnnnnnnnnnnnnnnnnnnnnnnnnnnnnnnnnnnnnnnnnnnnnnnnnnnnnnnnnnnnnnnnnnnnnnnnnnnnnnnnnnnnnnnnnnnnnnnnnnnnnnnnnnnnnnnnnnnnnnnnnnnnnnnnnnnnnnnnnnnnnnnnnnnnnnnnnnnnnnnnnnnnnnnnnnnnnnnnnnnnnnnnnnnnnnnnnnnnnnnnnnnnnnnnnnnnnnnnnnnnnnnnnnnnnnnnnnnnnnnnnnnnnnnnnnnnnnnnnnnnnnnnnnnnnnnnnnnnnnnnnnnnnnnnnnnnnnnnnnnnnnnnnnnnnnnnnnnnnnnnnnnnnnnnnnnnnnnnnnnnnnnnnnnnnnnnnnnnnnnnnnnnnnnnnnnnnnnnnnnnnnnnnnnnnnnnnnnnnnnnnnnnnnnnnnnnnnnnnnnnnnnnnnnnnnnnnnnnnnnnnnnnnnnnnnnnnnnnnnnnnnnnnnnnnnnnnnnnnnnnnnnnnnnnnnnnnnnnnnnnnnnnnnnnnnnnnnnnnnnnnnnnnnnnnnnnnnnnnnnnnnnnnnnnnnnnnnnnnnnnnnnnnnnnnnnnnnnnnnnnnnnnnnnnnnnnnnnnnnnnnnnnnnnnnnnnnnnnnnnnnnnnnnnnnnnnnnnnnnnnnnnnnnnnnnnnnnnnnnnnnnnnnnnnnnnnnnnnnnnnnnnnnnnnnnnnnnnnnnnnnnnnnnnnnnnnnnnnnnnnnnnnnnnnnnnnnnnnnnnnnnnnnnnnnnnnnnnnnnnnnnnnnnnnnnnnnnnnnnnnnnnnnnnnnnnnnnnnnnnnnnnnnnnnnnnnnnnnnnnnnnnnnnnnnnnnnnnnnnnnnnnnnnnnnnnnnnnnnnnnnnnnnnnnnnnnnnnnnnnnnnnnnnnnnnnnnnnnnnnnnnnnnnnnnnnnnnnnnnnnnnnnnnnnnnnnnnnnnnnnnnnnnnnnnnnnnnnnnnnnnnnnnnnnnnnnnnnnnnnnnnnnnnnnnnnnnnnnnnnnnnnnnnnnnnnnnnnnnnnnnnnnnnnnnnnnnnnnnnnnnnnnnnnnnnnnnnnnnnnnnnnnnnnnnnnnnnnnnnnnnnnnnnnnnnnnnnnnnnnnnnnnnnnnnnnnnnnnnnnnnnnnnnnnnnnnnnnnnnnnnnnnnnnnnnnnnnnnnnnnnnnnnnnnnnnnnnnnnnnnnnnnnnnnnnnnnnnnnnnnnnnnnnnnnnnnnnnnnnnnnnnnnnnnnnnnnnnnnnnnnnnnnnnnnnnnnnnnnnnnnnnnnnnnnnnnnnnnnnnnnnnnnnnnnnnnnnnnnnnnnnnnnnnnnnnnnnnnnnnnnnnnnnnnnnnnnnnnnnnnnnnnnnnnnnnnnnnnnnnnnnnnnnnnnnnnnnnnnnnnnnnnnnnnnnnnnnnnnnnnnnnnnnnnnnnnnnnnnnnnnnnnnnnnnnnnnnnnnnnnnnnnnnnnnnnnnnnnnnnnnnnnnnnnnnnnnnnnnnnnnnnnnnnnnnnnnnnnnnnnnnnnnnnnnnnnnnnnnnnnnnnnnnnnnnnnnnnnnnnnnnnnnnnnnnnnnnnnnnnnnnnnnnnnnnnnnnnnnnnnnnaagcaggcaagccgcacagcggcggctcgcaaatatgcgccgtccaggcgaattcccccggccacaccacccgaggacaagtgcagtagatttccttttagtccgacagactcctagaagccacccgtgaatccctctccttcatcgcctcactgcgtcccaatcacagcattgatcccgacctgattctgaaaaataaacacggcaagttacaccacaagttcgacacctcgctgaccaacgtaatgaacagttacacactactcaccgcgccgacggtgacctggtatgcagaaggcaatgccgagctcatttcatgcctgctatcgcccgtgcaatttattggcaagcggcgtgcctctggtttttggttgcgtctcgcattggcaagttgaagccgatgaactggatggtatcgaaggaatgttcggtgaagcgctgcgtccggtgccgattgacttgttcgagggcgacacttcccacccgattgttgatgccgcctggcagcctgcctactggaatcccaatcatcggacggcctgctatgcgccagtttaaggacgtgcaatgctgagttttttcaatgaaaattttggccgtcatctgctgttgcgcaccgatatcagcttgaaattgagcagcggccgcaacgcagcatcagcaccggagacattatcggtttcgagttgcgcgcctgtgtcagcaaaaaactcaaaggccgtcacatctactttcgcacctcggattggcaacgtcggcatagctggatggaacgaaagagggaggcgcatggatttacgcttatcaccgtacattgcagcgcctcgatgcaaaccgtgcagactggcgagagacaatttacggttgatcagacggtctacaccggggttctcaaagtaacggacactgaacgttttaacgcagccctcgccaatggcatcggcattaagacccgtgctttcggctttggcatgttggttatttaacagaaggaatcagtatgaaatctatcatcattaacgccacacttaccaccatcggctccttgtctatcgccttgtctatcgccttgccggtctctgaaggtcagcagggcaacaattcccatcgtcacgcgcggcattgatgtagcgggcaacaagcaacaaaccggctacctgccagccagcacgctacgcggatttttacgcgcgccatcgtggtcgaacaaatgacgcaagccgcccccgcagggcatcactacaccctgcaaaaagcctacgccgacttgattggacaggatgccacctccgaatccagtgacgatattgatctgctcaagttgcgtcaaacccgtgaggacaacgcagtactcgatttatttggctcaggtctaggcattaaatcgcgcctgctggtgtcgcatttcttaccgacacataacgtattaccggaagtcttcaccggcgtgcgcaaggatttggacgataccgacggcgtgctggagctgatttctgaagcggatcgcgcgcgttatccggggcgttccgacgcgaacagcaaacgcgcggccgctgtaacggtggtaaaaggactggaggcaaagttgcgcaaagccaaaaaggccggtgagtcactggtcgaattggaactcgcgcggcaagcggcacaggatattgtcgaacgctacgaatccgacatgggcgagatgaccaatttttcacgcacgctgaccaactattttgccctcccggcaggcatcaaactcaaaggccgattagtgattgagaaagcgcgtgagcgtgatctggccatgatcgaactcgcgctgaatagactttcacagcgtccgattcttggcgcgcaaagcgcgcgcggctgcggggaaattgccggcgtattggatgtattagtggatggcctgcttgccaaaaaaatcaccatctgcgcatggcaagcagcgattattagcaatttttctgctgtcgaatcttgaaaataggtttaataatcaatgcataacaacagattggatcaagccaccccttgtttgggtgcttactataaataaaaatctggcattgtttcacgtgaaacaatcggtttggtcgtttacgaaaaagggaagttgaatgttccgttctgccgagcaaggtaattttgccgctatcgtcgcccggcacatcgcctcggctgacgcaccgttattgctggaaggcggcacggggatcggtaaaactcgtgcctatctttccgcgctgattcaatccggtttgcgcgtcactatcgtgctgcctacccatcagttgattgaccagatgttggcctcaaacgacttggcggcgacgcgaagcgcggccagtattgccgcctttcgtccagcgcgactatttgaaaattggtcggactatgaagctaataagcgcgccgcaatggccgcaaccgtgatgttttgcacagcggccagcgtcatcattgatcagcgtctgggcggcgaatataacggcgcaacaaaccgcgactatttgttgtttgatgaagccgatcaactaccggacatggccgcattgcaaagcgacttcaccattacacaggcggaactgacagcgttgggcataacactcagctgcgtgactgaagccttgcaagccattttggtcaaagcgccaaacgtggttgagccggaaaccagagccgccgcacgcatcattctcgatgccatcgagcaaccagcgtggtatcagtccgctggtgtaagcgatgaaggcgacattatgctgacgcacagcttgcccggtcgtttactgaaataaatcagcaattcagcccatttcgcctttgtctctgccacgctaaccgtcgccagacagctcaaggattttcaaaattcgatgggcattgcgacggtaagtaacttgtcgggcgtgatagaaccggagcgtcacggtacgcttgatttccactttatgccggtggtggttgataccgaggaatggcgcagtgccgtcatccgaatggcgaacgaagcgcctaaaccggtgctgatcgcgaccacatcacaccgtttttccagcctgctcggcgaacaattatcaggtgcaacggtaaggtcggacagcgaatccaccgctcacgccgccgtgcgcgtttcagccaatgggttttttattgcagccggtgcctgggcagggctggatacgccgttgcgctggcgttcgatcatcgtgccgcgcgtgccatacggacaaccagtggtgatagacggcgaaaccaccacccgttatttcgatgcgcacaacacggcgattcgccgtttgcgccaggtgataggccgtggtttacgttcggcggatgcaatctgtagcgtttacatcctcgatggcagggctgaaaaattaacgggctttgtaccggagcgtttttccgccgcatgggcatcacgcaaaacgtatttggagggggcgaggcaagcgctgattttgagcaggaacgaacgctatcccgccgtccgtcgtgccgcactcaattactatggtcgaaaatgtatggcgtgtagctttgtgccgcgcgtggatgcacaactggacgtgcatcatctcgacccgattgccgaaggtgttcgctgcatcaggattgaggatgtggtcgttttgtgtgcaaactgtcaccgtctggttcacgctacccatccccctttagcactcaccgatctaattgcgctactcaacgcaacaatatgattatccttaacgtaaaactcgcgcagcgacgaactgtacccctcgccctctgggagaggggggacgggggtgagggaacgggcatggcgggttttatcatcaggggtggttacttttccatgcccgttagatttttttcaattaaattcccgttagctaacggttttccctagcagcctgtcggacatgatgttaaatcatccgactttcctggcaagccggaagaatttgttcccgatttcataaaaataaccttcaggttgtca

SEQ ID NO: 302 - DNA, 11110 bp, Artificial Sequence
  Synthetic Oligonucleotide
  misc_feature (1)..(7121): n is a, c, g, or t
nnnnnnnnnnnnnnnnnnnnnnnnnnnnnnnnnnnnnnnnnnnnnnnnnnnnnnnnnnnnnnnnnnnnnnnnnnnnnnnnnnnnnnnnnnnnnnnnnnnnnnnnnnnnnnnnnnnnnnnnnnnnnnnnnnnnnnnnnnnnnnnnnnnnnnnnnnnnnnnnnnnnnnnnnnnnnnnnnnnnnnnnnnnnnnnnnnnnnnnnnnnnnnnnnnnnnnnnnnnnnnnnnnnnnnnnnnnnnnnnnnnnnnnnnnnnnnnnnnnnnnnnnnnnnnnnnnnnnnnnnnnnnnnnnnnnnnnnnnnnnnnnnnnnnnnnnnnnnnnnnnnnnnnnnnnnnnnnnnnnnnnnnnnnnnnnnnnnnnnnnnnnnnnnnnnnnnnnnnnnnnnnnnnnnnnnnnnnnnnnnnnnnnnnnnnnnnnnnnnnnnnnnnnnnnnnnnnnnnnnnnnnnnnnnnnnnnnnnnnnnnnnnnnnnnnnnnnnnnnnnnnnnnnnnnnnnnnnnnnnnnnnnnnnnnnnnnnnnnnnnnnnnnnnnnnnnnnnnnnnnnnnnnnnnnnnnnnnnnnnnnnnnnnnnnnnnnnnnnnnnnnnnnnnnnnnnnnnnnnnnnnnnnnnnnnnnnnnnnnnnnnnnnnnnnnnnnnnnnnnnnnnnnnnnnnnnnnnnnnnnnnnnnnnnnnnnnnnnnnnnnnnnnnnnnnnnnnnnnnnnnnnnnnnnnnnnnnnnnnnnnnnnnnnnnnnnnnnnnnnnnnnnnnnnnnnnnnnnnnnnnnnnnnnnnnnnnnnnnnnnnnnnnnnnnnnnnnnnnnnnnnnnnnnnnnnnnnnnnnnnnnnnnnnnnnnnnnnnnnnnnnnnnnnnnnnnnnnnnnnnnnnnnnnnnnnnnnnnnnnnnnnnnnnnnnnnnnnnnnnnnnnnnnnnnnnnnnnnnnnnnnnnnnnnnnnnnnnnnnnnnnnnnnnnnnnnnnnnnnnnnnnnnnnnnnnnnnnnnnnnnnnnnnnnnnnnnnnnnnnnnnnnnnnnnnnnnnnnnnnnnnnnnnnnnnnnnnnnnnnnnnnnnnnnnnnnnnnnnnnnnnnnnnnnnnnnnnnnnnnnnnnnnnnnnnnnnnnnnnnnnnnnnnnnnnnnnnnnnnnnnnnnnnnnnnnnnnnnnnnnnnnnnnnnnnnnnnnnnnnnnnnnnnnnnnnnnnnnnnnnnnnnnnnnnnnnnnnnnnnnnnnnnnnnnnnnnnnnnnnnnnnnnnnnnnnnnnnnnnnnnnnnnnnnnnnnnnnnnnnnnnnnnnnnnnnnnnnnnnnnnnnnnnnnnnnnnnnnnnnnnnnnnnnnnnnnnnnnnnnnnnnnnnnnnnnnnnnnnnnnnnnnnnnnnnnnnnnnnnnnnnnnnnnnnnnnnnnnnnnnnnnnnnnnnnnnnnnnnnnnnnnnnnnnnnnnnnnnnnnnnnnnnnnnnnnnnnnnnnnnnnnnnnnnnnnnnnnnnnnnnnnnnnnnnnnnnnnnnnnnnnnnnnnnnnnnnnnnnnnnnnnnnnnnnnnnnnnnnnnnnnnnnnnnnnnnnnnnnnnnnnnnnnnnnnnnnnnnnnnnnnnnnnnnnnnnnnnnnnnnnnnnnnnnnnnnnnnnnnnnnnnnnnnnnnnnnnnnnnnnnnnnnnnnnnnnnnnnnnnnnnnnnnnnnnnnnnnnnnnnnnnnnnnnnnnnnnnnnnnnnnnnnnnnnnnnnnnnnnnnnnnnnnnnnnnnnnnnnnnnnnnnnnnnnnnnnnnnnnnnnnnnnnnnnnnnnnnnnnnnnnnnnnnnnnnnnnnnnnnnnnnnnnnnnnnnnnnnnnnnnnnnnnnnnnnnnnnnnnnnnnnnnnnnnnnnnnnnnnnnnnnnnnnnnnnnnnnnnnnnnnnnnnnnnnnnnnnnnnnnnnnnnnnnnnnnnnnnnnnnnnnnnnnnnnnnnnnnnnnnnnnnnnnnnnnnnnnnnnnnnnnnnnnnnnnnnnnnnnnnnnnnnnnnnnnnnnnnnnnnnnnnnnnnnnnnnnnnnnnnnnnnnnnnnnnnnnnnnnnnnnnnnnnnnnnnnnnnnnnnnnnnnnnnnnnnnnnnnnnnnnnnnnnnnnnnnnnnnnnnnnnnnnnnnnnnnnnnnnnnnnnnnnnnnnnnnnnnnnnnnnnnnnnnnnnnnnnnnnnnnnnnnnnnnnnnnnnnnnnnnnnnnnnnnnnnnnnnnnnnnnnnnnnnnnnnnnnnnnnnnnnnnnnnnnnnnnnnnnnnnnnnnnnnnnnnnnnnnnnnnnnnnnnnnnnnnnnnnnnnnnnnnnnnnnnnnnnnnnnnnnnnnnnnnnnnnnnnnnnnnnnnnnnnnnnnnnnnnnnnnnnnnnnnnnnnnnnnnnnnnnnnnnnnnnnnnnnnnnnnnnnnnnnnnnnnnnnnnnnnnnnnnnnnnnnnnnnnnnnnnnnnnnnnnnnnnnnnnnnnnnnnnnnnnnnnnnnnnnnnnnnnnnnnnnnnnnnnnnnnnnnnnnnnnnnnnnnnnnnnnnnnnnnnnnnnnnnnnnnnnnnnnnnnnnnnnnnnnnnnnnnnnnnnnnnnnnnnnnnnnnnnnnnnnnnnnnnnnnnnnnnnnnnnnnnnnnnnnnnnnnnnnnnnnnnnnnnnnnnnnnnnnnnnnnnnnnnnnnnnnnnnnnnnnnnnnnnnnnnnnnnnnnnnnnnnnnnnnnnnnnnnnnnnnnnnnnnnnnnnnnnnnnnnnnnnnnnnnnnnnnnnnnnnnnnnnnnnnnnnnnnnnnnnnnnnnnnnnnnnnnnnnnnnnnnnnnnnnnnnnnnnnnnnnnnnnnnnnnnnnnnnnnnnnnnnnnnnnnnnnnnnnnnnnnnnnnnnnnnnnnnnnnnnnnnnnnnnnnnnnnnnnnnnnnnnnnnnnnnnnnnnnnnnnnnnnnnnnnnnnnnnnnnnnnnnnnnnnnnnnnnnnnnnnnnnnnnnnnnnnnnnnnnnnnnnnnnnnnnnnnnnnnnnnnnnnnnnnnnnnnnnnnnnnnnnnnnnnnnnnnnnnnnnnnnnnnnnnnnnnnnnnnnnnnnnnnnnnnnnnnnnnnnnnnnnnnnnnnnnnnnnnnnnnnnnnnnnnnnnnnnnnnnnnnnnnnnnnnnnnnnnnnnnnnnnnnnnnnnnnnnnnnnnnnnnnnnnnnnnnnnnnnnnnnnnnnnnnnnnnnnnnnnnnnnnnnnnnnnnnnnnnnnnnnnnnnnnnnnnnnnnnnnnnnnnnnnnnnnnnnnnnnnnnnnnnnnnnnnnnnnnnnnnnnnnnnnnnnnnnnnnnnnnnnnnnnnnnnnnnnnnnnnnnnnnnnnnnnnnnnnnnnnnnnnnnnnnnnnnnnnnnnnnnnnnnnnnnnnnnnnnnnnnnnnnnnnnnnnnnnnnnnnnnnnnnnnnnnnnnnnnnnnnnnnnnnnnnnnnnnnnnnnnnnnnnnnnnnnnnnnnnnnnnnnnnnnnnnnnnnnnnnnnnnnnnnnnnnnnnnnnnnnnnnnnnnnnnnnnnnnnnnnnnnnnnnnnnnnnnnnnnnnnnnnnnnnnnnnnnnnnnnnnnnnnnnnnnnnnnnnnnnnnnnnnnnnnnnnnnnnnnnnnnnnnnnnnnnnnnnnnnnnnnnnnnnnnnnnnnnnnnnnnnnnnnnnnnnnnnnnnnnnnnnnnnnnnnnnnnnnnnnnnnnnnnnnnnnnnnnnnnnnnnnnnnnnnnnnnnnnnnnnnnnnnnnnnnnnnnnnnnnnnnnnnnnnnnnnnnnnnnnnnnnnnnnnnnnnnnnnnnnnnnnnnnnnnnnnnnnnnnnnnnnnnnnnnnnnnnnnnnnnnnnnnnnnnnnnnnnnnnnnnnnnnnnnnnnnnnnnnnnnnnnnnnnnnnnnnnnnnnnnnnnnnnnnnnnnnnnnnnnnnnnnnnnnnnnnnnnnnnnnnnnnnnnnnnnnnnnnnnnnnnnnnnnnnnnnnnnnnnnnnnnnnnnnnnnnnnnnnnnnnnnnnnnnnnnnnnnnnnnnnnnnnnnnnnnnnnnnnnnnnnnnnnnnnnnnnnnnnnnnnnnnnnnnnnnnnnnnnnnnnnnnnnnnnnnnnnnnnnnnnnnnnnnnnnnnnnnnnnnnnnnnnnnnnnnnnnnnnnnnnnnnnnnnnnnnnnnnnnnnnnnnnnnnnnnnnnnnnnnnnnnnnnnnnnnnnnnnnnnnnnnnnnnnnnnnnnnnnnnnnnnnnnnnnnnnnnnnnnnnnnnnnnnnnnnnnnnnnnnnnnnnnnnnnnnnnnnnnnnnnnnnnnnnnnnnnnnnnnnnnnnnnnnnnnnnnnnnnnnnnnnnnnnnnnnnnnnnnnnnnnnnnnnnnnnnnnnnnnnnnnnnnnnnnnnnnnnnnnnnnnnnnnnnnnnnnnnnnnnnnnnnnnnnnnnnnnnnnnnnnnnnnnnnnnnnnnnnnnnnnnnnnnnnnnnnnnnnnnnnnnnnnnnnnnnnnnnnnnnnnnnnnnnnnnnnnnnnnnnnnnnnnnnnnnnnnnnnnnnnnnnnnnnnnnnnnnnnnnnnnnnnnnnnnnnnnnnnnnnnnnnnnnnnnnnnnnnnnnnnnnnnnnnnnnnnnnnnnnnnnnnnnnnnnnnnnnnnnnnnnnnnnnnnnnnnnnnnnnnnnnnnnnnnnnnnnnnnnnnnnnnnnnnnnnnnnnnnnnnnnnnnnnnnnnnnnnnnnnnnnnnnnnnnnnnnnnnnnnnnnnnnnnnnnnnnnnnnnnnnnnnnnnnnnnnnnnnnnnnnnnnnnnnnnnnnnnnnnnnnnnnnnnnnnnnnnnnnnnnnnnnnnnnnnnnnnnnnnnnnnnnnnnnnnnnnnnnnnnnnnnnnnnnnnnnnnnnnnnnnnnnnnnnnnnnnnnnnnnnnnnnnnnnnnnnnnnnnnnnnnnnnnnnnnnnnnnnnnnnnnnnnnnnnnnnnnnnnnnnnnnnnnnnnnnnnnnnnnnnnnnnnnnnnnnnnnnnnnnnnnnnnnnnnnnnnnnnnnnnnnnnnnnnnnnnnnnnnnnnnnnnnnnnnnnnnnnnnnnnnnnnnnnnnnnnnnnnnnnnnnnnnnnnnnnnnnnnnnnnnnnnnnnnnnnnnnnnnnnnnnnnnnnnnnnnnnnnnnnnnnnnnnnnnnnnnnnnnnnnnnnnnnnnnnnnnnnnnnnnnnnnnnnnnnnnnnnnnnnnnnnnnnnnnnnnnnnnnnnnnnnnnnnnnnnnnnnnnnnnnnnnnnnnnnnnnnnnnnnnnnnnnnnnnnnnnnnnnnnnnnnnnnnnnnnnnnnnnnnnnnnnnnnnnnnnnnnnnnnnnnnnnnnnnnnnnnnnnnnnnnnnnnnnnnnnnnnnnnnnnnnnnnnnnnnnnnnnnnnnnnnnnnnnnnnnnnnnnnnnnnnnnnnnnnnnnnnnnnnnnnnnnnnnnnnnnnnnnnnnnnnnnnnnnnnnnnnnnnnnnnnnnnnnnnnnnnnnnnnnnnnnnnnnnnnnnnnnnnnnnnnnnnnnnnnnnnnnnnnnnnnnnnnnnnnnnnnnnnnnnnnnnnnnnnnnnnnnnnnnnnnnnnnnnnnnnnnnnnnnnnnnnnnnnnnnnnnnnnnnnnnnnnnnnnnnnnnnnnnnnnnnnnnnnnnnnnnnnnnnnnnnnnnnnnnnnnnnnnnnnnnnnnnnnnnnnnnnnnnnnnnnnnnnnnnnnnnnnnnnnnnnnnnnnnnnnnnnnnnnnnnnnnnnnnnnnnnnnnnnnnnnnnnnnnnnnnnnnnnnnnnnnnnnnnnnnnnnnnnnnnnnnnnnnnnnnnnnnnnnnnnnnnnnnnnnnnnnnnnnnnnnnnnnnnnnnnnnnnnnnnnnnnnnnnnnnnnnnnnnnnnnnnnnnnnnnnnnnnnnnnnnnnnnnnnnnnnnnnnnnnnnnnnnnnnnnnnnnnnnnnnnnnnnnnnnnnnnnnnnnnnnnnnnnnnnnnnnnnnnnnnnnnnnnnnnnnnnnnnnnnnnnnnnnnnnnnnnnnnnnnnnnnnnnnnnnnnnnnnnnnnnnnnnnnnnnnnnnnnnnnnnnnnnnnnnnnnnnnnnnnnnnnnnnnnnnnnnnnnnnnnnnnnnnnnnnnnnnnnnnnnnnnnnnnnnnnnnnnnnnnnnnnnnnnnnnnnnnnnnnnnnnnnnnnnnnnnnnnnnnnnnnnnnnnnnnnnnnnnnnnnnnnnnnnnnnnnnnnnnnnnnnnnnnnnnnnnnnnnnnnnnnnnnnnnnnnnnnnnnnnnnnnnnnnnnnnnnnnnnnnnnnnnnnnnnnnnnnnnnnnnnnnnnnnnnnnnnnnnnnnnnnnnnnnnnnnnnnnnnnnnnnnnnnnnnnnnnnnnnnnnnnnnnnnnnnnnnnnnnnnnnnnnnnnnnnnnnnnnnnnnnnnnnnnnnnnnnnnnnnnnnnnnnnnnnnnnnnnnnnnnnnnnnnnnnnnnnnnnnnnnnnnnnnnnnnnnnnnnnnnnnnnnnnnnnnnnnnnnnnnnnnnnnnnnnnnnnnnnnnnnnnnnnnnnnnnnnnnnnnnnnnnnnnnnnnnnnnnnnnnnnnnnnnnnnnnnnnnnnnnnnnnnnnnnnnnnnnnnnnnnnnnnnnnnnnnnnnnnnnnnnnnnnnnnnnnnnnnnnnnnnnnnnnnnnnnnnnnnnnnnnnnnnnnnnnnnnnnnnnnnnnnnnnnnnnnnnnnnnnnnnnnnnnnnnnnnnnnnnnnnnnnnnnnnnnnnnnnnnnnnnnnnnnnnnnnnnnnnnnnnnnnnnnnnnnnnnnnnnnnnnnnnnnnnnnnnnnnnnnnnnnnnnnnnnnnnnnnnnnnnnnnnnnnnnnnnnnnnnnnnnnnnnnnnnnnnnnnnnnnnnnnnnnnnnnnnnnnnnnnnnnnnnnnnnnnnnnnnnnnnnnnnnnnnnnnnnnnnnnnnnnnnnnnnnnnnnnnnnnnnnnnnnnnnnnnnnnnnnnnnnnnnnnnnnnnnnnnnnnnnnnnnnnnnnnnnnnnnnnnnnnnnnnnnnnnnnnnnnnnnnnnnnnnnnnnnnnnnnnnnnnnnnnnnnnnnnnnnnnnnnnnnnnnnnnnnnnnnnnnnnnnnnnnnnnnnnnnnnnnnnnnnnnnnnnnnnnnnnnnnnnnnnnnnnnnnnnnnnnnnnnnnnnnnnnnnnnnnnnnnnnnnnnnnnnnnnnnnnnnnnnnnnnnnnnnnnnnnnnnnnnnnnnnnnnnnnnnnnnnnnnnnnnnnnnnagtgggtcaagcaggcaagccgcacagcggcggctcgcaaatatgcgccgtccaggcgaattcccccggccacaccacccgaggacaagtgcagtagatttccttttagtccgacagactcctagaagccacccgtgaatccctctccttcatcgcctcactgcgtcccaatcacagcattgatcccgacctgattctgaaaaataaacacggcaagttacaccacaagttcgacacctcgctgaccaacgtaatgaacagttacacactactcaccgcgccgacggtgacctggtatgcagaaggcaatgccgagctcatttcatgcctgctatcgcccgtgcaatttattggcaagcggcgtgcctctggtttttggttgcgtctcgcattggcaagttgaagccgatgaactggatggtatcgaaggaatgttcggtgaagcgctgcgtccggtgccgattgacttgttcgagggcgacacttcccacccgattgttgatgccgcctggcagcctgcctactggaatcccaatcatcggacggcctgctatgcgccagtttaaggacgtgcaatgctgagttttttcaatgaaaattttggccgtcatctgctgttgcgcaccgatatcagcttgaaattgagcagcggccgcaacgcagcatcagcaccggagacattatcggtttcgagttgcgcgcctgtgtcagcaaaaaactcaaaggccgtcacatctactttcgcacctcggattggcaacgtcggcatagctggatggaacgaaagagggaggcgcatggatttacgcttatcaccgtacattgcagcgcctcgatgcaaaccgtgcagactggcgagagacaatttacggttgatcagacggtctacaccggggttctcaaagtaacggacactgaacgttttaacgcagccctcgccaatggcatcggcattaagacccgtgctttcggctttggcatgttggttatttaacagaaggaatcagtatgaaatctatcatcattaacgccacacttaccaccatcggctccttgtctatcgccttgtctatcgccttgccggtctctgaaggtcagcagggcaacaattcccatcgtcacgcgcggcattgatgtagcgggcaacaagcaacaaaccggctacctgccagccagcacgctacgcggatttttacgcgcgccatcgtggtcgaacaaatgacgcaagccgcccccgcagggcatcactacaccctgcaaaaagcctacgccgacttgattggacaggatgccacctccgaatccagtgacgatattgatctgctcaagttgcgtcaaacccgtgaggacaacgcagtactcgatttatttggctcaggtctaggcattaaatcgcgcctgctggtgtcgcatttcttaccgacacataacgtattaccggaagtcttcaccggcgtgcgcaaggatttggacgataccgacggcgtgctggagctgatttctgaagcggatcgcgcgcgttatccggggcgttccgacgcgaacagcaaacgcgcggccgctgtaacggtggtaaaaggactggaggcaaagttgcgcaaagccaaaaaggccggtgagtcactggtcgaattggaactcgcgcggcaagcggcacaggatattgtcgaacgctacgaatccgacatgggcgagatgaccaatttttcacgcacgctgaccaactattttgccctcccggcaggcatcaaactcaaaggccgattagtgattgagaaagcgcgtgagcgtgatctggccatgatcgaactcgcgctgaatagactttcacagcgtccgattcttggcgcgcaaagcgcgcgcggctgcggggaaattgccggcgtattggatgtattagtggatggcctgcttgccaaaaaaatcaccatctgcgcatggcaagcagcgattattagcaatttttctgctgtcgaatcttgaaaataggtttaataatcaatgcataacaacagattggatcaagccaccccttgtttgggtgcttactataaataaaaatctggcattgtttcacgtgaaacaatcggtttggtcgtttacgaaaaagggaagttgaatgttccgttctgccgagcaaggtaattttgccgctatcgtcgcccggcacatcgcctcggctgacgcaccgttattgctggaaggcggcacggggatcggtaaaactcgtgcctatctttccgcgctgattcaatccggtttgcgcgtcactatcgtgctgcctacccatcagttgattgaccagatgttggcctcaaacgacttggcggcgacgcgaagcgcggccagtattgccgcctttcgtccagcgcgactatttgaaaattggtcggactatgaagctaataagcgcgccgcaatggccgcaaccgtgatgttttgcacagcggccagcgtcatcattgatcagcgtctgggcggcgaatataacggcgcaacaaaccgcgactatttgttgtttgatgaagccgatcaactaccggacatggccgcattgcaaagcgacttcaccattacacaggcggaactgacagcgttgggcataacactcagctgcgtgactgaagccttgcaagccattttggtcaaagcgccaaacgtggttgagccggaaaccagagccgccgcacgcatcattctcgatgccatcgagcaaccagcgtggtatcagtccgctggtgtaagcgatgaaggcgacattatgctgacgcacagcttgcccggtcgtttactgaaataaatcagcaattcagcccatttcgcctttgtctctgccacgctaaccgtcgccagacagctcaaggattttcaaaattcgatgggcattgcgacggtaagtaacttgtcgggcgtgatagaaccggagcgtcacggtacgcttgatttccactttatgccggtggtggttgataccgaggaatggcgcagtgccgtcatccgaatggcgaacgaagcgcctaaaccggtgctgatcgcgaccacatcacaccgtttttccagcctgctcggcgaacaattatcaggtgcaacggtaaggtcggacagcgaatccaccgctcacgccgccgtgcgcgtttcagccaatgggttttttattgcagccggtgcctgggcagggctggatacgccgttgcgctggcgttcgatcatcgtgccgcgcgtgccatacggacaaccagtggtgatagacggcgaaaccaccacccgttatttcgatgcgcacaacacggcgattcgccgtttgcgccaggtgataggccgtggtttacgttcggcggatgcaatctgtagcgtttacatcctcgatggcagggctgaaaaattaacgggctttgtaccggagcgtttttccgccgcatgggcatcacgcaaaacgtatttggagggggcgaggcaagcgctgattttgagcaggaacgaacgctatcccgccgtccgtcgtgccgcactcaattactatggtcgaaaatgtatggcgtgtagctttgtgccgcgcgtggatgcacaactggacgtgcatcatctcgacccgattgccgaaggtgttcgctgcatcaggattgaggatgtggtcgttttgtgtgcaaactgtcaccgtctggttcacgctacccatccccctttagcactcaccgatctaattgcgctactcaacgcaacaatatgattatccttaacgtaaaactcgcgcagcgacgaactgtacccctcgccctctgggagaggggggacgggggtgagggaacgggcatggcgggttttatcatcaggggtggttacttttccatgcccgttagatttttttcaattaaattcccgttagctaacggttttccctagcagcctgtcggacatgatgttaaatcatctgactttcctggcaagccggaagaatttgttcccgatttcataaaaataaccttcaggtt

SEQ ID NO: 303 - DNA, 11091 bp, Artificial Sequence
  Synthetic Oligonucleotide
  misc_feature (1)..(7151): n is a, c, g, or t
nnnnnnnnnnnnnnnnnnnnnnnnnnnnnnnnnnnnnnnnnnnnnnnnnnnnnnnnnnnnnnnnnnnnnnnnnnnnnnnnnnnnnnnnnnnnnnnnnnnnnnnnnnnnnnnnnnnnnnnnnnnnnnnnnnnnnnnnnnnnnnnnnnnnnnnnnnnnnnnnnnnnnnnnnnnnnnnnnnnnnnnnnnnnnnnnnnnnnnnnnnnnnnnnnnnnnnnnnnnnnnnnnnnnnnnnnnnnnnnnnnnnnnnnnnnnnnnnnnnnnnnnnnnnnnnnnnnnnnnnnnnnnnnnnnnnnnnnnnnnnnnnnnnnnnnnnnnnnnnnnnnnnnnnnnnnnnnnnnnnnnnnnnnnnnnnnnnnnnnnnnnnnnnnnnnnnnnnnnnnnnnnnnnnnnnnnnnnnnnnnnnnnnnnnnnnnnnnnnnnnnnnnnnnnnnnnnnnnnnnnnnnnnnnnnnnnnnnnnnnnnnnnnnnnnnnnnnnnnnnnnnnnnnnnnnnnnnnnnnnnnnnnnnnnnnnnnnnnnnnnnnnnnnnnnnnnnnnnnnnnnnnnnnnnnnnnnnnnnnnnnnnnnnnnnnnnnnnnnnnnnnnnnnnnnnnnnnnnnnnnnnnnnnnnnnnnnnnnnnnnnnnnnnnnnnnnnnnnnnnnnnnnnnnnnnnnnnnnnnnnnnnnnnnnnnnnnnnnnnnnnnnnnnnnnnnnnnnnnnnnnnnnnnnnnnnnnnnnnnnnnnnnnnnnnnnnnnnnnnnnnnnnnnnnnnnnnnnnnnnnnnnnnnnnnnnnnnnnnnnnnnnnnnnnnnnnnnnnnnnnnnnnnnnnnnnnnnnnnnnnnnnnnnnnnnnnnnnnnnnnnnnnnnnnnnnnnnnnnnnnnnnnnnnnnnnnnnnnnnnnnnnnnnnnnnnnnnnnnnnnnnnnnnnnnnnnnnnnnnnnnnnnnnnnnnnnnnnnnnnnnnnnnnnnnnnnnnnnnnnnnnnnnnnnnnnnnnnnnnnnnnnnnnnnnnnnnnnnnnnnnnnnnnnnnnnnnnnnnnnnnnnnnnnnnnnnnnnnnnnnnnnnnnnnnnnnnnnnnnnnnnnnnnnnnnnnnnnnnnnnnnnnnnnnnnnnnnnnnnnnnnnnnnnnnnnnnnnnnnnnnnnnnnnnnnnnnnnnnnnnnnnnnnnnnnnnnnnnnnnnnnnnnnnnnnnnnnnnnnnnnnnnnnnnnnnnnnnnnnnnnnnnnnnnnnnnnnnnnnnnnnnnnnnnnnnnnnnnnnnnnnnnnnnnnnnnnnnnnnnnnnnnnnnnnnnnnnnnnnnnnnnnnnnnnnnnnnnnnnnnnnnnnnnnnnnnnnnnnnnnnnnnnnnnnnnnnnnnnnnnnnnnnnnnnnnnnnnnnnnnnnnnnnnnnnnnnnnnnnnnnnnnnnnnnnnnnnnnnnnnnnnnnnnnnnnnnnnnnnnnnnnnnnnnnnnnnnnnnnnnnnnnnnnnnnnnnnnnnnnnnnnnnnnnnnnnnnnnnnnnnnnnnnnnnnnnnnnnnnnnnnnnnnnnnnnnnnnnnnnnnnnnnnnnnnnnnnnnnnnnnnnnnnnnnnnnnnnnnnnnnnnnnnnnnnnnnnnnnnnnnnnnnnnnnnnnnnnnnnnnnnnnnnnnnnnnnnnnnnnnnnnnnnnnnnnnnnnnnnnnnnnnnnnnnnnnnnnnnnnnnnnnnnnnnnnnnnnnnnnnnnnnnnnnnnnnnnnnnnnnnnnnnnnnnnnnnnnnnnnnnnnnnnnnnnnnnnnnnnnnnnnnnnnnnnnnnnnnnnnnnnnnnnnnnnnnnnnnnnnnnnnnnnnnnnnnnnnnnnnnnnnnnnnnnnnnnnnnnnnnnnnnnnnnnnnnnnnnnnnnnnnnnnnnnnnnnnnnnnnnnnnnnnnnnnnnnnnnnnnnnnnnnnnnnnnnnnnnnnnnnnnnnnnnnnnnnnnnnnnnnnnnnnnnnnnnnnnnnnnnnnnnnnnnnnnnnnnnnnnnnnnnnnnnnnnnnnnnnnnnnnnnnnnnnnnnnnnnnnnnnnnnnnnnnnnnnnnnnnnnnnnnnnnnnnnnnnnnnnnnnnnnnnnnnnnnnnnnnnnnnnnnnnnnnnnnnnnnnnnnnnnnnnnnnnnnnnnnnnnnnnnnnnnnnnnnnnnnnnnnnnnnnnnnnnnnnnnnnnnnnnnnnnnnnnnnnnnnnnnnnnnnnnnnnnnnnnnnnnnnnnnnnnnnnnnnnnnnnnnnnnnnnnnnnnnnnnnnnnnnnnnnnnnnnnnnnnnnnnnnnnnnnnnnnnnnnnnnnnnnnnnnnnnnnnnnnnnnnnnnnnnnnnnnnnnnnnnnnnnnnnnnnnnnnnnnnnnnnnnnnnnnnnnnnnnnnnnnnnnnnnnnnnnnnnnnnnnnnnnnnnnnnnnnnnnnnnnnnnnnnnnnnnnnnnnnnnnnnnnnnnnnnnnnnnnnnnnnnnnnnnnnnnnnnnnnnnnnnnnnnnnnnnnnnnnnnnnnnnnnnnnnnnnnnnnnnnnnnnnnnnnnnnnnnnnnnnnnnnnnnnnnnnnnnnnnnnnnnnnnnnnnnnnnnnnnnnnnnnnnnnnnnnnnnnnnnnnnnnnnnnnnnnnnnnnnnnnnnnnnnnnnnnnnnnnnnnnnnnnnnnnnnnnnnnnnnnnnnnnnnnnnnnnnnnnnnnnnnnnnnnnnnnnnnnnnnnnnnnnnnnnnnnnnnnnnnnnnnnnnnnnnnnnnnnnnnnnnnnnnnnnnnnnnnnnnnnnnnnnnnnnnnnnnnnnnnnnnnnnnnnnnnnnnnnnnnnnnnnnnnnnnnnnnnnnnnnnnnnnnnnnnnnnnnnnnnnnnnnnnnnnnnnnnnnnnnnnnnnnnnnnnnnnnnnnnnnnnnnnnnnnnnnnnnnnnnnnnnnnnnnnnnnnnnnnnnnnnnnnnnnnnnnnnnnnnnnnnnnnnnnnnnnnnnnnnnnnnnnnnnnnnnnnnnnnnnnnnnnnnnnnnnnnnnnnnnnnnnnnnnnnnnnnnnnnnnnnnnnnnnnnnnnnnnnnnnnnnnnnnnnnnnnnnnnnnnnnnnnnnnnnnnnnnnnnnnnnnnnnnnnnnnnnnnnnnnnnnnnnnnnnnnnnnnnnnnnnnnnnnnnnnnnnnnnnnnnnnnnnnnnnnnnnnnnnnnnnnnnnnnnnnnnnnnnnnnnnnnnnnnnnnnnnnnnnnnnnnnnnnnnnnnnnnnnnnnnnnnnnnnnnnnnnnnnnnnnnnnnnnnnnnnnnnnnnnnnnnnnnnnnnnnnnnnnnnnnnnnnnnnnnnnnnnnnnnnnnnnnnnnnnnnnnnnnnnnnnnnnnnnnnnnnnnnnnnnnnnnnnnnnnnnnnnnnnnnnnnnnnnnnnnnnnnnnnnnnnnnnnnnnnnnnnnnnnnnnnnnnnnnnnnnnnnnnnnnnnnnnnnnnnnnnnnnnnnnnnnnnnnnnnnnnnnnnnnnnnnnnnnnnnnnnnnnnnnnnnnnnnnnnnnnnnnnnnnnnnnnnnnnnnnnnnnnnnnnnnnnnnnnnnnnnnnnnnnnnnnnnnnnnnnnnnnnnnnnnnnnnnnnnnnnnnnnnnnnnnnnnnnnnnnnnnnnnnnnnnnnnnnnnnnnnnnnnnnnnnnnnnnnnnnnnnnnnnnnnnnnnnnnnnnnnnnnnnnnnnnnnnnnnnnnnnnnnnnnnnnnnnnnnnnnnnnnnnnnnnnnnnnnnnnnnnnnnnnnnnnnnnnnnnnnnnnnnnnnnnnnnnnnnnnnnnnnnnnnnnnnnnnnnnnnnnnnnnnnnnnnnnnnnnnnnnnnnnnnnnnnnnnnnnnnnnnnnnnnnnnnnnnnnnnnnnnnnnnnnnnnnnnnnnnnnnnnnnnnnnnnnnnnnnnnnnnnnnnnnnnnnnnnnnnnnnnnnnnnnnnnnnnnnnnnnnnnnnnnnnnnnnnnnnnnnnnnnnnnnnnnnnnnnnnnnnnnnnnnnnnnnnnnnnnnnnnnnnnnnnnnnnnnnnnnnnnnnnnnnnnnnnnnnnnnnnnnnnnnnnnnnnnnnnnnnnnnnnnnnnnnnnnnnnnnnnnnnnnnnnnnnnnnnnnnnnnnnnnnnnnnnnnnnnnnnnnnnnnnnnnnnnnnnnnnnnnnnnnnnnnnnnnnnnnnnnnnnnnnnnnnnnnnnnnnnnnnnnnnnnnnnnnnnnnnnnnnnnnnnnnnnnnnnnnnnnnnnnnnnnnnnnnnnnnnnnnnnnnnnnnnnnnnnnnnnnnnnnnnnnnnnnnnnnnnnnnnnnnnnnnnnnnnnnnnnnnnnnnnnnnnnnnnnnnnnnnnnnnnnnnnnnnnnnnnnnnnnnnnnnnnnnnnnnnnnnnnnnnnnnnnnnnnnnnnnnnnnnnnnnnnnnnnnnnnnnnnnnnnnnnnnnnnnnnnnnnnnnnnnnnnnnnnnnnnnnnnnnnnnnnnnnnnnnnnnnnnnnnnnnnnnnnnnnnnnnnnnnnnnnnnnnnnnnnnnnnnnnnnnnnnnnnnnnnnnnnnnnnnnnnnnnnnnnnnnnnnnnnnnnnnnnnnnnnnnnnnnnnnnnnnnnnnnnnnnnnnnnnnnnnnnnnnnnnnnnnnnnnnnnnnnnnnnnnnnnnnnnnnnnnnnnnnnnnnnnnnnnnnnnnnnnnnnnnnnnnnnnnnnnnnnnnnnnnnnnnnnnnnnnnnnnnnnnnnnnnnnnnnnnnnnnnnnnnnnnnnnnnnnnnnnnnnnnnnnnnnnnnnnnnnnnnnnnnnnnnnnnnnnnnnnnnnnnnnnnnnnnnnnnnnnnnnnnnnnnnnnnnnnnnnnnnnnnnnnnnnnnnnnnnnnnnnnnnnnnnnnnnnnnnnnnnnnnnnnnnnnnnnnnnnnnnnnnnnnnnnnnnnnnnnnnnnnnnnnnnnnnnnnnnnnnnnnnnnnnnnnnnnnnnnnnnnnnnnnnnnnnnnnnnnnnnnnnnnnnnnnnnnnnnnnnnnnnnnnnnnnnnnnnnnnnnnnnnnnnnnnnnnnnnnnnnnnnnnnnnnnnnnnnnnnnnnnnnnnnnnnnnnnnnnnnnnnnnnnnnnnnnnnnnnnnnnnnnnnnnnnnnnnnnnnnnnnnnnnnnnnnnnnnnnnnnnnnnnnnnnnnnnnnnnnnnnnnnnnnnnnnnnnnnnnnnnnnnnnnnnnnnnnnnnnnnnnnnnnnnnnnnnnnnnnnnnnnnnnnnnnnnnnnnnnnnnnnnnnnnnnnnnnnnnnnnnnnnnnnnnnnnnnnnnnnnnnnnnnnnnnnnnnnnnnnnnnnnnnnnnnnnnnnnnnnnnnnnnnnnnnnnnnnnnnnnnnnnnnnnnnnnnnnnnnnnnnnnnnnnnnnnnnnnnnnnnnnnnnnnnnnnnnnnnnnnnnnnnnnnnnnnnnnnnnnnnnnnnnnnnnnnnnnnnnnnnnnnnnnnnnnnnnnnnnnnnnnnnnnnnnnnnnnnnnnnnnnnnnnnnnnnnnnnnnnnnnnnnnnnnnnnnnnnnnnnnnnnnnnnnnnnnnnnnnnnnnnnnnnnnnnnnnnnnnnnnnnnnnnnnnnnnnnnnnnnnnnnnnnnnnnnnnnnnnnnnnnnnnnnnnnnnnnnnnnnnnnnnnnnnnnnnnnnnnnnnnnnnnnnnnnnnnnnnnnnnnnnnnnnnnnnnnnnnnnnnnnnnnnnnnnnnnnnnnnnnnnnnnnnnnnnnnnnnnnnnnnnnnnnnnnnnnnnnnnnnnnnnnnnnnnnnnnnnnnnnnnnnnnnnnnnnnnnnnnnnnnnnnnnnnnnnnnnnnnnnnnnnnnnnnnnnnnnnnnnnnnnnnnnnnnnnnnnnnnnnnnnnnnnnnnnnnnnnnnnnnnnnnnnnnnnnnnnnnnnnnnnnnnnnnnnnnnnnnnnnnnnnnnnnnnnnnnnnnnnnnnnnnnnnnnnnnnnnnnnnnnnnnnnnnnnnnnnnnnnnnnnnnnnnnnnnnnnnnnnnnnnnnnnnnnnnnnnnnnnnnnnnnnnnnnnnnnnnnnnnnnnnnnnnnnnnnnnnnnnnnnnnnnnnnnnnnnnnnnnnnnnnnnnnnnnnnnnnnnnnnnnnnnnnnnnnnnnnnnnnnnnnnnnnnnnnnnnnnnnnnnnnnnnnnnnnnnnnnnnnnnnnnnnnnnnnnnnnnnnnnnnnnnnnnnnnnnnnnnnnnnnnnnnnnnnnnnnnnnnnnnnnnnnnnnnnnnnnnnnnnnnnnnnnnnnnnnnnnnnnnnnnnnnnnnnnnnnnnnnnnnnnnnnnnnnnnnnnnnnnnnnnnnnnnnnnnnnnnnnnnnnnnnnnnnnnnnnnnnnnnnnnnnnnnnnnnnnnnnnnnnnnnnnnnnnnnnnnnnnnnnnnnnnnnnnnnnnnnnnnnnnnnnnnnnnnnnnnnnnnnnnnnnnnnnnnnnnnnnnnnnnnnnnnnnnnnnnnnnnnnnnnnnnnnnnnnnnnnnnnnnnnnnnnnnnnnnnnnnnnnnnnnnnnnnnnnnnnnnnnnnnnnnnnnnnnnnnnnnnnnnnnnnnnnnnnnnnnnnnnnnnnnnnnnnnnnnnnnnnnnnnnnnnnnnnnnnnnnnnnnnnnnnnnnnnnnnnnnnnnnnnnnnnnnnnnnnnnnnnnnnnnnnnnnnnnnnnnnnnnnnnnnnnnnnnnnnnnnnnnnnnnnnnnnnnnnnnnnnnnnnnnnnnnnnnnnnnnnnnnnnnnnnnnnnnnnnnnnnnnnnnnnnnnnnnnnnnnnnnnnnnnnnnnnnnnnnnnnnnnnnnnnnnnnnnnnnnnnnnnnnnnnnnnnnnnnnnnnnnnnnnnnnnnnnnnnnnnnnnnnnnnnnnnnnnnnnnnnnnnnnnnnnnnnnnnnnnnnnnnnnnnnnnnnnnnnnnnnnnnnnnnnnnnnnnnnnnnnnnnnnnnnnnnnnnnnnnnnnnnnnnnnnnnnnnnnnnnnnnnnnnnnnnnnnnnnnnnnnnnnnnnnnnnnnnnnnnnnnnnnnnnnnnnnnnnnnnnnnnnnnnnnnnnnnnnnnnnnnnnnnnnnnnnnnnnnnnnnnnnnnnnnnnnnnnnnnnnnnnnnnnnnnnnnnnnnnnnnnnnnnnnnnnnnnnnnnnnnnnnnnnnnnnnnnnnnnnnnnnnnnnnnnnnnnnnnnnnnnnnnnnnnnnnnnnnnnnnnnnnnnnnnnnnnnnnnnnnnnnnnnnnnnnnnnnnnnnnnnnnnnnnnnnnnnnnnnnnnnnnnnnnnnnnnnnnnnnnnnnnnnnnnnnnncggctcgcaaatatgcgccgtccaggcgaattcccccggccacaccacccgaggacaagtgcagtagatttccttttagtccgacagactcctagaagccacccgtgaatccctctccttcatcgcctcactgcgtcccaatcacagcattgatcccgacctgattctgaaaaataaacacggcaagttacaccacaagttcgacacctcgctgaccaacgtaatgaacagttacacactactcaccgcgccgacggtgacctggtatgcagaaggcaatgccgagctcatttcatgcctgctatcgcccgtgcaatttattggcaagcggcgtgcctctggtttttggttgcgtctcgcattggcaagttgaagccgatgaactggatggtatcgaaggaatgttcggtgaagcgctgcgtccggtgccgattgacttgttcgagggcgacacttcccacccgattgttgatgccgcctggcagcctgcctactggaatcccaatcatcggacggcctgctatgcgccagtttaaggacgtgcaatgctgagttttttcaatgaaaattttggccgtcatctgctgttgcgcaccgatatcagcttgaaattgagcagcggccgcaacgcagcatcagcaccggagacattatcggtttcgagttgcgcgcctgtgtcagcaaaaaactcaaaggccgtcacatctactttcgcacctcggattggcaacgtcggcatagctggatggaacgaaagagggaggcgcatggatttacgcttatcaccgtacattgcagcgcctcgatgcaaaccgtgcagactggcgagagacaatttacggttgatcagacggtctacaccggggttctcaaagtaacggacactgaacgttttaacgcagccctcgccaatggcatcggcattaagacccgtgctttcggctttggcatgttggttatttaacagaaggaatcagtatgaaatctatcatcattaacgccacacttaccaccatcggctccttgtctatcgccttgtctatcgccttgccggtctctgaaggtcagcagggcaacaattcccatcgtcacgcgcggcattgatttagcgggcaacaagcaacaaaccggctacctgccagccagcacgctacgcggatttttacgcgcgccatcgtggtcgaacaaatgacgcaagccgcccccgcagggcatcactacaccctgcaaaaagcctacgccgacttgattggacaggatgccacctccgaatccagtgacgatattgatctgctcaagttgcgtcaaacccgtgaggacaacgcagtactcgatttatttggctcaggtctaggcattaaatcgcgcctgctggtgtcgcatttcttaccgacacataacgtattaccggaagtcttcaccggcgtgcgcaaggatttggacgataccgacggcgtgctggagctgatttctgaagcggatcgcgcgcgttttccggggcgttccgacgcgaacagcaaacgcgcggccgctgtaacggtggtaaaaggactggaggcaaagttgcgcaaagccaaaaaggccggtgagtcactggtcgaattggaactcgcgcggcaagcggcacaggatattgtcgaacgctacgaatccgacatgggcgagatgaccaatttttcacgcacgctgaccaactattttgccctcccggcaggcatcaaactcaaaggccgattagtgattgagaaagcgcgtgagcgtgatctggccatgatcgaactcgcgctgaatagactttcacagcgtccgattcttggcgcgcaaagcgcgcgcggctgcggggaaattgccggcgtattggatgtattagtggatggcctgcttgccaaaaaaatcaccatctgcgcatggcaagcagcgattattagcaatttttctgctgtcgaatcttgaaaataggtttaataatcaatgcataacaacagattggatcaagccaccccttgtttgggtgcttactataaataaaaatctggcattgtttcacgtgaaacaatcggtttggtcgtttacgaaaaagggaagttgaatgttccgttctgccgagcaaggtaattttgccgctatcgtcgcccggcacatcgcctcggctgacgcaccgttattgctggaaggcggcacggggatcggtaaaactcgtgcctatctttccgcgctgattcaatccggtttgcgcgtcactatcgtgctgcctacccatcagttgattgaccagatgttggcctcaaacgacttggcggcgacgcgaagcgcggccagtattgccgcctttcgtccagcgcgactatttgaaaattggtcggactatgaagctaataagcgcgccgcaatggccgcaaccgtgatgttttgcacagcggccagcgtcatcattgatcagcgtctgggcggcgaatataacggcgcaacaaaccgcgactatttgttgtttgatgaagccgatcaactaccggacatggccgcattgcaaagcgacttcaccattacacaggcggaactgacagcgttgggcataacactcagctgcgtgactgaagccttgcaagccattttggtcaaagcgccaaacgtggttgagccggaaaccagagccgccgcacgcatcattctcgatgccatcgagcaaccagcgtggtatcagtccgctggtgtaagcgatgaaggcgacattatgctgacgcacagcttgcccggtcgtttactgaaataaatcagcaattcagcccatttcgcctttgtctctgccacgctaaccgtcgccagacagctcaaggattttcaaaattcgatgggcattgcgacggtaagtaacttgtcgggcgtgatagaaccggagcgtcacggtacgcttgatttccactttatgccggtggtggttgataccgaggaatggcgcagtgccgtcatccgaatggcgaacgaagcgcctaaaccggtgctgatcgcgaccacatcacaccgtttttccagcctgctcggcgaacaattatcaggtgcaacggtaaggtcggacagcgaatccaccgctcacgccgccgtgcgcgtttcagccaatgggttttttattgcagccggtgcctgggcagggctggatacgccgttgcgctggcgttcgatcatcgtgccgcgcgtgccatacggacaaccagtggtgatagacggcgaaaccaccacccgttatttcgatgcgcacaacacggcgattcgccgtttgcgccaggtgataggccgtggtttacgttcggcggatgcaatctgtagcgtttacatcctcgatggcagggctgaaaaattaacgggctttgtaccggagcgtttttccgccgcatgggcatcacgcaaaacgtatttggagggggcgaggcaagcgctgattttgagcaggaacgaacgctatcccgccgtccgtcgtgccgcactcaattactatggtcgaaaatgtatggcgtgtagctttgtgccgcgcgtggatgcacaactggacgtgcatcatctcgacccgattgccgaaggtgttcgctgcatcaggattgaggatgtggtcgttttgtgtgcaaactgtcaccgtctggttcacgctacccatccccctttagcactcaccgatctaattgcgctactcaacgcaacaatatgattatccttaacgtaaaactcgcgcagcgacgaactgtacccctcgccctctgggagaggggggacgggggtgagggaacgggcatggcgggttttatcatcaggggtggttacttttccatgcccgttagatttttttcaattaaattcccgttagctaacggttttccctagcagcctgtcggacatgatgttaaatcatccgactttcctggcaagccggaagaatttgttcccgatttca

SEQ ID NO: 304 - DNA, 11075 bp, Artificial Sequence
  Synthetic Oligonucleotide
  misc_feature (1)..(7167): n is a, c, g, or t
nnnnnnnnnnnnnnnnnnnnnnnnnnnnnnnnnnnnnnnnnnnnnnnnnnnnnnnnnnnnnnnnnnnnnnnnnnnnnnnnnnnnnnnnnnnnnnnnnnnnnnnnnnnnnnnnnnnnnnnnnnnnnnnnnnnnnnnnnnnnnnnnnnnnnnnnnnnnnnnnnnnnnnnnnnnnnnnnnnnnnnnnnnnnnnnnnnnnnnnnnnnnnnnnnnnnnnnnnnnnnnnnnnnnnnnnnnnnnnnnnnnnnnnnnnnnnnnnnnnnnnnnnnnnnnnnnnnnnnnnnnnnnnnnnnnnnnnnnnnnnnnnnnnnnnnnnnnnnnnnnnnnnnnnnnnnnnnnnnnnnnnnnnnnnnnnnnnnnnnnnnnnnnnnnnnnnnnnnnnnnnnnnnnnnnnnnnnnnnnnnnnnnnnnnnnnnnnnnnnnnnnnnnnnnnnnnnnnnnnnnnnnnnnnnnnnnnnnnnnnnnnnnnnnnnnnnnnnnnnnnnnnnnnnnnnnnnnnnnnnnnnnnnnnnnnnnnnnnnnnnnnnnnnnnnnnnnnnnnnnnnnnnnnnnnnnnnnnnnnnnnnnnnnnnnnnnnnnnnnnnnnnnnnnnnnnnnnnnnnnnnnnnnnnnnnnnnnnnnnnnnnnnnnnnnnnnnnnnnnnnnnnnnnnnnnnnnnnnnnnnnnnnnnnnnnnnnnnnnnnnnnnnnnnnnnnnnnnnnnnnnnnnnnnnnnnnnnnnnnnnnnnnnnnnnnnnnnnnnnnnnnnnnnnnnnnnnnnnnnnnnnnnnnnnnnnnnnnnnnnnnnnnnnnnnnnnnnnnnnnnnnnnnnnnnnnnnnnnnnnnnnnnnnnnnnnnnnnnnnnnnnnnnnnnnnnnnnnnnnnnnnnnnnnnnnnnnnnnnnnnnnnnnnnnnnnnnnnnnnnnnnnnnnnnnnnnnnnnnnnnnnnnnnnnnnnnnnnnnnnnnnnnnnnnnnnnnnnnnnnnnnnnnnnnnnnnnnnnnnnnnnnnnnnnnnnnnnnnnnnnnnnnnnnnnnnnnnnnnnnnnnnnnnnnnnnnnnnnnnnnnnnnnnnnnnnnnnnnnnnnnnnnnnnnnnnnnnnnnnnnnnnnnnnnnnnnnnnnnnnnnnnnnnnnnnnnnnnnnnnnnnnnnnnnnnnnnnnnnnnnnnnnnnnnnnnnnnnnnnnnnnnnnnnnnnnnnnnnnnnnnnnnnnnnnnnnnnnnnnnnnnnnnnnnnnnnnnnnnnnnnnnnnnnnnnnnnnnnnnnnnnnnnnnnnnnnnnnnnnnnnnnnnnnnnnnnnnnnnnnnnnnnnnnnnnnnnnnnnnnnnnnnnnnnnnnnnnnnnnnnnnnnnnnnnnnnnnnnnnnnnnnnnnnnnnnnnnnnnnnnnnnnnnnnnnnnnnnnnnnnnnnnnnnnnnnnnnnnnnnnnnnnnnnnnnnnnnnnnnnnnnnnnnnnnnnnnnnnnnnnnnnnnnnnnnnnnnnnnnnnnnnnnnnnnnnnnnnnnnnnnnnnnnnnnnnnnnnnnnnnnnnnnnnnnnnnnnnnnnnnnnnnnnnnnnnnnnnnnnnnnnnnnnnnnnnnnnnnnnnnnnnnnnnnnnnnnnnnnnnnnnnnnnnnnnnnnnnnnnnnnnnnnnnnnnnnnnnnnnnnnnnnnnnnnnnnnnnnnnnnnnnnnnnnnnnnnnnnnnnnnnnnnnnnnnnnnnnnnnnnnnnnnnnnnnnnnnnnnnnnnnnnnnnnnnnnnnnnnnnnnnnnnnnnnnnnnnnnnnnnnnnnnnnnnnnnnnnnnnnnnnnnnnnnnnnnnnnnnnnnnnnnnnnnnnnnnnnnnnnnnnnnnnnnnnnnnnnnnnnnnnnnnnnnnnnnnnnnnnnnnnnnnnnnnnnnnnnnnnnnnnnnnnnnnnnnnnnnnnnnnnnnnnnnnnnnnnnnnnnnnnnnnnnnnnnnnnnnnnnnnnnnnnnnnnnnnnnnnnnnnnnnnnnnnnnnnnnnnnnnnnnnnnnnnnnnnnnnnnnnnnnnnnnnnnnnnnnnnnnnnnnnnnnnnnnnnnnnnnnnnnnnnnnnnnnnnnnnnnnnnnnnnnnnnnnnnnnnnnnnnnnnnnnnnnnnnnnnnnnnnnnnnnnnnnnnnnnnnnnnnnnnnnnnnnnnnnnnnnnnnnnnnnnnnnnnnnnnnnnnnnnnnnnnnnnnnnnnnnnnnnnnnnnnnnnnnnnnnnnnnnnnnnnnnnnnnnnnnnnnnnnnnnnnnnnnnnnnnnnnnnnnnnnnnnnnnnnnnnnnnnnnnnnnnnnnnnnnnnnnnnnnnnnnnnnnnnnnnnnnnnnnnnnnnnnnnnnnnnnnnnnnnnnnnnnnnnnnnnnnnnnnnnnnnnnnnnnnnnnnnnnnnnnnnnnnnnnnnnnnnnnnnnnnnnnnnnnnnnnnnnnnnnnnnnnnnnnnnnnnnnnnnnnnnnnnnnnnnnnnnnnnnnnnnnnnnnnnnnnnnnnnnnnnnnnnnnnnnnnnnnnnnnnnnnnnnnnnnnnnnnnnnnnnnnnnnnnnnnnnnnnnnnnnnnnnnnnnnnnnnnnnnnnnnnnnnnnnnnnnnnnnnnnnnnnnnnnnnnnnnnnnnnnnnnnnnnnnnnnnnnnnnnnnnnnnnnnnnnnnnnnnnnnnnnnnnnnnnnnnnnnnnnnnnnnnnnnnnnnnnnnnnnnnnnnnnnnnnnnnnnnnnnnnnnnnnnnnnnnnnnnnnnnnnnnnnnnnnnnnnnnnnnnnnnnnnnnnnnnnnnnnnnnnnnnnnnnnnnnnnnnnnnnnnnnnnnnnnnnnnnnnnnnnnnnnnnnnnnnnnnnnnnnnnnnnnnnnnnnnnnnnnnnnnnnnnnnnnnnnnnnnnnnnnnnnnnnnnnnnnnnnnnnnnnnnnnnnnnnnnnnnnnnnnnnnnnnnnnnnnnnnnnnnnnnnnnnnnnnnnnnnnnnnnnnnnnnnnnnnnnnnnnnnnnnnnnnnnnnnnnnnnnnnnnnnnnnnnnnnnnnnnnnnnnnnnnnnnnnnnnnnnnnnnnnnnnnnnnnnnnnnnnnnnnnnnnnnnnnnnnnnnnnnnnnnnnnnnnnnnnnnnnnnnnnnnnnnnnnnnnnnnnnnnnnnnnnnnnnnnnnnnnnnnnnnnnnnnnnnnnnnnnnnnnnnnnnnnnnnnnnnnnnnnnnnnnnnnnnnnnnnnnnnnnnnnnnnnnnnnnnnnnnnnnnnnnnnnnnnnnnnnnnnnnnnnnnnnnnnnnnnnnnnnnnnnnnnnnnnnnnnnnnnnnnnnnnnnnnnnnnnnnnnnnnnnnnnnnnnnnnnnnnnnnnnnnnnnnnnnnnnnnnnnnnnnnnnnnnnnnnnnnnnnnnnnnnnnnnnnnnnnnnnnnnnnnnnnnnnnnnnnnnnnnnnnnnnnnnnnnnnnnnnnnnnnnnnnnnnnnnnnnnnnnnnnnnnnnnnnnnnnnnnnnnnnnnnnnnnnnnnnnnnnnnnnnnnnnnnnnnnnnnnnnnnnnnnnnnnnnnnnnnnnnnnnnnnnnnnnnnnnnnnnnnnnnnnnnnnnnnnnnnnnnnnnnnnnnnnnnnnnnnnnnnnnnnnnnnnnnnnnnnnnnnnnnnnnnnnnnnnnnnnnnnnnnnnnnnnnnnnnnnnnnnnnnnnnnnnnnnnnnnnnnnnnnnnnnnnnnnnnnnnnnnnnnnnnnnnnnnnnnnnnnnnnnnnnnnnnnnnnnnnnnnnnnnnnnnnnnnnnnnnnnnnnnnnnnnnnnnnnnnnnnnnnnnnnnnnnnnnnnnnnnnnnnnnnnnnnnnnnnnnnnnnnnnnnnnnnnnnnnnnnnnnnnnnnnnnnnnnnnnnnnnnnnnnnnnnnnnnnnnnnnnnnnnnnnnnnnnnnnnnnnnnnnnnnnnnnnnnnnnnnnnnnnnnnnnnnnnnnnnnnnnnnnnnnnnnnnnnnnnnnnnnnnnnnnnnnnnnnnnnnnnnnnnnnnnnnnnnnnnnnnnnnnnnnnnnnnnnnnnnnnnnnnnnnnnnnnnnnnnnnnnnnnnnnnnnnnnnnnnnnnnnnnnnnnnnnnnnnnnnnnnnnnnnnnnnnnnnnnnnnnnnnnnnnnnnnnnnnnnnnnnnnnnnnnnnnnnnnnnnnnnnnnnnnnnnnnnnnnnnnnnnnnnnnnnnnnnnnnnnnnnnnnnnnnnnnnnnnnnnnnnnnnnnnnnnnnnnnnnnnnnnnnnnnnnnnnnnnnnnnnnnnnnnnnnnnnnnnnnnnnnnnnnnnnnnnnnnnnnnnnnnnnnnnnnnnnnnnnnnnnnnnnnnnnnnnnnnnnnnnnnnnnnnnnnnnnnnnnnnnnnnnnnnnnnnnnnnnnnnnnnnnnnnnnnnnnnnnnnnnnnnnnnnnnnnnnnnnnnnnnnnnnnnnnnnnnnnnnnnnnnnnnnnnnnnnnnnnnnnnnnnnnnnnnnnnnnnnnnnnnnnnnnnnnnnnnnnnnnnnnnnnnnnnnnnnnnnnnnnnnnnnnnnnnnnnnnnnnnnnnnnnnnnnnnnnnnnnnnnnnnnnnnnnnnnnnnnnnnnnnnnnnnnnnnnnnnnnnnnnnnnnnnnnnnnnnnnnnnnnnnnnnnnnnnnnnnnnnnnnnnnnnnnnnnnnnnnnnnnnnnnnnnnnnnnnnnnnnnnnnnnnnnnnnnnnnnnnnnnnnnnnnnnnnnnnnnnnnnnnnnnnnnnnnnnnnnnnnnnnnnnnnnnnnnnnnnnnnnnnnnnnnnnnnnnnnnnnnnnnnnnnnnnnnnnnnnnnnnnnnnnnnnnnnnnnnnnnnnnnnnnnnnnnnnnnnnnnnnnnnnnnnnnnnnnnnnnnnnnnnnnnnnnnnnnnnnnnnnnnnnnnnnnnnnnnnnnnnnnnnnnnnnnnnnnnnnnnnnnnnnnnnnnnnnnnnnnnnnnnnnnnnnnnnnnnnnnnnnnnnnnnnnnnnnnnnnnnnnnnnnnnnnnnnnnnnnnnnnnnnnnnnnnnnnnnnnnnnnnnnnnnnnnnnnnnnnnnnnnnnnnnnnnnnnnnnnnnnnnnnnnnnnnnnnnnnnnnnnnnnnnnnnnnnnnnnnnnnnnnnnnnnnnnnnnnnnnnnnnnnnnnnnnnnnnnnnnnnnnnnnnnnnnnnnnnnnnnnnnnnnnnnnnnnnnnnnnnnnnnnnnnnnnnnnnnnnnnnnnnnnnnnnnnnnnnnnnnnnnnnnnnnnnnnnnnnnnnnnnnnnnnnnnnnnnnnnnnnnnnnnnnnnnnnnnnnnnnnnnnnnnnnnnnnnnnnnnnnnnnnnnnnnnnnnnnnnnnnnnnnnnnnnnnnnnnnnnnnnnnnnnnnnnnnnnnnnnnnnnnnnnnnnnnnnnnnnnnnnnnnnnnnnnnnnnnnnnnnnnnnnnnnnnnnnnnnnnnnnnnnnnnnnnnnnnnnnnnnnnnnnnnnnnnnnnnnnnnnnnnnnnnnnnnnnnnnnnnnnnnnnnnnnnnnnnnnnnnnnnnnnnnnnnnnnnnnnnnnnnnnnnnnnnnnnnnnnnnnnnnnnnnnnnnnnnnnnnnnnnnnnnnnnnnnnnnnnnnnnnnnnnnnnnnnnnnnnnnnnnnnnnnnnnnnnnnnnnnnnnnnnnnnnnnnnnnnnnnnnnnnnnnnnnnnnnnnnnnnnnnnnnnnnnnnnnnnnnnnnnnnnnnnnnnnnnnnnnnnnnnnnnnnnnnnnnnnnnnnnnnnnnnnnnnnnnnnnnnnnnnnnnnnnnnnnnnnnnnnnnnnnnnnnnnnnnnnnnnnnnnnnnnnnnnnnnnnnnnnnnnnnnnnnnnnnnnnnnnnnnnnnnnnnnnnnnnnnnnnnnnnnnnnnnnnnnnnnnnnnnnnnnnnnnnnnnnnnnnnnnnnnnnnnnnnnnnnnnnnnnnnnnnnnnnnnnnnnnnnnnnnnnnnnnnnnnnnnnnnnnnnnnnnnnnnnnnnnnnnnnnnnnnnnnnnnnnnnnnnnnnnnnnnnnnnnnnnnnnnnnnnnnnnnnnnnnnnnnnnnnnnnnnnnnnnnnnnnnnnnnnnnnnnnnnnnnnnnnnnnnnnnnnnnnnnnnnnnnnnnnnnnnnnnnnnnnnnnnnnnnnnnnnnnnnnnnnnnnnnnnnnnnnnnnnnnnnnnnnnnnnnnnnnnnnnnnnnnnnnnnnnnnnnnnnnnnnnnnnnnnnnnnnnnnnnnnnnnnnnnnnnnnnnnnnnnnnnnnnnnnnnnnnnnnnnnnnnnnnnnnnnnnnnnnnnnnnnnnnnnnnnnnnnnnnnnnnnnnnnnnnnnnnnnnnnnnnnnnnnnnnnnnnnnnnnnnnnnnnnnnnnnnnnnnnnnnnnnnnnnnnnnnnnnnnnnnnnnnnnnnnnnnnnnnnnnnnnnnnnnnnnnnnnnnnnnnnnnnnnnnnnnnnnnnnnnnnnnnnnnnnnnnnnnnnnnnnnnnnnnnnnnnnnnnnnnnnnnnnnnnnnnnnnnnnnnnnnnnnnnnnnnnnnnnnnnnnnnnnnnnnnnnnnnnnnnnnnnnnnnnnnnnnnnnnnnnnnnnnnnnnnnnnnnnnnnnnnnnnnnnnnnnnnnnnnnnnnnnnnnnnnnnnnnnnnnnnnnnnnnnnnnnnnnnnnnnnnnnnnnnnnnnnnnnnnnnnnnnnnnnnnnnnnnnnnnnnnnnnnnnnnnnnnnnnnnnnnnnnnnnnnnnnnnnnnnnnnnnnnnnnnnnnnnnnnnnnnnnnnnnnnnnnnnnnnnnnnnnnnnnnnnnnnnnnnnnnnnnnnnnnnnnnnnnnnnnnnnnnnnnnnnnnnnnnnnnnnnnnnnnnnnnnnnnnnnnnnnnnnnnnnnnnnnnnnnnnnnnnnnnnnnnnnnnnnnnnnnnnnnnnnnnnnnnnnnnnnnnnnnnnnnnnnnnnnnnnnnnnnnnnnnnnnnnnnnnnnnnnnnnnnnnnnnnnnnnnnnnnnnnnnnnnnnnnnnnnnnnnnnnnnnnnnnnnnnnnnnnnnnnnnnnnnnnnnnnnnnnnnnnnnnnnnnnnnnnnnnnnnnnnnnnnnnnnnnnnnnnnnnnnnnnnnnnnnnnnnnnnnnnnnnnnnnnnnnnnnnnnnnnnnnnnnnnnnnnnnnnnnnnnnnnnnnnnnnnnnnnnnnnnnnnnnnnnnnnnnnnnnnnnnnnnnnnnnnnnnnnnnnnnnnnnnnnnnnnnnnnnnnnnnnnnnnnnnnnnnnnnnnnnnnnnnnnnnnnnnnnnnnnnnnnnnnnnnnnnnnnnnnnnnnnnnnnnnnnnnnnnngccgtccaggcgaattcccccggccacaccacccgaggacaagtgcagtagatttccttttagtccgacagactcctagaagccacccgtgaatccctctccttcatcgcctcactgcgtcccaatcacagcattgatcccgacctgattctgaaaaataaacacggcaagttacaccacaagttcgacacctcgctgaccaacgtaatgaacagttacacactactcaccgcgccgacggtgacctggtatgcagaaggcaatgccgagctcatttcatgcctgctatcgcccgtgcaatttattggcaagcggcgtgcctctggtttttggttgcgtctcgcattggcaagttgaagccgatgaactggatggtatcgaaggaatgttcggtgaagcgctgcgtccggtgccgattgacttgttcgagggcgacacttcccacccgattgttgatgccgcctggcagcctgcctactggaatcccaatcatcggacggcctgctatgcgccagtttaaggacgtgcaatgctgagttttttcaatgaaaattttggccgtcatctgctgttgcgcaccgatatcagcttgaaattgagcagcggccgcaacgcagcatcagcaccggagacattatcggtttcgagttgcgcgcctgtgtcagcaaaaaactcaaaggccgtcacatctactttcgcacctcggattggcaacgtcggcatagctggatggaacgaaagagggaggcgcatggatttacgcttatcaccgtacattgcagcgcctcgatgcaaaccgtgcagactggcgagagacaatttacggttgatcagacggtctacaccggggttctcaaagtaacggacactgaacgttttaacgcagccctcgccaatggcatcggcattaagacccgtgctttcggctttggcatgttggttatttaacagaaggaatcagtatgaaatctatcatcattaacgccacacttaccaccatcggctccttgtctatcgccttgtctatcgccttgccggtctctgaaggtcagcagggcaacaattcccatcgtcacgcgcggcattgatgtagcgggcaacaagcaacaaaccggctacctgccagccagcacgctacgcggatttttacgcgcgccatcgtggtcgaacaaatgacgcaagccgcccccgcagggcatcactacaccctgcaaaaagcctacgccgacttgattggacaggatgccacctccgaatccagtgacgatattgatctgctcaagttgcgtcaaacccgtgaggacaacgcagtactcgatttatttggctcaggtctaggcattaaatcgcgcctgctggtgtcgcatttcttaccgacacataacgtattaccggaagtcttcaccggcgtgcgcaaggatttggacgataccgacggcgtgctggagctgatttctgaagcggatcgcgcgcgttatccggggcgttccgacgcgaacagcaaacgcgcggccgctgtaacggtggtaaaaggactggaggcaaagttgcgcaaagccaaaaaggccggtgagtcactggtcgaattggaactcgcgcggcaagcggcacaggatattgtcgaacgctacgaatccgacatgggcgagatgaccaatttttcacgcacgctgaccaactattttgccctcccggcaggcatcaaactcaaaggccgattagtgattgagaaagcgcgtgagcgtgatctggccatgatcgaactcgcgctgaatagactttcacagcgtccgattcttggcgcgcaaagcgcgcgcggctgcggggaaattgccggcgtattggatgtattagtggatggcctgcttgccaaaaaaatcaccatctgcgcatggcaagcagcgattattagcaatttttctgctgtcgaatcttgaaaataggtttaataatcaatgcataacaacagattggatcaagccaccccttgtttgggtgcttactataaataaaaatctggcattgtttcacgtgaaacaatcggtttggtcgtttacgaaaaagggaagttgaatgttccgttctgccgagcaaggtaattttgccgctatcgtcgcccggcacatcgcctcggctgacgcaccgttattgctggaaggcggcacggggatcggtaaaactcgtgcctatctttccgcgctgattcaatccggtttgcgcgtcactatcgtgctgcctacccatcagttgattgaccagatgttggcctcaaacgacttggcggcgacgcgaagcgcggccagtattgccgcctttcgtccagcgcgactatttgaaaattggtcggactatgaagctaataagcgcgccgcaatggccgcaaccgtgatgttttgcacagcggccagcgtcatcattgatcagcgtctgggcggcgaatataacggcgcaacaaaccgcgactatttgttgtttgatgaagccgatcaactaccggacatggccgcattgcaaagcgacttcaccattacacaggcggaactgacagcgttgggcataacactcagctgcgtgactgaagccttgcaagccattttggtcaaagcgccaaacgtggttgagccggaaaccagagccgccgcacgcatcattctcgatgccatcgagcaaccagcgtggtatcagtccgctggtgtaagcgatgaaggcgacattatgctgacgcacagcttgcccggtcgtttactgaaataaatcagcaattcagcccatttcgcctttgtctctgccacgctaaccgtcgccagacagctcaaggattttcaaaattcgatgggcattgcgacggtaagtaacttgtcgggcgtgatagaaccggagcgtcacggtacgcttgatttccactttatgccggtggtggttgataccgaggaatggcgcagtgccgtcatccgaatggcgaacgaagcgcctaaaccggtgctgatcgcgaccacatcacaccgtttttccagcctgctcggcgaacaattatcaggtgcaacggtaaggtcggacagcgaatccaccgctcacgccgccgtgcgcgtttcagccaatgggttttttattgcagccggtgcctgggcagggctggatacgccgttgcgctggcgttcgatcatcgtgccgcgcgtgccatacggacaaccagtggtgatagacggcgaaaccaccacccgttatttcgatgcgcacaacacggcgattcgccgtttgcgccaggtgataggccgtggtttacgttcggcggatgcaatctgtagcgtttacatcctcgatggcagggctgaaaaattaacgggctttgtaccggagcgtttttccgccgcatgggcatcacgcaaaacgtatttggagggggcgaggcaagcgctgattttgagcaggaacgaacgctatcccgccgtccgtcgtgccgcactcaattactatggtcgaaaatgtatggcgtgtagctttgtgccgcgcgtggatgcacaactggacgtgcatcatctcgacccgattgccgaaggtgttcgctgcatcaggattgaggatgtggtcgttttgtgtgcaaactgtcaccgtctggttcacgctacccatccccctttagcactcaccgatctaattgcgctactcaacgcaacaatatgattatccttaacgtaaaactcgcgcagcgacgaactgtacccctcgccctctgggagaggggggacgggggtgagggaacgggcatggcgggttttatcatcaggggtggttacttttccatgcccgttagatttttttcaattaaattcccgttagctaacggttttccctagcagcctgtcggacatgatgttaaatcatccgactttcctggcaagccggaagaa

SEQ ID NO: 305 - DNA, 11075 bp, Artificial Sequence; identical to SEQ ID NO: 304
  Synthetic Oligonucleotide
  misc_feature (1)..(7167): n is a, c, g, or t

SEQ ID NO: 306 - DNA, 11075 bp, Artificial Sequence; identical to SEQ ID NO: 304
  Synthetic Oligonucleotide
  misc_feature (1)..(7167): n is a, c, g, or t

SEQ ID NO: 307 - DNA, 11075 bp, Artificial Sequence; identical to SEQ ID NO: 304
  Synthetic Oligonucleotide
  misc_feature (1)..(7167): n is a, c, g, or t

SEQ ID NO: 308 - DNA, 11075 bp, Artificial Sequence; identical to SEQ ID NO: 304
  Synthetic Oligonucleotide
  misc_feature (1)..(7167): n is a, c, g, or t

SEQ ID NO: 309 - DNA, 11075 bp, Artificial Sequence
  Synthetic Oligonucleotide
  misc_feature (1)..(7167): n is a, c, g, or t
nnnnnnnnnnnnnnnnnnnnnnnnnnnnnnnnnnnnnnnnnnnnnnnnnnnnnnnnnnnnnnnnnnnnnnnnnnnnnnnnnnnnnnnnnnnnnnnnnnnnnnnnnnnnnnnnnnnnnnnnnnnnnnnnnnnnnnnnnnnnnnnnnnnnnnnnnnnnnnnnnnnnnnnnnnnnnnnnnnnnnnnnnnnnnnnnnnnnnnnnnnnnnnnnnnnnnnnnnnnnnnnnnnnnnnnnnnnnnnnnnnnnnnnnnnnnnnnnnnnnnnnnnnnnnnnnnnnnnnnnnnnnnnnnnnnnnnnnnnnnnnnnnnnnnnnnnnnnnnnnnnnnnnnnnnnnnnnnnnnnnnnnnnnnnnnnnnnnnnnnnnnnnnnnnnnnnnnnnnnnnnnnnnnnnnnnnnnnnnnnnnnnnnnnnnnnnnnnnnnnnnnnnnnnnnnnnnnnnnnnnnnnnnnnnnnnnnnnnnnnnnnnnnnnnnnnnnnnnnnnnnnnnnnnnnnnnnnnnnnnnnnnnnnnnnnnnnnnnnnnnnnnnnnnnnnnnnnnnnnnnnnnnnnnnnnnnnnnnnnnnnnnnnnnnnnnnnnnnnnnnnnnnnnnnnnnnnnnnnnnnnnnnnnnnnnnnnnnnnnnnnnnnnnnnnnnnnnnnnnnnnnnnnnnnnnnnnnnnnnnnnnnnnnnnnnnnnnnnnnnnnnnnnnnnnnnnnnnnnnnnnnnnnnnnnnnnnnnnnnnnnnnnnnnnnnnnnnnnnnnnnnnnnnnnnnnnnnnnnnnnnnnnnnnnnnnnnnnnnnnnnnnnnnnnnnnnnnnnnnnnnnnnnnnnnnnnnnnnnnnnnnnnnnnnnnnnnnnnnnnnnnnnnnnnnnnnnnnnnnnnnnnnnnnnnnnnnnnnnnnnnnnnnnnnnnnnnnnnnnnnnnnnnnnnnnnnnnnnnnnnnnnnnnnnnnnnnnnnnnnnnnnnnnnnnnnnnnnnnnnnnnnnnnnnnnnnnnnnnnnnnnnnnnnnnnnnnnnnnnnnnnnnnnnnnnnnnnnnnnnnnnnnnnnnnnnnnnnnnnnnnnnnnnnnnnnnnnnnnnnnnnnnnnnnnnnnnnnnnnnnnnnnnnnnnnnnnnnnnnnnnnnnnnnnnnnnnnnnnnnnnnnnnnnnnnnnnnnnnnnnnnnnnnnnnnnnnnnnnnnnnnnnnnnnnnnnnnnnnnnnnnnnnnnnnnnnnnnnnnnnnnnnnnnnnnnnnnnnnnnnnnnnnnnnnnnnnnnnnnnnnnnnnnnnnnnnnnnnnnnnnnnnnnnnnnnnnnnnnnnnnnnnnnnnnnnnnnnnnnnnnnnnnnnnnnnnnnnnnnnnnnnnnnnnnnnnnnnnnnnnnnnnnnnnnnnnnnnnnnnnnnnnnnnnnnnnnnnnnnnnnnnnnnnnnnnnnnnnnnnnnnnnnnnnnnnnnnnnnnnnnnnnnnnnnnnnnnnnnnnnnnnnnnnnnnnnnnnnnnnnnnnnnnnnnnnnnnnnnnnnnnnnnnnnnnnnnnnnnnnnnnnnnnnnnnnnnnnnnnnnnnnnnnnnnnnnnnnnnnnnnnnnnnnnnnnnnnnnnnnnnnnnnnnnnnnnnnnnnnnnnnnnnnnnnnnnnnnnnnnnnnnnnnnnnnnnnnnnnnnnnnnnnnnnnnnnnnnnnnnnnnnnnnnnnnnnnnnnnnnnnnnnnnnnnnnnnnnnnnnnnnnnnnnnnnnnnnnnnnnnnnnnnnnnnnnnnnnnnnnnnnnnnnnnnnnnnnnnnnnnnnnnnnnnnnnnnnnnnnnnnnnnnnnnnnnnnnnnnnnnnnnnnnnnnnnnnnnnnnnnnnnnnnnnnnnnnnnnnnnnnnnnnnnnnnnnnnnnnnnnnnnnnnnnnnnnnnnnnnnnnnnnnnnnnnnnnnnnnnnnnnnnnnnnnnnnnnnnnnnnnnnnnnnnnnnnnnnnnnnnnnnnnnnnnnnnnnnnnnnnnnnnnnnnnnnnnnnnnnnnnnnnnnnnnnnnnnnnnnnnnnnnnnnnnnnnnnnnnnnnnnnnnnnnnnnnnnnnnnnnnnnnnnnnnnnnnnnnnnnnnnnnnnnnnnnnnnnnnnnnnnnnnnnnnnnnnnnnnnnnnnnnnnnnnnnnnnnnnnnnnnnnnnnnnnnnnnnnnnnnnnnnnnnnnnnnnnnnnnnnnnnnnnnnnnnnnnnnnnnnnnnnnnnnnnnnnnnnnnnnnnnnnnnnnnnnnnnnnnnnnnnnnnnnnnnnnnnnnnnnnnnnnnnnnnnnnnnnnnnnnnnnnnnnnnnnnnnnnnnnnnnnnnnnnnnnnnnnnnnnnnnnnnnnnnnnnnnnnnnnnnnnnnnnnnnnnnnnnnnnnnnnnnnnnnnnnnnnnnnnnnnnnnnnnnnnnnnnnnnnnnnnnnnnnnnnnnnnnnnnnnnnnnnnnnnnnnnnnnnnnnnnnnnnnnnnnnnnnnnnnnnnnnnnnnnnnnnnnnnnnnnnnnnnnnnnnnnnnnnnnnnnnnnnnnnnnnnnnnnnnnnnnnnnnnnnnnnnnnnnnnnnnnnnnnnnnnnnnnnnnnnnnnnnnnnnnnnnnnnnnnnnnnnnnnnnnnnnnnnnnnnnnnnnnnnnnnnnnnnnnnnnnnnnnnnnnnnnnnnnnnnnnnnnnnnnnnnnnnnnnnnnnnnnnnnnnnnnnnnnnnnnnnnnnnnnnnnnnnnnnnnnnnnnnnnnnnnnnnnnnnnnnnnnnnnnnnnnnnnnnnnnnnnnnnnnnnnnnnnnnnnnnnnnnnnnnnnnnnnnnnnnnnnnnnnnnnnnnnnnnnnnnnnnnnnnnnnnnnnnnnnnnnnnnnnnnnnnnnnnnnnnnnnnnnnnnnnnnnnnnnnnnnnnnnnnnnnnnnnnnnnnnnnnnnnnnnnnnnnnnnnnnnnnnnnnnnnnnnnnnnnnnnnnnnnnnnnnnnnnnnnnnnnnnnnnnnnnnnnnnnnnnnnnnnnnnnnnnnnnnnnnnnnnnnnnnnnnnnnnnnnnnnnnnnnnnnnnnnnnnnnnnnnnnnnnnnnnnnnnnnnnnnnnnnnnnnnnnnnnnnnnnnnnnnnnnnnnnnnnnnnnnnnnnnnnnnnnnnnnnnnnnnnnnnnnnnnnnnnnnnnnnnnnnnnnnnnnnnnnnnnnnnnnnnnnnnnnnnnnnnnnnnnnnnnnnnnnnnnnnnnnnnnnnnnnnnnnnnnnnnnnnnnnnnnnnnnnnnnnnnnnnnnnnnnnnnnnnnnnnnnnnnnnnnnnnnnnnnnnnnnnnnnnnnnnnnnnnnnnnnnnnnnnnnnnnnnnnnnnnnnnnnnnnnnnnnnnnnnnnnnnnnnnnnnnnnnnnnnnnnnnnnnnnnnnnnnnnnnnnnnnnnnnnnnnnnnnnnnnnnnnnnnnnnnnnnnnnnnnnnnnnnnnnnnnnnnnnnnnnnnnnnnnnnnnnnnnnnnnnnnnnnnnnnnnnnnnnnnnnnnnnnnnnnnnnnnnnnnnnnnnnnnnnnnnnnnnnnnnnnnnnnnnnnnnnnnnnnnnnnnnnnnnnnnnnnnnnnnnnnnnnnnnnnnnnnnnnnnnnnnnnnnnnnnnnnnnnnnnnnnnnnnnnnnnnnnnnnnnnnnnnnnnnnnnnnnnnnnnnnnnnnnnnnnnnnnnnnnnnnnnnnnnnnnnnnnnnnnnnnnnnnnnnnnnnnnnnnnnnnnnnnnnnnnnnnnnnnnnnnnnnnnnnnnnnnnnnnnnnnnnnnnnnnnnnnnnnnnnnnnnnnnnnnnnnnnnnnnnnnnnnnnnnnnnnnnnnnnnnnnnnnnnnnnnnnnnnnnnnnnnnnnnnnnnnnnnnnnnnnnnnnnnnnnnnnnnnnnnnnnnnnnnnnnnnnnnnnnnnnnnnnnnnnnnnnnnnnnnnnnnnnnnnnnnnnnnnnnnnnnnnnnnnnnnnnnnnnnnnnnnnnnnnnnnnnnnnnnnnnnnnnnnnnnnnnnnnnnnnnnnnnnnnnnnnnnnnnnnnnnnnnnnnnnnnnnnnnnnnnnnnnnnnnnnnnnnnnnnnnnnnnnnnnnnnnnnnnnnnnnnnnnnnnnnnnnnnnnnnnnnnnnnnnnnnnnnnnnnnnnnnnnnnnnnnnnnnnnnnnnnnnnnnnnnnnnnnnnnnnnnnnnnnnnnnnnnnnnnnnnnnnnnnnnnnnnnnnnnnnnnnnnnnnnnnnnnnnnnnnnnnnnnnnnnnnnnnnnnnnnnnnnnnnnnnnnnnnnnnnnnnnnnnnnnnnnnnnnnnnnnnnnnnnnnnnnnnnnnnnnnnnnnnnnnnnnnnnnnnnnnnnnnnnnnnnnnnnnnnnnnnnnnnnnnnnnnnnnnnnnnnnnnnnnnnnnnnnnnnnnnnnnnnnnnnnnnnnnnnnnnnnnnnnnnnnnnnnnnnnnnnnnnnnnnnnnnnnnnnnnnnnnnnnnnnnnnnnnnnnnnnnnnnnnnnnnnnnnnnnnnnnnnnnnnnnnnnnnnnnnnnnnnnnnnnnnnnnnnnnnnnnnnnnnnnnnnnnnnnnnnnnnnnnnnnnnnnnnnnnnnnnnnnnnnnnnnnnnnnnnnnnnnnnnnnnnnnnnnnnnnnnnnnnnnnnnnnnnnnnnnnnnnnnnnnnnnnnnnnnnnnnnnnnnnnnnnnnnnnnnnnnnnnnnnnnnnnnnnnnnnnnnnnnnnnnnnnnnnnnnnnnnnnnnnnnnnnnnnnnnnnnnnnnnnnnnnnnnnnnnnnnnnnnnnnnnnnnnnnnnnnnnnnnnnnnnnnnnnnnnnnnnnnnnnnnnnnnnnnnnnnnnnnnnnnnnnnnnnnnnnnnnnnnnnnnnnnnnnnnnnnnnnnnnnnnnnnnnnnnnnnnnnnnnnnnnnnnnnnnnnnnnnnnnnnnnnnnnnnnnnnnnnnnnnnnnnnnnnnnnnnnnnnnnnnnnnnnnnnnnnnnnnnnnnnnnnnnnnnnnnnnnnnnnnnnnnnnnnnnnnnnnnnnnnnnnnnnnnnnnnnnnnnnnnnnnnnnnnnnnnnnnnnnnnnnnnnnnnnnnnnnnnnnnnnnnnnnnnnnnnnnnnnnnnnnnnnnnnnnnnnnnnnnnnnnnnnnnnnnnnnnnnnnnnnnnnnnnnnnnnnnnnnnnnnnnnnnnnnnnnnnnnnnnnnnnnnnnnnnnnnnnnnnnnnnnnnnnnnnnnnnnnnnnnnnnnnnnnnnnnnnnnnnnnnnnnnnnnnnnnnnnnnnnnnnnnnnnnnnnnnnnnnnnnnnnnnnnnnnnnnnnnnnnnnnnnnnnnnnnnnnnnnnnnnnnnnnnnnnnnnnnnnnnnnnnnnnnnnnnnnnnnnnnnnnnnnnnnnnnnnnnnnnnnnnnnnnnnnnnnnnnnnnnnnnnnnnnnnnnnnnnnnnnnnnnnnnnnnnnnnnnnnnnnnnnnnnnnnnnnnnnnnnnnnnnnnnnnnnnnnnnnnnnnnnnnnnnnnnnnnnnnnnnnnnnnnnnnnnnnnnnnnnnnnnnnnnnnnnnnnnnnnnnnnnnnnnnnnnnnnnnnnnnnnnnnnnnnnnnnnnnnnnnnnnnnnnnnnnnnnnnnnnnnnnnnnnnnnnnnnnnnnnnnnnnnnnnnnnnnnnnnnnnnnnnnnnnnnnnnnnnnnnnnnnnnnnnnnnnnnnnnnnnnnnnnnnnnnnnnnnnnnnnnnnnnnnnnnnnnnnnnnnnnnnnnnnnnnnnnnnnnnnnnnnnnnnnnnnnnnnnnnnnnnnnnnnnnnnnnnnnnnnnnnnnnnnnnnnnnnnnnnnnnnnnnnnnnnnnnnnnnnnnnnnnnnnnnnnnnnnnnnnnnnnnnnnnnnnnnnnnnnnnnnnnnnnnnnnnnnnnnnnnnnnnnnnnnnnnnnnnnnnnnnnnnnnnnnnnnnnnnnnnnnnnnnnnnnnnnnnnnnnnnnnnnnnnnnnnnnnnnnnnnnnnnnnnnnnnnnnnnnnnnnnnnnnnnnnnnnnnnnnnnnnnnnnnnnnnnnnnnnnnnnnnnnnnnnnnnnnnnnnnnnnnnnnnnnnnnnnnnnnnnnnnnnnnnnnnnnnnnnnnnnnnnnnnnnnnnnnnnnnnnnnnnnnnnnnnnnnnnnnnnnnnnnnnnnnnnnnnnnnnnnnnnnnnnnnnnnnnnnnnnnnnnnnnnnnnnnnnnnnnnnnnnnnnnnnnnnnnnnnnnnnnnnnnnnnnnnnnnnnnnnnnnnnnnnnnnnnnnnnnnnnnnnnnnnnnnnnnnnnnnnnnnnnnnnnnnnnnnnnnnnnnnnnnnnnnnnnnnnnnnnnnnnnnnnnnnnnnnnnnnnnnnnnnnnnnnnnnnnnnnnnnnnnnnnnnnnnnnnnnnnnnnnnnnnnnnnnnnnnnnnnnnnnnnnnnnnnnnnnnnnnnnnnnnnnnnnnnnnnnnnnnnnnnnnnnnnnnnnnnnnnnnnnnnnnnnnnnnnnnnnnnnnnnnnnnnnnnnnnnnnnnnnnnnnnnnnnnnnnnnnnnnnnnnnnnnnnnnnnnnnnnnnnnnnnnnnnnnnnnnnnnnnnnnnnnnnnnnnnnnnnnnnnnnnnnnnnnnnnnnnnnnnnnnnnnnnnnnnnnnnnnnnnnnnnnnnnnnnnnnnnnnnnnnnnnnnnnnnnnnnnnnnnnnnnnnnnnnnnnnnnnnnnnnnnnnnnnnnnnnnnnnnnnnnnnnnnnnnnnnnnnnnnnnnnnnnnnnnnnnnnnnnnnnnnnnnnnnnnnnnnnnnnnnnnnnnnnnnnnnnnnnnnnnnnnnnnnnnnnnnnnnnnnnnnnnnnnnnnnnnnnnnnnnnnnnnnnnnnnnnnnnnnnnnnnnnnnnnnnnnnnnnnnnnnnnnnnnnnnnnnnnnnnnnnnnnnnnnnnnnnnnnnnnnnnnnnnnnnnnnnnnnnnnnnnnnnnnnnnnnnnnnnnnnnnnnnnnnnnnnnnnnnnnnnnnnnnnnnnnnnnnnnnnnnnnnnnnnnnnnnnnnnnnnnnnnnnnnnnnnnnnnnnnnnnnnnnnnnnnnnnnnnnnnnnnnnnnnnnnnnnnnnnnnnnnnnnnnnnnnnnnnnnnnnnnnnnnnnnnnnnnnnnnnnnnnnnnnnnnnnnnnnnnnnnnnnnnnnnnnnnnnnnnnnnnnnnnnnnnnnnnnnnnnnnnnnnnnnnnnnnnnnnnnnnnnnnnnnnnnnnnnnnnnnnnnnnnnnnnnnnnnnnnnnnnnnnnnnnnnnnnnnnnnnnnnnnnnnnnnnnnnnnnnnnnnnnnnnnnnnnnnnnnnnnnnngccgtccaggcgaattcccccggccacaccacccgaggacaagtgcagtagatttccttttagtccgacagactcctagaagccacccgtgaatccctctccttcatcgcctcactgcgtcccaatcacagcattgatcccgacctgattctgaaaaataaacacggcaagttacaccacaagttcgacacctcgctgaccaacgtaatgaacagttacacactactcaccgcgccgacggtgacctggtatgcagaaggcaatgccgagctcatttcatgcctgctatcgcccgtgcaatttattggcaagcggcgtgcctctggtttttggttgcgtctcgcattggcaagttgaagccgatgaactggatggtatcgaaggaatgttcggtgaagcgctgcgtccggtgccgattgacttgttcgagggcgacacttcccacccgattgttgatgccgcctggcagcctgcctactggaatcccaatcatcggacggcctgctatgcgccagtttaaggacgtgcaatgctgagttttttcaatgaaaattttggccgtcatctgctgttgcgcaccgatatcagcttgaaattgagcagcggccgcaacgcagcatcagcaccggagacattatcggtttcgagttgcgcgcctgtgtcagcaaaaaactcaaaggccgtcacatctactttcgcacctcggattggcaacgtcggcatagctggatggaacgaaagagggatgcgcatggatttacgcttatcaccgtacattgcagcgcctcgatgcaaaccgtgcagactggcgagagacaatttacggttgatcagacggtctacaccggggttctcaaagtaacggacactgaacgttttaacgcagccctcgccaatggcatcggcattaagacccgtgctttcggctttggcatgttggttatttaacagaaggaatcagtatgaaatctatcatcattaacgccacacttaccaccatcggctccttgtctatcgccttgtctatcgccttgccggtctctgaaggtcagcagggcaacaattcccatcgtcacgcgcggcattgatgtagcgggcaacaagcaacaaaccggctacctgccagccagcacgctacgcggatttttacgcgcgccatcgtggtcgaacaaatgacgcaagccgcccccgcagggcatcactacaccctgcaaaaagcctacgccgacttgattggacaggatgccacctccgaatccagtgacgatattgatctgctcaagttgcgtcaaacccgtgaggacaacgcagtactcgatttatttggctcaggtctaggcattaaatcgcgcctgctggtgtcgcatttcttaccgacacataacgtattaccggaagtcttcaccggcgtgcgcaaggatttggacgataccgacggcgtgctggagctgatttctgaagcggatcgcgcgcgttatccggggcgttccgacgcgaacagcaaacgcgcggccgctgtaacggtggtaaaaggactggaggcaaagttgcgcaaagccaaaaaggccggtgagtcactggtcgaattggaactcgcgcggcaagcggcacaggatattgtcgaacgctacgaatccgacatgggcgagatgaccaatttttcacgcacgctgaccaactattttgccctcccggcaggcatcaaactcaaaggccgattagtgattgagaaagcgcgtgagcgtgatctggccatgatcgaactcgcgctgaatagactttcacagcgtccgattcttggcgcgcaaagcgcgcgcggctgcggggaaattgccggcgtattggatgtattagtggatggcctgcttgccaaaaaaatcaccatctgcgcatggcaagcagcgattattagcaatttttctgctgtcgaatcttgaaaataggtttaataatcaatgcataacaacagattggatcaagccaccccttgtttgggtgcttactataaataaaaatctggcattgtttcacgtgaaacaatcggtttggtcgtttacgaaaaagggaagttgaatgttccgttctgccgagcaaggtaattttgccgctatcgtcgcccggcacatcgcctcggctgacgcaccgttattgctggaaggcggcacggggatcggtaaaactcgtgcctatctttccgcgctgattcaatccggtttgcgcgtcactatcgtgctgcctacccatcagttgattgaccagatgttggcctcaaacgacttggcggcgacgcgaagcgcggccagtattgccgcctttcgtccagcgcgactatttgaaaattggtcggactatgaagctaataagcgcgccgcaatggccgcaaccgtgatgttttgcacagcggccagcgtcatcattgatcagcgtctgggcggcgaatataacggcgcaacaaaccgcgactatttgttgtttgatgaagccgatcaactaccggacatggccgcattgcaaagcgacttcaccattacacaggcggaactgacagcgttgggcataacactcagctgcgtgactgaagccttgcaagccattttggtcaaagcgccaaacgtggttgagccggaaaccagagccgccgcacgcatcattctcgatgccatcgagcaaccagcgtggtatcagtccgctggtgtaagcgatgaaggcgacattatgctgacgcacagcttgcccggtcgtttactgaaataaatcagcaattcagcccatttcgcctttgtctctgccacgctaaccgtcgccagacagctcaaggattttcaaaattcgatgggcattgcgacggtaagtaacttgtcgggcgtgatagaaccggagcgtcacggtacgcttgatttccactttatgccggtggtggttgataccgaggaatggcgcagtgccgtcatccgaatggcgaacgaagcgcctaaaccggtgctgatcgcgaccacatcacaccgtttttccagcctgctcggcgaacaattatcaggtgcaacggtaaggtcggacagcgaatccaccgctcacgccgccgtgcgcgtttcagccaatgggttttttattgcagccggtgcctgggcagggctggatacgccgttgcgctggcgttcgatcatcgtgccgcgcgtgccatacggacaaccagtggtgatagacggcgaaaccaccacccgttatttcgatgcgcacaacacggcgattcgccgtttgcgccaggtgataggccgtggtttacgttcggcggatgcaatctgtagcgtttacatcctcgatggcagggctgaaaaattaacgggctttgtaccggagcgtttttccgccgcatgggcatcacgcaaaacgtatttggagggggcgaggcaagcgctgattttgagcaggaacgaacgctatcccgccgtccgtcgtgccgcactcaattactatggtcgaaaatgtatggcgtgtagctttgtgccgcgcgtggatgcacaactggacgtgcatcatctcgacccgattgccgaaggtgttcgctgcatcaggattgaggatgtggtcgttttgtgtgcaaactgtcaccgtctggttcacgctacccatccccctttagcactcaccgatctaattgcgctactcaacgcaacaatatgattatccttaacgtaaaactcgcgcagcgacgaactgtacccctcgccctctgggagaggggggacgggggtgagggaacgggcatggcgggttttatcatcaggggtggttacttttccatgcccgttagatttttttcaattaaattcccgttagctaacggttttccctagcagcctgtcggacatgatgttaaatcatccgactttcctggcaagccggaagaa

SEQ ID NO: 310 - DNA, 11073 bp, Artificial Sequence
  Synthetic Oligonucleotide
  misc_feature (1)..(7167): n is a, c, g, or t
nnnnnnnnnnnnnnnnnnnnnnnnnnnnnnnnnnnnnnnnnnnnnnnnnnnnnnnnnnnnnnnnnnnnnnnnnnnnnnnnnnnnnnnnnnnnnnnnnnnnnnnnnnnnnnnnnnnnnnnnnnnnnnnnnnnnnnnnnnnnnnnnnnnnnnnnnnnnnnnnnnnnnnnnnnnnnnnnnnnnnnnnnnnnnnnnnnnnnnnnnnnnnnnnnnnnnnnnnnnnnnnnnnnnnnnnnnnnnnnnnnnnnnnnnnnnnnnnnnnnnnnnnnnnnnnnnnnnnnnnnnnnnnnnnnnnnnnnnnnnnnnnnnnnnnnnnnnnnnnnnnnnnnnnnnnnnnnnnnnnnnnnnnnnnnnnnnnnnnnnnnnnnnnnnnnnnnnnnnnnnnnnnnnnnnnnnnnnnnnnnnnnnnnnnnnnnnnnnnnnnnnnnnnnnnnnnnnnnnnnnnnnnnnnnnnnnnnnnnnnnnnnnnnnnnnnnnnnnnnnnnnnnnnnnnnnnnnnnnnnnnnnnnnnnnnnnnnnnnnnnnnnnnnnnnnnnnnnnnnnnnnnnnnnnnnnnnnnnnnnnnnnnnnnnnnnnnnnnnnnnnnnnnnnnnnnnnnnnnnnnnnnnnnnnnnnnnnnnnnnnnnnnnnnnnnnnnnnnnnnnnnnnnnnnnnnnnnnnnnnnnnnnnnnnnnnnnnnnnnnnnnnnnnnnnnnnnnnnnnnnnnnnnnnnnnnnnnnnnnnnnnnnnnnnnnnnnnnnnnnnnnnnnnnnnnnnnnnnnnnnnnnnnnnnnnnnnnnnnnnnnnnnnnnnnnnnnnnnnnnnnnnnnnnnnnnnnnnnnnnnnnnnnnnnnnnnnnnnnnnnnnnnnnnnnnnnnnnnnnnnnnnnnnnnnnnnnnnnnnnnnnnnnnnnnnnnnnnnnnnnnnnnnnnnnnnnnnnnnnnnnnnnnnnnnnnnnnnnnnnnnnnnnnnnnnnnnnnnnnnnnnnnnnnnnnnnnnnnnnnnnnnnnnnnnnnnnnnnnnnnnnnnnnnnnnnnnnnnnnnnnnnnnnnnnnnnnnnnnnnnnnnnnnnnnnnnnnnnnnnnnnnnnnnnnnnnnnnnnnnnnnnnnnnnnnnnnnnnnnnnnnnnnnnnnnnnnnnnnnnnnnnnnnnnnnnnnnnnnnnnnnnnnnnnnnnnnnnnnnnnnnnnnnnnnnnnnnnnnnnnnnnnnnnnnnnnnnnnnnnnnnnnnnnnnnnnnnnnnnnnnnnnnnnnnnnnnnnnnnnnnnnnnnnnnnnnnnnnnnnnnnnnnnnnnnnnnnnnnnnnnnnnnnnnnnnnnnnnnnnnnnnnnnnnnnnnnnnnnnnnnnnnnnnnnnnnnnnnnnnnnnnnnnnnnnnnnnnnnnnnnnnnnnnnnnnnnnnnnnnnnnnnnnnnnnnnnnnnnnnnnnnnnnnnnnnnnnnnnnnnnnnnnnnnnnnnnnnnnnnnnnnnnnnnnnnnnnnnnnnnnnnnnnnnnnnnnnnnnnnnnnnnnnnnnnnnnnnnnnnnnnnnnnnnnnnnnnnnnnnnnnnnnnnnnnnnnnnnnnnnnnnnnnnnnnnnnnnnnnnnnnnnnnnnnnnnnnnnnnnnnnnnnnnnnnnnnnnnnnnnnnnnnnnnnnnnnnnnnnnnnnnnnnnnnnnnnnnnnnnnnnnnnnnnnnnnnnnnnnnnnnnnnnnnnnnnnnnnnnnnnnnnnnnnnnnnnnnnnnnnnnnnnnnnnnnnnnnnnnnnnnnnnnnnnnnnnnnnnnnnnnnnnnnnnnnnnnnnnnnnnnnnnnnnnnnnnnnnnnnnnnnnnnnnnnnnnnnnnnnnnnnnnnnnnnnnnnnnnnnnnnnnnnnnnnnnnnnnnnnnnnnnnnnnnnnnnnnnnnnnnnnnnnnnnnnnnnnnnnnnnnnnnnnnnnnnnnnnnnnnnnnnnnnnnnnnnnnnnnnnnnnnnnnnnnnnnnnnnnnnnnnnnnnnnnnnnnnnnnnnnnnnnnnnnnnnnnnnnnnnnnnnnnnnnnnnnnnnnnnnnnnnnnnnnnnnnnnnnnnnnnnnnnnnnnnnnnnnnnnnnnnnnnnnnnnnnnnnnnnnnnnnnnnnnnnnnnnnnnnnnnnnnnnnnnnnnnnnnnnnnnnnnnnnnnnnnnnnnnnnnnnnnnnnnnnnnnnnnnnnnnnnnnnnnnnnnnnnnnnnnnnnnnnnnnnnnnnnnnnnnnnnnnnnnnnnnnnnnnnnnnnnnnnnnnnnnnnnnnnnnnnnnnnnnnnnnnnnnnnnnnnnnnnnnnnnnnnnnnnnnnnnnnnnnnnnnnnnnnnnnnnnnnnnnnnnnnnnnnnnnnnnnnnnnnnnnnnnnnnnnnnnnnnnnnnnnnnnnnnnnnnnnnnnnnnnnnnnnnnnnnnnnnnnnnnnnnnnnnnnnnnnnnnnnnnnnnnnnnnnnnnnnnnnnnnnnnnnnnnnnnnnnnnnnnnnnnnnnnnnnnnnnnnnnnnnnnnnnnnnnnnnnnnnnnnnnnnnnnnnnnnnnnnnnnnnnnnnnnnnnnnnnnnnnnnnnnnnnnnnnnnnnnnnnnnnnnnnnnnnnnnnnnnnnnnnnnnnnnnnnnnnnnnnnnnnnnnnnnnnnnnnnnnnnnnnnnnnnnnnnnnnnnnnnnnnnnnnnnnnnnnnnnnnnnnnnnnnnnnnnnnnnnnnnnnnnnnnnnnnnnnnnnnnnnnnnnnnnnnnnnnnnnnnnnnnnnnnnnnnnnnnnnnnnnnnnnnnnnnnnnnnnnnnnnnnnnnnnnnnnnnnnnnnnnnnnnnnnnnnnnnnnnnnnnnnnnnnnnnnnnnnnnnnnnnnnnnnnnnnnnnnnnnnnnnnnnnnnnnnnnnnnnnnnnnnnnnnnnnnnnnnnnnnnnnnnnnnnnnnnnnnnnnnnnnnnnnnnnnnnnnnnnnnnnnnnnnnnnnnnnnnnnnnnnnnnnnnnnnnnnnnnnnnnnnnnnnnnnnnnnnnnnnnnnnnnnnnnnnnnnnnnnnnnnnnnnnnnnnnnnnnnnnnnnnnnnnnnnnnnnnnnnnnnnnnnnnnnnnnnnnnnnnnnnnnnnnnnnnnnnnnnnnnnnnnnnnnnnnnnnnnnnnnnnnnnnnnnnnnnnnnnnnnnnnnnnnnnnnnnnnnnnnnnnnnnnnnnnnnnnnnnnnnnnnnnnnnnnnnnnnnnnnnnnnnnnnnnnnnnnnnnnnnnnnnnnnnnnnnnnnnnnnnnnnnnnnnnnnnnnnnnnnnnnnnnnnnnnnnnnnnnnnnnnnnnnnnnnnnnnnnnnnnnnnnnnnnnnnnnnnnnnnnnnnnnnnnnnnnnnnnnnnnnnnnnnnnnnnnnnnnnnnnnnnnnnnnnnnnnnnnnnnnnnnnnnnnnnnnnnnnnnnnnnnnnnnnnnnnnnnnnnnnnnnnnnnnnnnnnnnnnnnnnnnnnnnnnnnnnnnnnnnnnnnnnnnnnnnnnnnnnnnnnnnnnnnnnnnnnnnnnnnnnnnnnnnnnnnnnnnnnnnnnnnnnnnnnnnnnnnnnnnnnnnnnnnnnnnnnnnnnnnnnnnnnnnnnnnnnnnnnnnnnnnnnnnnnnnnnnnnnnnnnnnnnnnnnnnnnnnnnnnnnnnnnnnnnnnnnnnnnnnnnnnnnnnnnnnnnnnnnnnnnnnnnnnnnnnnnnnnnnnnnnnnnnnnnnnnnnnnnnnnnnnnnnnnnnnnnnnnnnnnnnnnnnnnnnnnnnnnnnnnnnnnnnnnnnnnnnnnnnnnnnnnnnnnnnnnnnnnnnnnnnnnnnnnnnnnnnnnnnnnnnnnnnnnnnnnnnnnnnnnnnnnnnnnnnnnnnnnnnnnnnnnnnnnnnnnnnnnnnnnnnnnnnnnnnnnnnnnnnnnnnnnnnnnnnnnnnnnnnnnnnnnnnnnnnnnnnnnnnnnnnnnnnnnnnnnnnnnnnnnnnnnnnnnnnnnnnnnnnnnnnnnnnnnnnnnnnnnnnnnnnnnnnnnnnnnnnnnnnnnnnnnnnnnnnnnnnnnnnnnnnnnnnnnnnnnnnnnnnnnnnnnnnnnnnnnnnnnnnnnnnnnnnnnnnnnnnnnnnnnnnnnnnnnnnnnnnnnnnnnnnnnnnnnnnnnnnnnnnnnnnnnnnnnnnnnnnnnnnnnnnnnnnnnnnnnnnnnnnnnnnnnnnnnnnnnnnnnnnnnnnnnnnnnnnnnnnnnnnnnnnnnnnnnnnnnnnnnnnnnnnnnnnnnnnnnnnnnnnnnnnnnnnnnnnnnnnnnnnnnnnnnnnnnnnnnnnnnnnnnnnnnnnnnnnnnnnnnnnnnnnnnnnnnnnnnnnnnnnnnnnnnnnnnnnnnnnnnnnnnnnnnnnnnnnnnnnnnnnnnnnnnnnnnnnnnnnnnnnnnnnnnnnnnnnnnnnnnnnnnnnnnnnnnnnnnnnnnnnnnnnnnnnnnnnnnnnnnnnnnnnnnnnnnnnnnnnnnnnnnnnnnnnnnnnnnnnnnnnnnnnnnnnnnnnnnnnnnnnnnnnnnnnnnnnnnnnnnnnnnnnnnnnnnnnnnnnnnnnnnnnnnnnnnnnnnnnnnnnnnnnnnnnnnnnnnnnnnnnnnnnnnnnnnnnnnnnnnnnnnnnnnnnnnnnnnnnnnnnnnnnnnnnnnnnnnnnnnnnnnnnnnnnnnnnnnnnnnnnnnnnnnnnnnnnnnnnnnnnnnnnnnnnnnnnnnnnnnnnnnnnnnnnnnnnnnnnnnnnnnnnnnnnnnnnnnnnnnnnnnnnnnnnnnnnnnnnnnnnnnnnnnnnnnnnnnnnnnnnnnnnnnnnnnnnnnnnnnnnnnnnnnnnnnnnnnnnnnnnnnnnnnnnnnnnnnnnnnnnnnnnnnnnnnnnnnnnnnnnnnnnnnnnnnnnnnnnnnnnnnnnnnnnnnnnnnnnnnnnnnnnnnnnnnnnnnnnnnnnnnnnnnnnnnnnnnnnnnnnnnnnnnnnnnnnnnnnnnnnnnnnnnnnnnnnnnnnnnnnnnnnnnnnnnnnnnnnnnnnnnnnnnnnnnnnnnnnnnnnnnnnnnnnnnnnnnnnnnnnnnnnnnnnnnnnnnnnnnnnnnnnnnnnnnnnnnnnnnnnnnnnnnnnnnnnnnnnnnnnnnnnnnnnnnnnnnnnnnnnnnnnnnnnnnnnnnnnnnnnnnnnnnnnnnnnnnnnnnnnnnnnnnnnnnnnnnnnnnnnnnnnnnnnnnnnnnnnnnnnnnnnnnnnnnnnnnnnnnnnnnnnnnnnnnnnnnnnnnnnnnnnnnnnnnnnnnnnnnnnnnnnnnnnnnnnnnnnnnnnnnnnnnnnnnnnnnnnnnnnnnnnnnnnnnnnnnnnnnnnnnnnnnnnnnnnnnnnnnnnnnnnnnnnnnnnnnnnnnnnnnnnnnnnnnnnnnnnnnnnnnnnnnnnnnnnnnnnnnnnnnnnnnnnnnnnnnnnnnnnnnnnnnnnnnnnnnnnnnnnnnnnnnnnnnnnnnnnnnnnnnnnnnnnnnnnnnnnnnnnnnnnnnnnnnnnnnnnnnnnnnnnnnnnnnnnnnnnnnnnnnnnnnnnnnnnnnnnnnnnnnnnnnnnnnnnnnnnnnnnnnnnnnnnnnnnnnnnnnnnnnnnnnnnnnnnnnnnnnnnnnnnnnnnnnnnnnnnnnnnnnnnnnnnnnnnnnnnnnnnnnnnnnnnnnnnnnnnnnnnnnnnnnnnnnnnnnnnnnnnnnnnnnnnnnnnnnnnnnnnnnnnnnnnnnnnnnnnnnnnnnnnnnnnnnnnnnnnnnnnnnnnnnnnnnnnnnnnnnnnnnnnnnnnnnnnnnnnnnnnnnnnnnnnnnnnnnnnnnnnnnnnnnnnnnnnnnnnnnnnnnnnnnnnnnnnnnnnnnnnnnnnnnnnnnnnnnnnnnnnnnnnnnnnnnnnnnnnnnnnnnnnnnnnnnnnnnnnnnnnnnnnnnnnnnnnnnnnnnnnnnnnnnnnnnnnnnnnnnnnnnnnnnnnnnnnnnnnnnnnnnnnnnnnnnnnnnnnnnnnnnnnnnnnnnnnnnnnnnnnnnnnnnnnnnnnnnnnnnnnnnnnnnnnnnnnnnnnnnnnnnnnnnnnnnnnnnnnnnnnnnnnnnnnnnnnnnnnnnnnnnnnnnnnnnnnnnnnnnnnnnnnnnnnnnnnnnnnnnnnnnnnnnnnnnnnnnnnnnnnnnnnnnnnnnnnnnnnnnnnnnnnnnnnnnnnnnnnnnnnnnnnnnnnnnnnnnnnnnnnnnnnnnnnnnnnnnnnnnnnnnnnnnnnnnnnnnnnnnnnnnnnnnnnnnnnnnnnnnnnnnnnnnnnnnnnnnnnnnnnnnnnnnnnnnnnnnnnnnnnnnnnnnnnnnnnnnnnnnnnnnnnnnnnnnnnnnnnnnnnnnnnnnnnnnnnnnnnnnnnnnnnnnnnnnnnnnnnnnnnnnnnnnnnnnnnnnnnnnnnnnnnnnnnnnnnnnnnnnnnnnnnnnnnnnnnnnnnnnnnnnnnnnnnnnnnnnnnnnnnnnnnnnnnnnnnnnnnnnnnnnnnnnnnnnnnnnnnnnnnnnnnnnnnnnnnnnnnnnnnnnnnnnnnnnnnnnnnnnnnnnnnnnnnnnnnnnnnnnnnnnnnnnnnnnnnnnnnnnnnnnnnnnnnnnnnnnnnnnnnnnnnnnnnnnnnnnnnnnnnnnnnnnnnnnnnnnnnnnnnnnnnnnnnnnnnnnnnnnnnnnnnnnnnnnnnnnnnnnnnnnnnnnnnnnnnnnnnnnnnnnnnnnnnnnnnnnnnnnnnnnnnnnnnnnnnnnnnnnnnnnnnnnnnnnnnnnnnnnnnnnnnnnnnnnnnnnnnnnnnnnnnnnnnnnnnnnnnnnnnnnnnnnnnnnnnnnnnnnnnnnnnnnnnnnnnnnnnnnnnnnnnnnnnnnnnnnnnnnnnnnnnnnnnnnnnnnnnnnnnnnnnnnnnnnnnnnnnnnnnnnnnnnnnnnnnnnnnnnnnnnnnnnnnnnnnnnnnnnnnnnnnnnnnnnnnnnnnnnnnnnnnnnnnnnnnnnnnnnnnnnnnnnnnnnnnnnnnnnnnnnnnnnnnnnnnnnnnnnnnnnnnnnnnnnnnnnnnnnnnnnnnnnnnnnnnnnnnnnnnnnnnnnnnnnnnnnnnnnnnnnnnnnnnnnnnnnnnnnnnnnnnnnnnnnnnnnnnnnnnnnnnnnnnnnnnnnnnnnnnnnnnnnnnnnnnnnnnnnnnnnnnnnnnnnnnnnnnnnnnnnnnnnnnnnnnnnnnnnnnnnnnnnnnnnnnnnnnnnnngccgtccaggcgaattcccccggccacaccacccgaggacaagtgcagtagatttccttttagtccgacagactcctagaagccacccgtgaatccctctccttcatcgcctcactgcgtcccaatcacagcattgatcccgacctgattctgaaaaataaacacggcaagttacaccacaagttcgacacctcgctgaccaacgtaatgaacagttacacactactcaccgcgccgacggtgacctggtatgcagaaggcaatgccgagctcatttcatgcctgctatcgcccgtgcaatttattggcaagcggcgtgcctctggtttttggttgcgtctcgcattggcaagttgaagccgatgaactggatggtatcgaaggaatgttcggtgaagcgctgcgtccggtgccgattgacttgttcgagggcgacacttcccacccgattgttgatgccgcctggcagcctgcctactggaatcccaatcatcggacggcctgctatgcgccagtttaaggacgtgcaatgctgagttttttcaatgaaaattttggccgtcatctgctgttgcgcaccgatatcagcttgaaattgagcagcggccgcaacgcagcatcagcaccggagacattatcggtttcgagttgcgcgcctgtgtcagcaaaaaactcaaaggccgtcacatctactttcgcacctcggattggcaacgtcggcatagctggatggaacgaaagagggaggcgcatggatttacgcttatcaccgtacattgcagcgcctcgatgcaaaccgtgcagactggcgagagacaatttacggttgatcagacggtctacaccggggttctcaaagtaacggacactgaacgttttaacgcagccctcgccaatggcatcggcattaagacccgtgctttcggctttggcatgttggttatttaacagaaggaatcagtatgaaatctatcatcattaacgccacacttaccaccatcggctccttgtctatcgccttgtctatcgccttgccggtctctgaaggtcagcagggcaacaattcccatcgtcacgcgcggcattgatgtagcgggcaacaagcaacaaaccggctacctgccagccagcacgctacgcggatttttacgcgcgccatcgtggtcgaacaaatgacgcaagccgcccccgcagggcatcactacaccctgcaaaaagcctacgccgacttgattggacaggatgccacctccgaatccagtgacgatattgatctgctcaagttgcgtcaaacccgtgaggacaacgcagtactcgatttatttggctcaggtctaggcattaaatcgcgcctgctggtgtcgcatttcttaccgacacataacgtattaccggaagtcttcaccggcgtgcgcaaggatttggacgataccgacggcgtgctggagctgatttctgaagcggatcgcgcgcgttatccggggcgttccgacgcgaacagcaaacgcgcggccgctgtaacggtggtaaaaggactggaggcaaagttgcgcaaagccaaaaaggccggtgagtcactggtcgaattggaactcgcgcggcaagcggcacaggatattgtcgaacgctacgaatccgacatgggcgagatgaccaatttttcacgcacgctgaccaactattttgccctcccggcaggcatcaaactcaaaggccgattagtgattgagaaagcgcgtgagcgtgatctggccatgatcgaactcgcgctgaatagactttcacagcgtccgattcttggcgcgcaaagcgcgcgcggctgcggggaaattgccggcgtattggatgtattagtggatggcctgcttgccaaaaaaatcaccatctgcgcatggcaagcagcgattattagcaatttttctgctgtcgaatcttgaaaataggtttaataatcaatgcataacaacagattggatcaagccaccccttgtttgggtgcttactataaataaaaatctggcattgtttcacgtgaaacaatcggtttggtcgtttacgaaaaagggaagttgaatgttccgttctgccgagcaaggtaattttgccgctatcgtcgcccggcacatcgcctcggctgacgcaccgttattgctggaaggcggcacggggatcggtaaaactcgtgcctatctttccgcgctgattcaatccggtttgcgcgtcactatcgtgctgcctacccatcagttgattgaccagatgttggcctcaaacgacttggcggcgacgcgaagcgcggccagtattgccgcctttcgtccagcgcgactatttgaaaattggtcggactatgaagctaataagcgcgccgcaatggccgcaaccgtgatgttttgcacagcggccagcgtcatcattgatcagcgtctgggcggcgaatataacggcgcaacaaaccgcgactatttgttgtttgatgaagccgatcaactaccggacatggccgcattgcaaagcgacttcaccattacacaggcggaactgacagcgttgggcataacactcagctgcgtgactgaagccttgcaagccattttggtcaaagcgccaaacgtggttgagccggaaaccagagccgccgcacgcatcattctcgatgccatcgagcaaccagcgtggtatcagtccgctggtgtaagcgatgaaggcgacattatgctgacgcacagcttgcccggtcgtttactgaaataaatcagcaattcagcccatttcgcctttgtctctgccacgctaaccgtcgccagacagctcaaggattttcaaaattcgatgggcattgcgacggtaagtaacttgtcgggcgtgatagaaccggagcgtcacggtacgcttgatttccactttatgccggtggtggttgataccgaggaatggcgcagtgccgtcatccgaatggcgaacgaagcgcctaaaccggtgctgatcgcgaccacatcacaccgtttttccagcctgctcggcgaacaattatcaggtgcaacggtaaggtcggacagcgaatccaccgctcacgccgccgtgcgcgtttcagccaatgggttttttattgcagccggtgcctgggcagggctggatacgccgttgcgctggcgttcgatcatcgtgccgcgcgtgccatacggacaaccagtggtgatagacggcgaaaccaccacccgttatttcgatgcgcacaacacggcgattcgccgtttgcgccaggtgataggccgtggtttacgttcggcggatgcaatctgtagcgtttacatcctcgatggcagggctgaaaaattaacgggctttgtaccggagcgtttttccgccgcatgggcatcacgcaaaacgtatttggagggggcgaggcaagcgctgattttgagcaggaacgaacgctatcccgccgtccgtcgtgccgcactcaattactatggtcgaaaatgtatggcgtgtagctttgtgccgcgcgtggatgcacaactggacgtgcatcatctcgacccgattgccgaaggtgttcgctgcatcaggattgaggatgtggtcgttttgtgtgcaaactgtcaccgtctggttcacgctacccatccccctttagcactcaccgatctaattgcgctactcaacgcaacaatatgattatccttaacgtaaaactcgcgcagcgacgaactgtacccctcgccctctgggagaggggggacgggggtgagggaacgggcatggcgggttttatcatcaggggtggttacttttccatgcccgttagatttttttcaattaaattcccgttagctaacggttttccctagcagcctgtcggacatgatgttaaatcatccgactttcctggcaagccggaag

SEQ ID NO: 311 - DNA, 11073 bp, Artificial Sequence; identical to SEQ ID NO: 310
  Synthetic Oligonucleotide
  misc_feature (1)..(7167): n is a, c, g, or t

SEQ ID NO: 312 - DNA, 11068 bp, Artificial Sequence
  Synthetic Oligonucleotide
  misc_feature (1)..(7104): n is a, c, g, or t
nnnnnnnnnnnnnnnnnnnnnnnnnnnnnnnnnnnnnnnnnnnnnnnnnnnnnnnnnnnnnnnnnnnnnnnnnnnnnnnnnnnnnnnnnnnnnnnnnnnnnnnnnnnnnnnnnnnnnnnnnnnnnnnnnnnnnnnnnnnnnnnnnnnnnnnnnnnnnnnnnnnnnnnnnnnnnnnnnnnnnnnnnnnnnnnnnnnnnnnnnnnnnnnnnnnnnnnnnnnnnnnnnnnnnnnnnnnnnnnnnnnnnnnnnnnnnnnnnnnnnnnnnnnnnnnnnnnnnnnnnnnnnnnnnnnnnnnnnnnnnnnnnnnnnnnnnnnnnnnnnnnnnnnnnnnnnnnnnnnnnnnnnnnnnnnnnnnnnnnnnnnnnnnnnnnnnnnnnnnnnnnnnnnnnnnnnnnnnnnnnnnnnnnnnnnnnnnnnnnnnnnnnnnnnnnnnnnnnnnnnnnnnnnnnnnnnnnnnnnnnnnnnnnnnnnnnnnnnnnnnnnnnnnnnnnnnnnnnnnnnnnnnnnnnnnnnnnnnnnnnnnnnnnnnnnnnnnnnnnnnnnnnnnnnnnnnnnnnnnnnnnnnnnnnnnnnnnnnnnnnnnnnnnnnnnnnnnnnnnnnnnnnnnnnnnnnnnnnnnnnnnnnnnnnnnnnnnnnnnnnnnnnnnnnnnnnnnnnnnnnnnnnnnnnnnnnnnnnnnnnnnnnnnnnnnnnnnnnnnnnnnnnnnnnnnnnnnnnnnnnnnnnnnnnnnnnnnnnnnnnnnnnnnnnnnnnnnnnnnnnnnnnnnnnnnnnnnnnnnnnnnnnnnnnnnnnnnnnnnnnnnnnnnnnnnnnnnnnnnnnnnnnnnnnnnnnnnnnnnnnnnnnnnnnnnnnnnnnnnnnnnnnnnnnnnnnnnnnnnnnnnnnnnnnnnnnnnnnnnnnnnnnnnnnnnnnnnnnnnnnnnnnnnnnnnnnnnnnnnnnnnnnnnnnnnnnnnnnnnnnnnnnnnnnnnnnnnnnnnnnnnnnnnnnnnnnnnnnnnnnnnnnnnnnnnnnnnnnnnnnnnnnnnnnnnnnnnnnnnnnnnnnnnnnnnnnnnnnnnnnnnnnnnnnnnnnnnnnnnnnnnnnnnnnnnnnnnnnnnnnnnnnnnnnnnnnnnnnnnnnnnnnnnnnnnnnnnnnnnnnnnnnnnnnnnnnnnnnnnnnnnnnnnnnnnnnnnnnnnnnnnnnnnnnnnnnnnnnnnnnnnnnnnnnnnnnnnnnnnnnnnnnnnnnnnnnnnnnnnnnnnnnnnnnnnnnnnnnnnnnnnnnnnnnnnnnnnnnnnnnnnnnnnnnnnnnnnnnnnnnnnnnnnnnnnnnnnnnnnnnnnnnnnnnnnnnnnnnnnnnnnnnnnnnnnnnnnnnnnnnnnnnnnnnnnnnnnnnnnnnnnnnnnnnnnnnnnnnnnnnnnnnnnnnnnnnnnnnnnnnnnnnnnnnnnnnnnnnnnnnnnnnnnnnnnnnnnnnnnnnnnnnnnnnnnnnnnnnnnnnnnnnnnnnnnnnnnnnnnnnnnnnnnnnnnnnnnnnnnnnnnnnnnnnnnnnnnnnnnnnnnnnnnnnnnnnnnnnnnnnnnnnnnnnnnnnnnnnnnnnnnnnnnnnnnnnnnnnnnnnnnnnnnnnnnnnnnnnnnnnnnnnnnnnnnnnnnnnnnnnnnnnnnnnnnnnnnnnnnnnnnnnnnnnnnnnnnnnnnnnnnnnnnnnnnnnnnnnnnnnnnnnnnnnnnnnnnnnnnnnnnnnnnnnnnnnnnnnnnnnnnnnnnnnnnnnnnnnnnnnnnnnnnnnnnnnnnnnnnnnnnnnnnnnnnnnnnnnnnnnnnnnnnnnnnnnnnnnnnnnnnnnnnnnnnnnnnnnnnnnnnnnnnnnnnnnnnnnnnnnnnnnnnnnnnnnnnnnnnnnnnnnnnnnnnnnnnnnnnnnnnnnnnnnnnnnnnnnnnnnnnnnnnnnnnnnnnnnnnnnnnnnnnnnnnnnnnnnnnnnnnnnnnnnnnnnnnnnnnnnnnnnnnnnnnnnnnnnnnnnnnnnnnnnnnnnnnnnnnnnnnnnnnnnnnnnnnnnnnnnnnnnnnnnnnnnnnnnnnnnnnnnnnnnnnnnnnnnnnnnnnnnnnnnnnnnnnnnnnnnnnnnnnnnnnnnnnnnnnnnnnnnnnnnnnnnnnnnnnnnnnnnnnnnnnnnnnnnnnnnnnnnnnnnnnnnnnnnnnnnnnnnnnnnnnnnnnnnnnnnnnnnnnnnnnnnnnnnnnnnnnnnnnnnnnnnnnnnnnnnnnnnnnnnnnnnnnnnnnnnnnnnnnnnnnnnnnnnnnnnnnnnnnnnnnnnnnnnnnnnnnnnnnnnnnnnnnnnnnnnnnnnnnnnnnnnnnnnnnnnnnnnnnnnnnnnnnnnnnnnnnnnnnnnnnnnnnnnnnnnnnnnnnnnnnnnnnnnnnnnnnnnnnnnnnnnnnnnnnnnnnnnnnnnnnnnnnnnnnnnnnnnnnnnnnnnnnnnnnnnnnnnnnnnnnnnnnnnnnnnnnnnnnnnnnnnnnnnnnnnnnnnnnnnnnnnnnnnnnnnnnnnnnnnnnnnnnnnnnnnnnnnnnnnnnnnnnnnnnnnnnnnnnnnnnnnnnnnnnnnnnnnnnnnnnnnnnnnnnnnnnnnnnnnnnnnnnnnnnnnnnnnnnnnnnnnnnnnnnnnnnnnnnnnnnnnnnnnnnnnnnnnnnnnnnnnnnnnnnnnnnnnnnnnnnnnnnnnnnnnnnnnnnnnnnnnnnnnnnnnnnnnnnnnnnnnnnnnnnnnnnnnnnnnnnnnnnnnnnnnnnnnnnnnnnnnnnnnnnnnnnnnnnnnnnnnnnnnnnnnnnnnnnnnnnnnnnnnnnnnnnnnnnnnnnnnnnnnnnnnnnnnnnnnnnnnnnnnnnnnnnnnnnnnnnnnnnnnnnnnnnnnnnnnnnnnnnnnnnnnnnnnnnnnnnnnnnnnnnnnnnnnnnnnnnnnnnnnnnnnnnnnnnnnnnnnnnnnnnnnnnnnnnnnnnnnnnnnnnnnnnnnnnnnnnnnnnnnnnnnnnnnnnnnnnnnnnnnnnnnnnnnnnnnnnnnnnnnnnnnnnnnnnnnnnnnnnnnnnnnnnnnnnnnnnnnnnnnnnnnnnnnnnnnnnnnnnnnnnnnnnnnnnnnnnnnnnnnnnnnnnnnnnnnnnnnnnnnnnnnnnnnnnnnnnnnnnnnnnnnnnnnnnnnnnnnnnnnnnnnnnnnnnnnnnnnnnnnnnnnnnnnnnnnnnnnnnnnnnnnnnnnnnnnnnnnnnnnnnnnnnnnnnnnnnnnnnnnnnnnnnnnnnnnnnnnnnnnnnnnnnnnnnnnnnnnnnnnnnnnnnnnnnnnnnnnnnnnnnnnnnnnnnnnnnnnnnnnnnnnnnnnnnnnnnnnnnnnnnnnnnnnnnnnnnnnnnnnnnnnnnnnnnnnnnnnnnnnnnnnnnnnnnnnnnnnnnnnnnnnnnnnnnnnnnnnnnnnnnnnnnnnnnnnnnnnnnnnnnnnnnnnnnnnnnnnnnnnnnnnnnnnnnnnnnnnnnnnnnnnnnnnnnnnnnnnnnnnnnnnnnnnnnnnnnnnnnnnnnnnnnnnnnnnnnnnnnnnnnnnnnnnnnnnnnnnnnnnnnnnnnnnnnnnnnnnnnnnnnnnnnnnnnnnnnnnnnnnnnnnnnnnnnnnnnnnnnnnnnnnnnnnnnnnnnnnnnnnnnnnnnnnnnnnnnnnnnnnnnnnnnnnnnnnnnnnnnnnnnnnnnnnnnnnnnnnnnnnnnnnnnnnnnnnnnnnnnnnnnnnnnnnnnnnnnnnnnnnnnnnnnnnnnnnnnnnnnnnnnnnnnnnnnnnnnnnnnnnnnnnnnnnnnnnnnnnnnnnnnnnnnnnnnnnnnnnnnnnnnnnnnnnnnnnnnnnnnnnnnnnnnnnnnnnnnnnnnnnnnnnnnnnnnnnnnnnnnnnnnnnnnnnnnnnnnnnnnnnnnnnnnnnnnnnnnnnnnnnnnnnnnnnnnnnnnnnnnnnnnnnnnnnnnnnnnnnnnnnnnnnnnnnnnnnnnnnnnnnnnnnnnnnnnnnnnnnnnnnnnnnnnnnnnnnnnnnnnnnnnnnnnnnnnnnnnnnnnnnnnnnnnnnnnnnnnnnnnnnnnnnnnnnnnnnnnnnnnnnnnnnnnnnnnnnnnnnnnnnnnnnnnnnnnnnnnnnnnnnnnnnnnnnnnnnnnnnnnnnnnnnnnnnnnnnnnnnnnnnnnnnnnnnnnnnnnnnnnnnnnnnnnnnnnnnnnnnnnnnnnnnnnnnnnnnnnnnnnnnnnnnnnnnnnnnnnnnnnnnnnnnnnnnnnnnnnnnnnnnnnnnnnnnnnnnnnnnnnnnnnnnnnnnnnnnnnnnnnnnnnnnnnnnnnnnnnnnnnnnnnnnnnnnnnnnnnnnnnnnnnnnnnnnnnnnnnnnnnnnnnnnnnnnnnnnnnnnnnnnnnnnnnnnnnnnnnnnnnnnnnnnnnnnnnnnnnnnnnnnnnnnnnnnnnnnnnnnnnnnnnnnnnnnnnnnnnnnnnnnnnnnnnnnnnnnnnnnnnnnnnnnnnnnnnnnnnnnnnnnnnnnnnnnnnnnnnnnnnnnnnnnnnnnnnnnnnnnnnnnnnnnnnnnnnnnnnnnnnnnnnnnnnnnnnnnnnnnnnnnnnnnnnnnnnnnnnnnnnnnnnnnnnnnnnnnnnnnnnnnnnnnnnnnnnnnnnnnnnnnnnnnnnnnnnnnnnnnnnnnnnnnnnnnnnnnnnnnnnnnnnnnnnnnnnnnnnnnnnnnnnnnnnnnnnnnnnnnnnnnnnnnnnnnnnnnnnnnnnnnnnnnnnnnnnnnnnnnnnnnnnnnnnnnnnnnnnnnnnnnnnnnnnnnnnnnnnnnnnnnnnnnnnnnnnnnnnnnnnnnnnnnnnnnnnnnnnnnnnnnnnnnnnnnnnnnnnnnnnnnnnnnnnnnnnnnnnnnnnnnnnnnnnnnnnnnnnnnnnnnnnnnnnnnnnnnnnnnnnnnnnnnnnnnnnnnnnnnnnnnnnnnnnnnnnnnnnnnnnnnnnnnnnnnnnnnnnnnnnnnnnnnnnnnnnnnnnnnnnnnnnnnnnnnnnnnnnnnnnnnnnnnnnnnnnnnnnnnnnnnnnnnnnnnnnnnnnnnnnnnnnnnnnnnnnnnnnnnnnnnnnnnnnnnnnnnnnnnnnnnnnnnnnnnnnnnnnnnnnnnnnnnnnnnnnnnnnnnnnnnnnnnnnnnnnnnnnnnnnnnnnnnnnnnnnnnnnnnnnnnnnnnnnnnnnnnnnnnnnnnnnnnnnnnnnnnnnnnnnnnnnnnnnnnnnnnnnnnnnnnnnnnnnnnnnnnnnnnnnnnnnnnnnnnnnnnnnnnnnnnnnnnnnnnnnnnnnnnnnnnnnnnnnnnnnnnnnnnnnnnnnnnnnnnnnnnnnnnnnnnnnnnnnnnnnnnnnnnnnnnnnnnnnnnnnnnnnnnnnnnnnnnnnnnnnnnnnnnnnnnnnnnnnnnnnnnnnnnnnnnnnnnnnnnnnnnnnnnnnnnnnnnnnnnnnnnnnnnnnnnnnnnnnnnnnnnnnnnnnnnnnnnnnnnnnnnnnnnnnnnnnnnnnnnnnnnnnnnnnnnnnnnnnnnnnnnnnnnnnnnnnnnnnnnnnnnnnnnnnnnnnnnnnnnnnnnnnnnnnnnnnnnnnnnnnnnnnnnnnnnnnnnnnnnnnnnnnnnnnnnnnnnnnnnnnnnnnnnnnnnnnnnnnnnnnnnnnnnnnnnnnnnnnnnnnnnnnnnnnnnnnnnnnnnnnnnnnnnnnnnnnnnnnnnnnnnnnnnnnnnnnnnnnnnnnnnnnnnnnnnnnnnnnnnnnnnnnnnnnnnnnnnnnnnnnnnnnnnnnnnnnnnnnnnnnnnnnnnnnnnnnnnnnnnnnnnnnnnnnnnnnnnnnnnnnnnnnnnnnnnnnnnnnnnnnnnnnnnnnnnnnnnnnnnnnnnnnnnnnnnnnnnnnnnnnnnnnnnnnnnnnnnnnnnnnnnnnnnnnnnnnnnnnnnnnnnnnnnnnnnnnnnnnnnnnnnnnnnnnnnnnnnnnnnnnnnnnnnnnnnnnnnnnnnnnnnnnnnnnnnnnnnnnnnnnnnnnnnnnnnnnnnnnnnnnnnnnnnnnnnnnnnnnnnnnnnnnnnnnnnnnnnnnnnnnnnnnnnnnnnnnnnnnnnnnnnnnnnnnnnnnnnnnnnnnnnnnnnnnnnnnnnnnnnnnnnnnnnnnnnnnnnnnnnnnnnnnnnnnnnnnnnnnnnnnnnnnnnnnnnnnnnnnnnnnnnnnnnnnnnnnnnnnnnnnnnnnnnnnnnnnnnnnnnnnnnnnnnnnnnnnnnnnnnnnnnnnnnnnnnnnnnnnnnnnnnnnnnnnnnnnnnnnnnnnnnnnnnnnnnnnnnnnnnnnnnnnnnnnnnnnnnnnnnnnnnnnnnnnnnnnnnnnnnnnnnnnnnnnnnnnnnnnnnnnnnnnnnnnnnnnnnnnnnnnnnnnnnnnnnnnnnnnnnnnnnnnnnnnnnnnnnnnnnnnnnnnnnnnnnnnnnnnnnnnnnnnnnnnnnnnnnnnnnnnnnnnnnnnnnnnnnnnnnnnnnnnnnnnnnnnnnnnnnnnnnnnnnnnnnnnnnnnnnnnnnnnnnnnnnnnnnnnnnnnnnnnnnnnnnnnnnnnnnnnnnnnnnnnnnnnnnnnnnnnnnnnnnnnnnnnnnnnnnnnnnnnnnnnnnnnnnnnnnnnnnnnnnnnnnnnnnnnnnnnnnnnnnnnnnnnnnnnnnnnnnnnnnnnnnnnnnnnnnnnnnnnnnnnnnnnnnnnnnnnnnnnnnnnnnnnnnnnnnnnnnnnnnnnnnnnnnnnnnnnnnnnnnnnnnnnnnnnnnnnnnnnnnnnnnnnnnnnnnnnnnnnnnnnnnnnnnnnnnnnnnnnnnnnnnnnnnnnnnnnnnnnnnnnnnnnnnnnnnnnnnnnnnnnnnnnnnnnnnnnnnnnnnnnnnnnnnnnnnnnnnnnnnnnnnnnnnnnnnnnnnnnnnnnnnnnnnnnnnnnnnnnnnnnnnnnnnnnnnnnnnnnnnnnnnnnnnnnnnnnnnnnnnnnnnnnnnnnnnnnnnnnnnnnnnnnnnnnnnnnnnnnnnnnnnnnnnnnnnnnnnnnnnnnnnnnnnnnnnnnnnnnnnnnnnnnnnnnnnnnnnnnnnnnnnnnnnnnngaccaagaaagcggtgaagtgggtcaagcaggcaagccgcacagcggcggctcgcaaatatgcgccgtccaggcgaattcccccggccacaccacccgaggacaagtgcagtagatttccttttagtccgacagactcctagaagccacccgtgaatccctctccttcatcgcctcactgcgtcccaatcacagcattgatcccgacctgattctgaaaaataaacacggcaagttacaccacaagttcgacacctcgctgaccaacgtaatgaacagttacacactactcaccgcgccgacggtgacctggtatgcagaaggcaatgccgagctcatttcatgcctgctatcgcccgtgcaatttattggcaagcggcgtgcctctggtttttggttgcgtctcgcattggcaagttgaagccgatgaactggatggtatcgaaggaatgttcggtgaagcgctgcgtccggtgccgattgacttgttcgagggcgacacttcccacccgattgttgatgccgcctggcagcctgcctactggaatcccaatcatcggacggcctgctatgcgccagtttaaggacgtgcaatgctgagttttttcaatgaaaattttggccgtcatctgctgttgcgcaccgatatcagcttgaaattgagcagcggccgcaacgcagcatcagcaccggagacattatcggtttcgagttgcgcgcctgtgtcagcaaaaaactcaaaggccgtcacatctactttcgcacctcggattggcaacgtcggcatagctggatggaacgaaagagggaggcgcatggatttacgcttatcaccgtacattgcagcgcctcgatgcaaaccgtgcagactggcgagagacaatttacggttgatcagacggtctacaccggggttctcaaagtaacggacactgaacgttttaacgcagccctcgccaatggcatcggcattaagacccgtgctttcggctttggcatgttggttatttaacagaaggaatcagtatgaaatctatcatcattaacgccacacttaccaccatcggctccttgtctatcgccttgtctatcgccttgccggtctctgaaggtcagcagggcaacaattcccatcgtcacgcgcggcattgatgtagcgggcaacaagcaacaaaccggctacctgccagccagcacgctacgcggatttttacgcgcgccatcgtggtcgaacaaatgacgcaagccgcccccgcagggcatcactacaccctgcaaaaagcctacgccgacttgattggacaggatgccacctccgaatccagtgacgatattgatctgctcaagttgcgtcaaacccgtgaggacaacgcagtactcgatttatttggctcaggtctaggcattaaatcgcgcctgctggtgtcgcatttcttaccgacacataacgtattaccggaagtcttcaccggcgtgcgcaaggatttggacgataccgacggcgtgctggagctgatttctgaagcggatcgcgcgcgttatccggggcgttccgacgcgaacagcaaacgcgcggccgctgtaacggtggtaaaaggactggaggcaaagttgcgcaaagccaaaaaggccggtgagtcactggtcgaattggaactcgcgcggcaagcggcacaggatattgtcgaacgctacgaatccgacatgggcgagatgaccaatttttcacgcacgctgaccaactattttgccctcccggcaggcatcaaactcaaaggccgattagtgattgagaaagcgcgtgagcgtgatctggccatgatcgaactcgcgctgaatagactttcacagcgtccgattcttggcgcgcaaagcgcgcgcggctgcggggaaattgccggcgtattggatgtattagtggatggcctgcttgccaaaaaaatcaccatctgcgcatggcaagcagcgattattagcaatttttctgctgtcgaatcttgaaaataggtttaataatcaatgcataacaacagattggatcaagccaccccttgtttgggtgcttactataaataaaaatctggcattgtttcacgtgaaacaatcggtttggtcgtttacgaaaaagggaagttgaatgttccgttctgccgagcaaggtaattttgccgctatcgtcgcccggcacatcgcctcggctgacgcaccgttattgctggaaggcggcacggggatcggtaaaactcgtgcctatctttccgcgctgattcaatccggtttgcgcgtcactatcgtgctgcctacccatcagttgattgaccagatgttggcctcaaacgacttggcggcgacgcgaagcgcggccagtattgccgcctttcgtccagcgcgactatttgaaaattggtcggactatgaagctaataagcgcgccgcaatggccgcaaccgtgatgttttgcacagcggccagcgtcatcattgatcagcgtctgggcggcgaatataacggcgcaacaaaccgcgactatttgttgtttgatgaagccgatcaactaccggacatggccgcattgcaaagcgacttcaccattacacaggcggaactgacagcgttgggcataacactcagctgcgtgactgaagccttgcaagccattttggtcaaagcgccaaacgtggttgagccggaaaccagagccgccgcacgcatcattctcgatgccatcgagcaaccagcgtggtatcagtccgctggtgtaagcgatgaaggcgacattatgctgacgcacagcttgcccggtcgtttactgaaataaatcagcaattcagcccatttcgcctttgtctctgccacgctaaccgtcgccagacagctcaaggattttcaaaattcgatgggcattgcgacggtaagtaacttgtcgggcgtgatagaaccggagcgtcacggtacgcttgatttccactttatgccggtggtggttgataccgaggaatggcgcagtgccgtcatccgaatggcgaacgaagcgcctaaaccggtgctgatcgcgaccacatcacaccgtttttccagcctgctcggcgaacaattatcaggtgcaacggtaaggtcggacagcgaatccaccgctcacgccgccgtgcgcgtttcagccaatgggttttttattgcagccggtgcctgggcagggctggatacgccgttgcgctggcgttcgatcatcgtgccgcgcgtgccatacggacaaccagtggtgatagacggcgaaaccaccacccgttatttcgatgcgcacaacacggcgattcgccgtttgcgccaggtgataggccgtggtttacgttcggcggatgcaatctgtagcgtttacatcctcgatggcagggctgaaaaattaacgggctttgtaccggagcgtttttccgccgcatgggcatcacgcaaaacgtatttggagggggcgaggcaagcgctgattttgagcaggaacgaacgctatcccgccgtccgtcgtgccgcactcaattactatggtcgaaaatgtatggcgtgtagctttgtgccgcgcgtggatgcacaactggacgtgcatcatctcgacccgattgccgaaggtgttcgctgcatcaggattgaggatgtggtcgttttgtgtgcaaactgtcaccgtctggttcacgctacccatccccctttagcactcaccgatctaattgcgctactcaacgcaacaatatgattatccttaacgtaaaactcgcgcagcgacgaactgtacccctcgccctctgggagaggggggacgggggtgagggaacgggcatggcgggttttatcatcaggggtggttacttttccatgcccgttagatttttttcaattaaattcccgttagctagttctcatccagaaacgtaatgctttgattttatttaataaaatgtgattttttagtggaa

SEQ ID NO: 313 - DNA, 11007 bp, Artificial Sequence
  Synthetic Oligonucleotide
  misc_feature (1)..(7126): n is a, c, g, or t
  misc_feature (9054)..(9054): n is a, c, g, or t
nnnnnnnnnnnnnnnnnnnnnnnnnnnnnnnnnnnnnnnnnnnnnnnnnnnnnnnnnnnnnnnnnnnnnnnnnnnnnnnnnnnnnnnnnnnnnnnnnnnnnnnnnnnnnnnnnnnnnnnnnnnnnnnnnnnnnnnnnnnnnnnnnnnnnnnnnnnnnnnnnnnnnnnnnnnnnnnnnnnnnnnnnnnnnnnnnnnnnnnnnnnnnnnnnnnnnnnnnnnnnnnnnnnnnnnnnnnnnnnnnnnnnnnnnnnnnnnnnnnnnnnnnnnnnnnnnnnnnnnnnnnnnnnnnnnnnnnnnnnnnnnnnnnnnnnnnnnnnnnnnnnnnnnnnnnnnnnnnnnnnnnnnnnnnnnnnnnnnnnnnnnnnnnnnnnnnnnnnnnnnnnnnnnnnnnnnnnnnnnnnnnnnnnnnnnnnnnnnnnnnnnnnnnnnnnnnnnnnnnnnnnnnnnnnnnnnnnnnnnnnnnnnnnnnnnnnnnnnnnnnnnnnnnnnnnnnnnnnnnnnnnnnnnnnnnnnnnnnnnnnnnnnnnnnnnnnnnnnnnnnnnnnnnnnnnnnnnnnnnnnnnnnnnnnnnnnnnnnnnnnnnnnnnnnnnnnnnnnnnnnnnnnnnnnnnnnnnnnnnnnnnnnnnnnnnnnnnnnnnnnnnnnnnnnnnnnnnnnnnnnnnnnnnnnnnnnnnnnnnnnnnnnnnnnnnnnnnnnnnnnnnnnnnnnnnnnnnnnnnnnnnnnnnnnnnnnnnnnnnnnnnnnnnnnnnnnnnnnnnnnnnnnnnnnnnnnnnnnnnnnnnnnnnnnnnnnnnnnnnnnnnnnnnnnnnnnnnnnnnnnnnnnnnnnnnnnnnnnnnnnnnnnnnnnnnnnnnnnnnnnnnnnnnnnnnnnnnnnnnnnnnnnnnnnnnnnnnnnnnnnnnnnnnnnnnnnnnnnnnnnnnnnnnnnnnnnnnnnnnnnnnnnnnnnnnnnnnnnnnnnnnnnnnnnnnnnnnnnnnnnnnnnnnnnnnnnnnnnnnnnnnnnnnnnnnnnnnnnnnnnnnnnnnnnnnnnnnnnnnnnnnnnnnnnnnnnnnnnnnnnnnnnnnnnnnnnnnnnnnnnnnnnnnnnnnnnnnnnnnnnnnnnnnnnnnnnnnnnnnnnnnnnnnnnnnnnnnnnnnnnnnnnnnnnnnnnnnnnnnnnnnnnnnnnnnnnnnnnnnnnnnnnnnnnnnnnnnnnnnnnnnnnnnnnnnnnnnnnnnnnnnnnnnnnnnnnnnnnnnnnnnnnnnnnnnnnnnnnnnnnnnnnnnnnnnnnnnnnnnnnnnnnnnnnnnnnnnnnnnnnnnnnnnnnnnnnnnnnnnnnnnnnnnnnnnnnnnnnnnnnnnnnnnnnnnnnnnnnnnnnnnnnnnnnnnnnnnnnnnnnnnnnnnnnnnnnnnnnnnnnnnnnnnnnnnnnnnnnnnnnnnnnnnnnnnnnnnnnnnnnnnnnnnnnnnnnnnnnnnnnnnnnnnnnnnnnnnnnnnnnnnnnnnnnnnnnnnnnnnnnnnnnnnnnnnnnnnnnnnnnnnnnnnnnnnnnnnnnnnnnnnnnnnnnnnnnnnnnnnnnnnnnnnnnnnnnnnnnnnnnnnnnnnnnnnnnnnnnnnnnnnnnnnnnnnnnnnnnnnnnnnnnnnnnnnnnnnnnnnnnnnnnnnnnnnnnnnnnnnnnnnnnnnnnnnnnnnnnnnnnnnnnnnnnnnnnnnnnnnnnnnnnnnnnnnnnnnnnnnnnnnnnnnnnnnnnnnnnnnnnnnnnnnnnnnnnnnnnnnnnnnnnnnnnnnnnnnnnnnnnnnnnnnnnnnnnnnnnnnnnnnnnnnnnnnnnnnnnnnnnnnnnnnnnnnnnnnnnnnnnnnnnnnnnnnnnnnnnnnnnnnnnnnnnnnnnnnnnnnnnnnnnnnnnnnnnnnnnnnnnnnnnnnnnnnnnnnnnnnnnnnnnnnnnnnnnnnnnnnnnnnnnnnnnnnnnnnnnnnnnnnnnnnnnnnnnnnnnnnnnnnnnnnnnnnnnnnnnnnnnnnnnnnnnnnnnnnnnnnnnnnnnnnnnnnnnnnnnnnnnnnnnnnnnnnnnnnnnnnnnnnnnnnnnnnnnnnnnnnnnnnnnnnnnnnnnnnnnnnnnnnnnnnnnnnnnnnnnnnnnnnnnnnnnnnnnnnnnnnnnnnnnnnnnnnnnnnnnnnnnnnnnnnnnnnnnnnnnnnnnnnnnnnnnnnnnnnnnnnnnnnnnnnnnnnnnnnnnnnnnnnnnnnnnnnnnnnnnnnnnnnnnnnnnnnnnnnnnnnnnnnnnnnnnnnnnnnnnnnnnnnnnnnnnnnnnnnnnnnnnnnnnnnnnnnnnnnnnnnnnnnnnnnnnnnnnnnnnnnnnnnnnnnnnnnnnnnnnnnnnnnnnnnnnnnnnnnnnnnnnnnnnnnnnnnnnnnnnnnnnnnnnnnnnnnnnnnnnnnnnnnnnnnnnnnnnnnnnnnnnnnnnnnnnnnnnnnnnnnnnnnnnnnnnnnnnnnnnnnnnnnnnnnnnnnnnnnnnnnnnnnnnnnnnnnnnnnnnnnnnnnnnnnnnnnnnnnnnnnnnnnnnnnnnnnnnnnnnnnnnnnnnnnnnnnnnnnnnnnnnnnnnnnnnnnnnnnnnnnnnnnnnnnnnnnnnnnnnnnnnnnnnnnnnnnnnnnnnnnnnnnnnnnnnnnnnnnnnnnnnnnnnnnnnnnnnnnnnnnnnnnnnnnnnnnnnnnnnnnnnnnnnnnnnnnnnnnnnnnnnnnnnnnnnnnnnnnnnnnnnnnnnnnnnnnnnnnnnnnnnnnnnnnnnnnnnnnnnnnnnnnnnnnnnnnnnnnnnnnnnnnnnnnnnnnnnnnnnnnnnnnnnnnnnnnnnnnnnnnnnnnnnnnnnnnnnnnnnnnnnnnnnnnnnnnnnnnnnnnnnnnnnnnnnnnnnnnnnnnnnnnnnnnnnnnnnnnnnnnnnnnnnnnnnnnnnnnnnnnnnnnnnnnnnnnnnnnnnnnnnnnnnnnnnnnnnnnnnnnnnnnnnnnnnnnnnnnnnnnnnnnnnnnnnnnnnnnnnnnnnnnnnnnnnnnnnnnnnnnnnnnnnnnnnnnnnnnnnnnnnnnnnnnnnnnnnnnnnnnnnnnnnnnnnnnnnnnnnnnnnnnnnnnnnnnnnnnnnnnnnnnnnnnnnnnnnnnnnnnnnnnnnnnnnnnnnnnnnnnnnnnnnnnnnnnnnnnnnnnnnnnnnnnnnnnnnnnnnnnnnnnnnnnnnnnnnnnnnnnnnnnnnnnnnnnnnnnnnnnnnnnnnnnnnnnnnnnnnnnnnnnnnnnnnnnnnnnnnnnnnnnnnnnnnnnnnnnnnnnnnnnnnnnnnnnnnnnnnnnnnnnnnnnnnnnnnnnnnnnnnnnnnnnnnnnnnnnnnnnnnnnnnnnnnnnnnnnnnnnnnnnnnnnnnnnnnnnnnnnnnnnnnnnnnnnnnnnnnnnnnnnnnnnnnnnnnnnnnnnnnnnnnnnnnnnnnnnnnnnnnnnnnnnnnnnnnnnnnnnnnnnnnnnnnnnnnnnnnnnnnnnnnnnnnnnnnnnnnnnnnnnnnnnnnnnnnnnnnnnnnnnnnnnnnnnnnnnnnnnnnnnnnnnnnnnnnnnnnnnnnnnnnnnnnnnnnnnnnnnnnnnnnnnnnnnnnnnnnnnnnnnnnnnnnnnnnnnnnnnnnnnnnnnnnnnnnnnnnnnnnnnnnnnnnnnnnnnnnnnnnnnnnnnnnnnnnnnnnnnnnnnnnnnnnnnnnnnnnnnnnnnnnnnnnnnnnnnnnnnnnnnnnnnnnnnnnnnnnnnnnnnnnnnnnnnnnnnnnnnnnnnnnnnnnnnnnnnnnnnnnnnnnnnnnnnnnnnnnnnnnnnnnnnnnnnnnnnnnnnnnnnnnnnnnnnnnnnnnnnnnnnnnnnnnnnnnnnnnnnnnnnnnnnnnnnnnnnnnnnnnnnnnnnnnnnnnnnnnnnnnnnnnnnnnnnnnnnnnnnnnnnnnnnnnnnnnnnnnnnnnnnnnnnnnnnnnnnnnnnnnnnnnnnnnnnnnnnnnnnnnnnnnnnnnnnnnnnnnnnnnnnnnnnnnnnnnnnnnnnnnnnnnnnnnnnnnnnnnnnnnnnnnnnnnnnnnnnnnnnnnnnnnnnnnnnnnnnnnnnnnnnnnnnnnnnnnnnnnnnnnnnnnnnnnnnnnnnnnnnnnnnnnnnnnnnnnnnnnnnnnnnnnnnnnnnnnnnnnnnnnnnnnnnnnnnnnnnnnnnnnnnnnnnnnnnnnnnnnnnnnnnnnnnnnnnnnnnnnnnnnnnnnnnnnnnnnnnnnnnnnnnnnnnnnnnnnnnnnnnnnnnnnnnnnnnnnnnnnnnnnnnnnnnnnnnnnnnnnnnnnnnnnnnnnnnnnnnnnnnnnnnnnnnnnnnnnnnnnnnnnnnnnnnnnnnnnnnnnnnnnnnnnnnnnnnnnnnnnnnnnnnnnnnnnnnnnnnnnnnnnnnnnnnnnnnnnnnnnnnnnnnnnnnnnnnnnnnnnnnnnnnnnnnnnnnnnnnnnnnnnnnnnnnnnnnnnnnnnnnnnnnnnnnnnnnnnnnnnnnnnnnnnnnnnnnnnnnnnnnnnnnnnnnnnnnnnnnnnnnnnnnnnnnnnnnnnnnnnnnnnnnnnnnnnnnnnnnnnnnnnnnnnnnnnnnnnnnnnnnnnnnnnnnnnnnnnnnnnnnnnnnnnnnnnnnnnnnnnnnnnnnnnnnnnnnnnnnnnnnnnnnnnnnnnnnnnnnnnnnnnnnnnnnnnnnnnnnnnnnnnnnnnnnnnnnnnnnnnnnnnnnnnnnnnnnnnnnnnnnnnnnnnnnnnnnnnnnnnnnnnnnnnnnnnnnnnnnnnnnnnnnnnnnnnnnnnnnnnnnnnnnnnnnnnnnnnnnnnnnnnnnnnnnnnnnnnnnnnnnnnnnnnnnnnnnnnnnnnnnnnnnnnnnnnnnnnnnnnnnnnnnnnnnnnnnnnnnnnnnnnnnnnnnnnnnnnnnnnnnnnnnnnnnnnnnnnnnnnnnnnnnnnnnnnnnnnnnnnnnnnnnnnnnnnnnnnnnnnnnnnnnnnnnnnnnnnnnnnnnnnnnnnnnnnnnnnnnnnnnnnnnnnnnnnnnnnnnnnnnnnnnnnnnnnnnnnnnnnnnnnnnnnnnnnnnnnnnnnnnnnnnnnnnnnnnnnnnnnnnnnnnnnnnnnnnnnnnnnnnnnnnnnnnnnnnnnnnnnnnnnnnnnnnnnnnnnnnnnnnnnnnnnnnnnnnnnnnnnnnnnnnnnnnnnnnnnnnnnnnnnnnnnnnnnnnnnnnnnnnnnnnnnnnnnnnnnnnnnnnnnnnnnnnnnnnnnnnnnnnnnnnnnnnnnnnnnnnnnnnnnnnnnnnnnnnnnnnnnnnnnnnnnnnnnnnnnnnnnnnnnnnnnnnnnnnnnnnnnnnnnnnnnnnnnnnnnnnnnnnnnnnnnnnnnnnnnnnnnnnnnnnnnnnnnnnnnnnnnnnnnnnnnnnnnnnnnnnnnnnnnnnnnnnnnnnnnnnnnnnnnnnnnnnnnnnnnnnnnnnnnnnnnnnnnnnnnnnnnnnnnnnnnnnnnnnnnnnnnnnnnnnnnnnnnnnnnnnnnnnnnnnnnnnnnnnnnnnnnnnnnnnnnnnnnnnnnnnnnnnnnnnnnnnnnnnnnnnnnnnnnnnnnnnnnnnnnnnnnnnnnnnnnnnnnnnnnnnnnnnnnnnnnnnnnnnnnnnnnnnnnnnnnnnnnnnnnnnnnnnnnnnnnnnnnnnnnnnnnnnnnnnnnnnnnnnnnnnnnnnnnnnnnnnnnnnnnnnnnnnnnnnnnnnnnnnnnnnnnnnnnnnnnnnnnnnnnnnnnnnnnnnnnnnnnnnnnnnnnnnnnnnnnnnnnnnnnnnnnnnnnnnnnnnnnnnnnnnnnnnnnnnnnnnnnnnnnnnnnnnnnnnnnnnnnnnnnnnnnnnnnnnnnnnnnnnnnnnnnnnnnnnnnnnnnnnnnnnnnnnnnnnnnnnnnnnnnnnnnnnnnnnnnnnnnnnnnnnnnnnnnnnnnnnnnnnnnnnnnnnnnnnnnnnnnnnnnnnnnnnnnnnnnnnnnnnnnnnnnnnnnnnnnnnnnnnnnnnnnnnnnnnnnnnnnnnnnnnnnnnnnnnnnnnnnnnnnnnnnnnnnnnnnnnnnnnnnnnnnnnnnnnnnnnnnnnnnnnnnnnnnnnnnnnnnnnnnnnnnnnnnnnnnnnnnnnnnnnnnnnnnnnnnnnnnnnnnnnnnnnnnnnnnnnnnnnnnnnnnnnnnnnnnnnnnnnnnnnnnnnnnnnnnnnnnnnnnnnnnnnnnnnnnnnnnnnnnnnnnnnnnnnnnnnnnnnnnnnnnnnnnnnnnnnnnnnnnnnnnnnnnnnnnnnnnnnnnnnnnnnnnnnnnnnnnnnnnnnnnnnnnnnnnnnnnnnnnnnnnnnnnnnnnnnnnnnnnnnnnnnnnnnnnnnnnnnnnnnnnnnnnnnnnnnnnnnnnnnnnnnnnnnnnnnnnnnnnnnnnnnnnnnnnnnnnnnnnnnnnnnnnnnnnnnnnnnnnnnnnnnnnnnnnnnnnnnnnnnnnnnnnnnnnnnnnnnnnnnnnnnnnnnnnnnnnnnnnnnnnnnnnnnnnnnnnnnnnnnnnnnnnnnnnnnnnnnnnnnnnnnnnnnnnnnnnnnnnnnnnnnnnnnnnnnnnnnnnnnnnnnnnnnnnnnnnnnnnnnnnnnnnnnnnnnnnnnnnnnnnnnnnnnnnnnnnnnnnnnnnnnnnnnnnnnnnnnnnnnnnnnnnnnnnnnnnnnnnnnnnnnnnnnnnnnnnnnnnnnnnnnnnnnnnnnnnnnnnnnnnnnnnnnnnnnnnnnnnnnnnnnnnnnnnnnnnnnnnnnnnnnnnnnnnnnnnnnnnnnnnnnnnnnnnnnnnnnnnnnnnnnnnnnnnnnnnnnnnnnnnnnnnnnnnnnnnnnnnnnnnnnnnnnnnnnnnnnnnnnnnnnnnnnnnnnnnnnnnnnnnnnnnnnnnnnnnnnnnnnnnnnnnnnnnnnnnnnnnnnnnnnnnnnnnnnnnnnnnnnnnnnnnnnnnnnnnnnnnnnnnnnnnnnnnnnnnnnnnnnnnnnnnnnnnnnnnnnnnnnnnnnnnnnnnnnnnnnnnnnnnnnnnnnnnnnnnnnnnnnnnnnnnnnnnnnnnnnnnnnnnnnnnnnnnnnnnnnnnnnnnnnnnnnnnngtcaagcaggcaagccgcacagcggcggctcgcaaatatgcgccgtccaggcgaattcccccggccacaccacccgaggacaagtgcagtagatttccttttagtccgacagactcctagaagccacccgtgaatccctctccttcatcgcctcactgcgtcccaatcacagcattgatcccgacctgattctgaaaaataaacacggcaagttacaccacaagttcgacacctcgctgaccaacgtaatgaacagttacacactactcaccgcgccgacggtgacctggtatgcagaaggcaatgccgagctcatttcatgcctgctatcgcccgtgcaatttattggcaagcggcgtgcctctggtttttggttgcgtctcgcattggcaagttgaagccgatgaactggatggtatcgaaggaatgttcggtgaagcgctgcgtccggtgccgattgacttgttcgagggcgacacttcccacccgattgttgatgccgcctggcagcctgcctactggaatcccaatcatcggacggcctgctatgcgccagtttaaggacgtgcaatgctgagttttttcaatgaaaattttggccgtcatctgctgttgcgcaccgatatcagcttgaaattgagcagcggccgcaacgcagcatcagcaccggagacattatcggtttcgagttgcgcgcctgtgtcagcaaaaaactcaaaggccgtcacatctactttcgcacctcggattggcaacgtcggcatagctggatggaacgaaagagggaggcgcatggatttacgcttatcaccgtacattgcagcgcctcgatgcaaaccgtgcagactggcgagagacaatttacggttgatcagacggtctacaccggggttctcaaagtaacggacactgaacgttttaacgcagccctcgccaatggcatcggcattaagacccgtgctttcggctttggcatgttggttatttaacagaaggaatcagtatgaaatctatcatcattaacgccacacttaccaccatcggctccttgtctatcgccttgtctatcgccttgccggtctctgaaggtcagcagggcaacaattcccatcgtcacgcgcggcattgatgtagcgggcaacaagcaacaaaccggctacctgccagccagcacgctacgcggatttttacgcgcgccatcgtggtcgaacaaatgacgcaagccgcccccgcagggcatcactacaccctgcaaaaagcctacgccgacttgattggacaggatgccacctccgaatccagtgacgatattgatctgctcaagttgcgtcaaacccgtgaggacaacgcagtactcgatttatttggctcaggtctaggcattaaatcgcgcctgctggtgtcgcatttcttaccgacacataacgtattaccggaagtcttcaccggcgtgcgcaaggatttggacgataccgacggcgtgctggagctgatttctgaagcggatcgcgcgcgttatccggggcgttccgacgcgaacagcaaacgcgcggccgctgtaacggtggtaaaaggactggaggcaaagttgcgcaaagccaaaaaggccggtgagtcactggtcgaattggaactcgcgcggcaagcggcacaggatattgtcgaacgctacgaatccgacatgggcgagatgaccaatttttcacgcacgctgaccaactattttgccctcccggcaggcatcaaactcaaaggccgattagtgattgagaaagcgcgtgagcgtgatctggccatgatcgaactcgcgctgaatagactttcacagcgtccgattcttggcgcgcaaagcgcgcgcggctgcggggaaattgccggcgtattggatgtattagtggatggcctgcttgccaaaaaaatcaccatcngcgcatggcaagcagcgattattagcaatttttctgctgtcgaatcttgaaaataggtttaataatcaatgcataacaacagattggatcaagccaccccttgtttgggtgcttactataaataaaaatctggcattgtttcacgtgaaacaatcggtttggtcgtttacgaaaaagggaagttgaatgttccgttctgccgagcaaggtaattttgccgctatcgtcgcccggcacatcgcctcggctgacgcaccgttattgctggaaggcggcacggggatcggtaaaactcgtgcctatctttccgcgctgattcaatccggtttgcgcgtcactatcgtgctgcctacccatcagttgattgaccagatgttggcctcaaacgacttggcggcgacgcgaagcgcggccagtattgccgcctttcgtccagcgcgactatttgaaaattggtcggactatgaagctaataagcgcgccgcaatggccgcaaccgtgatgttttgcacagcggccagcgtcatcattgatcagcgtctgggcggcgaatataacggcgcaacaaaccgcgactatttgttgtttgatgaagccgatcaactaccggacatggccgcattgcaaagcgacttcaccattacacaggcggaactgacagcgttgggcataacactcagctgcgtgactgaagccttgcaagccattttggtcaaagcgccaaacgtggttgagccggaaaccagagccgccgcacgcatcattctcgatgccatcgagcaaccagcgtggtatcagtccgctggtgtaagcgatgaaggcgacattatgctgacgcacagcttgcccggtcgtttactgaaataaatcagcaattcagcccatttcgcctttgtctctgccacgctaaccgtcgccagacagctcaaggattttcaaaattcgatgggcattgcgacggtaagtaacttgtcgggcgtgatagaaccggagcgtcacggtacgcttgatttccactttatgccggtggtggttgataccgaggaatggcgcagtgccgtcatccgaatggcgaacgaagcgcctaaaccggtgctgatcgcgaccacatcacaccgtttttccagcctgctcggcgaacaattatcaggtgcaacggtaaggtcggacagcgaatccaccgctcacgccgccgtgcgcgtttcagccaatgggttttttattgcagccggtgcctgggcagggctggatacgccgttgcgctggcgttcgatcatcgtgccgcgcgtgccatacggacaaccagtggtgatagacggcgaaaccaccacccgttatttcgatgcgcacaacacggcgattcgccgtttgcgccaggtgataggccgtggtttacgttcggcggatgcaatctgtagcgtttacatcctcgatggcagggctgaaaaattaacgggctttgtaccggagcgtttttccgccgcatgggcatcacgcaaaacgtatttggagggggcgaggcaagcgctgattttgagcaggaacgaacgctatcccgccgtccgtcgtgccgcactcaattactatggtcgaaaatgtatggcgtgtagctttgtgccgcgcgtggatgcacaactggacgtgcatcatctcgacccgattgccgaaggtgttcgctgcatcaggattgaggatgtggtcgttttgtgtgcaaactgtcaccgtctggttcacgctacccatccccctttagcactcaccgatctaattgcgctactcaacgcaacaatatgattatccttaacgtaaaactcgcgcagcgacgaactgtacccctcgccctctgggagaggggggacgggggtgagggaacgggcatggcgggttttatcatcaggggtggttacttttccatgcccgttagatttttttcaattaaattcccgttagcta

SEQ ID NO: 314 - DNA, 11007 bp, Artificial Sequence; identical to SEQ ID NO: 313
  Synthetic Oligonucleotide
  misc_feature (1)..(7126): n is a, c, g, or t
  misc_feature (9054)..(9054): n is a, c, g, or t

SEQ ID NO: 315 - DNA, 10983 bp, Artificial Sequence
  Synthetic Oligonucleotide
  misc_feature (1)..(71): n is a, c, g, or t
nnnnnnnnnnnnnnnnnnnnnnnnnnnnnnnnnnnnnnnnnnnnnnnnnnnnnnnnnnnnnnnnnnnnnnngtccatgctggtggttacgttgacgatccgtccccagcccgcattcagcatatggggcaccacagcctttgccatcatgaaagcggctttaacatttgtgtcgatgatcgcgtcccagcgctcgtctggcacctcccaaaacatgatgtttttgacataataatcctcacggatggtcgcctggccgatgccggcattgttgaccaaaatttgcaccgccccaaacttttcgattgtctgggtgacgatgtcagcgcagaaattcgccgaccgtatgtcgccgccgagagtgaggatgcgttctgccagttcgggccgagtctgtttgatccgggccgcggcatcgttattgatgtcgactgcggtaacattcaatccggcatcggcaagcgcttctgtagctgctccgccaagtccaccacccgcgcctgtgacaatcgctgttcttgtcttactcatttccatcccttgccggcttttagccgacattgcccatgtgatcttcacaatcggcacaatgatacaaaatcataccgttttgcctaacatgtttccgaccttgtggcactgcttatagagggcgttgtcgtattcgatcttctgcttacggtttttcttggccgtgcacctcggatcacggtccttgatccgagggcaagggttaaggggacaagctgattaatgttccgtggtcgttgaggcatgtaccacggcccattgcttgaggaccacaagagacattgacttcgtgcctcgaaaacatccgccgctgatcaagccagcaaaggttagtcgtgccgcgtaggaggtaattgaatgagttgcatgcatatcattccggcatcgttctcctgaacgattggcgtttaaggatagcagcataccagcttgccaggttagtgtaggtttcggaccacccaggaacaatgtctctaaactccatgtaaccgagcgcacaggcgaccgctatttcacccattaagggtgggtcgttaaaatcaattgccgcgttatccaggaccgaaagcgctgactttactttgcctgtttggcgatcgataacgccttgggaacgcttttcgttagacctttgattttcttgcgataccgcaatcactgcttcgccaagaccgtcacccaacgcctcaagcgtaagaacatgccacctctttggttcggattgcggtattaattctttactattagtcaaattatccacataggcgcatatcaccggagagtcacacacgatatcgcctgcatcaaggatcgcgaccggtactttgccgagcggattaaaattttggatatcaccacgttcttcccgcgtgattgttttccattctacctcatcaaattgccctgtctcaaaagcgacgacacggaccttgcgagcgtacggtgaattatttgttatataacatttcattataggttccctatttgtttatagacttccctgacgtggagtatttttgattaaattctttatcggtcaaatgtccttggtcctttaaagaccaaaatttatctttaaacctgacttcattgaggttttgcaaagtagtcaaaataaattatggacagcgtcaaccagttgaccagaccgcccgagcattctatctgcaattttaacaaccagcatgttgggtgtacatagaggtgctatcttcagcaactctcgtacagcctcttcttcacttccttcgccaagccagtcggcaaggatcgacagtgctatagcgggcgaccggctcattcctgcatgacaatgaatcagcaaagacggttgatcccattggcgcgcgaagacaagcgcggagtgcacatgatgttcttcgggcattacccagttatcaacgggtatacttatgtcgtcgaatgttaaaacgcgttgtggagggtaaccactctctactctgaaagggtctcttatcccgctgtcttcaatcgtgatgatgccatcatgagcctcaatattggcttctcgggcagcctcgagactacaaatctgtatgtagggaacaaccctattgccctgcattctcgaaccgttcacgcatgtcgacggggatcccgccaacaacccagtgcttaacgtgctgcgtgattgcctgtgtcgccagattcccctcgataaagatctcgaagacgtctccgcgatccatttcctcaaagatgtcgttcacacgggattcaaactccgtgaacgacgtgagcccgtcgaagacaccctgcccaacccagtaagcggctttgtagtgatgcgcgttcatgggcggcgagaactgcgtttttggagggacaagaggttcatgggcaaagtctatggcgatatgattgtcaatgggagtctttgcgacaaacccagcccaagcccctacctcaggaaccatgccctctgatccggggctgccggtccagcctgagagctaatcagttattcaaacaggggccaggggccgtgggccgtggtgcactgtcgctggcatcgtaggggggcactttattttagctaatccgccgcgtcggcaatcgccttgcgcgcggcggccgcgttctggaacagatacagcacgccgatcacgatacaggcaacattggcgaacaccacccagctggccagcatggcgggcagcatggcgccaaggccgagcgcggccagcagaacacgcattgccggattcatttctttagtcgcgtagcctacaaaggcggttgagatgaaatacaccccgacacaggcggtcgcgacgtcgatcatcgtcgcctgccattcgccctgtagcagcagggtcggcgaataggcgaacaggaacgggatgatgtaggccaaccaggcgaacatcatcgaccgcatcgccgtgcgcatagggtcctcgcgcgtcagcgacgccgcggtaaaggcgcacaacgccaccggtggggtaatcatcgacatcatgccgaaatagaggatgaacatatgggcggagaccggcgaaacgcctgcttcggcaatcgccggggcaatcattgccgccagtagcaagtagaccgccgaggtcggcatccccatcccgagaatgatcgaggcaaaggcagcaatcagcagcagcagcagcaggctgtcgcccgcctgtttgagcaggaacagggtaaagccctcgcccagaccggttgtgttgagaataaacatcacccagccagcgccgatcacgacaaagaccagttcaaccaacaccagcccggccccgccgaaggacccgatcagcttggcaagcgacatgcgctggcccttataggaccgcacgaaccccagcagcacaacaatcacggcggcatacattgctgcccgctgcggttcggcccacagccagaacagcgcgtagatcagcataacgaagggcagcagaaaatgccctccctgaagcaggacactgcccatcatcggcagttcttcatcgacctgcccgaccttgtcctttgcggcaacgcgatcgaccatgatgaagaccgcaaaatagtagagcatcgccggcaccagcgccgccacgacgatatcggtatagggaatctcgagaatttcggacatcaggaaggccgcagcccccatgattggcggcatgaactggccacctgtcgaagccaccgcttcaatcgcgccggcgttgatccccgaatagcccgcatggcgcatcagcggaatggtaattacgccggtcgaagccacgttggagactgcactgccggaaatcgagccgaagaacgcgctggcaaccaccgaaatcttggccgcgccaccgcgcttgtgcccgaccatcgccatggcgagatcgatgaagaagcggccaccgcccgagttgaccaacagctggccgaagaagataaatatcagaacgacttcgaccgaaattttaagcggcaggccgagcgccgctcctgaatcgagcgccagatcggtggccagggaatcccagtaaaccgtcagccccttgaggtcgccgctgacctgatcggcaaacagggcatagaccatgaaaaagaccacgacgccgaagaaggcatgacctgccgtacggcggaccgcctccatcgacagcacgaccgtgatacagccgatgatcagcgcctcaaaagtgcggtcgccatattcttccgacaggcgttcatagtcgaacatgacccacatcatcgtcaggaagccgatgatcgctgcagcccaatcatagagcggcggcggcgccttatgcccgtgctgcacgcggtagcggaggaaaacgataaagaaggaaagcgcccaggacgccgccagcagctgctggccaaagaaggtcaggtcgagccagcgatgggcctcaatcgcccacagcacacctagcgtcaccatgatgcccccggcgacacgggtcaggcgatcaacgaacgctccctccggagggagcgtcgcagtgctttcagcgtctgtcatgatggtcacccgccgcggtgccgcaaatccggcaccgcgtttgttcgggtgaaagccttacatcatttccttgtaggctttcagcgcgccaggatgatacggcacgttggtattcttatacatcatcttcttgggattaaagccgttgaaagcgccgtgcgacttggccaggctcttcttgttggcggccatcgtcttgacgatcttgtatacgatttcggccggcacatgcgcacccacggtcaggaagaacggataggtcatgacattggtcgggccaaccacaccgggcgtccgcttagccggcatgatcgtcgtcatgtaggtctcgggataccaatcctgcatctgcttgaccgcctttggcgagttgtcgagcgacaggaagcgcagcccgccccgcgaccggagcacggcgtgctgtttcttggaagcggcagttcccggcgggatgatggcaatatcctgcttgccgcgcgccatgtcgtcacccgacggcacgtagcgcgaatagggcgtgttgaccatgtcttcctgtttcaaaccacatgtggccagcagggccgactgggtcagctgcaggatggtctgagcggtaaatttgtagcccatccgcttgcccttggcgtcgcaaattgtcttgatcggcgagtcgaacggcaccgccagcgtcgatttcagcggaaacatcacgccgaccatgcggaaattcggctgggggcccttcttcttgaaggtgccggtgccggtgagggcaaaacgcgattcagctgcattattgatgccgaaatcgatctgaccggaattcatctgcggcacgatggagaacgagccgccgccaggacgcactcgcatctggaccccgcccttgacgttcatcagcttcgaaatcgccgctcccgagctataggccagcgagccctgcttgttggtgccgatggaataaaccttctgcgcaaaggccggcagggacagccccgtcgcgacgatggtcgcgagggcaatcgatgcaattttcataatttgaatactccctgaaatgtgtatttggtttaactcagcaggactgtacaccgccaagtcacccggtcaacaataagtatctgttttactgggtaattacggtgaccggtggaaacagggcgcatcaataaattggtgaaatgctcgaaaaattggatcgaatcaggcgacgtcttccctggcctcgggctgcgtctgatacatcgcccagatccgatccagctcttcgaggcaaatcggatcccagtctttcttgggccaacgatcctcgccccaatggcggtgcgtatcgcggccgcgcagcaccctggcggaggcgccgggaaatttggtctcacgaacgttcggcgcgatgtagtgaatggacagtccgatccggcggtcgcccgtccggttgggatcggaggcgtgtaccgtatcttccttgtgaaacgaaaactgtcaggtcgggcagcggaaccggctaacaatattgaaagagaaccatcatggcggaacgcatctgagcctattgttaagtattgaaacacaacaattgatcatctcttattgaggcccgacttttttctaaatgctaataattatctttatttccgttaacatcattgtttcgctgacatacttttgaaatttagttcaagtcggcgattgtaaggtggaggccttagcggcagtccaatgttggtgacgatgcttatatcaaattattttataattttagtttagtttcagtacgacgaaacgaaaaaataataaccaaagattttacccctctgtacgtaggatggcgcctatcatccaatgacctatagctattagatcatagtcatgccgaaaataacccagtatttgtatacccagtggcatgccgtcgtgcgctaacaaaggggcatttaaagtcggcacccctaacactgatgattgctcaccataaattgcattacctattgccatcccttcaggcgccgcaccagtgccatttagggttagcattgcatcatatttactggataaggcctcgtgccgcactctagctgaaatactccactctagagcttcttcatattgttcaggagtaatctccgctgcggctttagcccgattaaagacacggtcacctaataactctgggtttttatccaagtacatcatcaacggccaacgatattcataggcaagcacgatttcgatcaccttacttagttgaatcatatcctgttcgtaagactctagttccggatcttctcggcgactaacgatttcaactccctgtcgctcgagcttaaaaaccatttcgttaaagatttcgcgaacgggttccggtgtatcagcccacccagccgtatccactcgtgctaaccttttaggcttctgtgattttgggaggtgcgggtgaccttttaagcttgggtgaccagcatcgccgccagcattccgtgacaaccaatagcaactaatccacgtatctgcgagagaacccgcgagaaaacccaggtggccaatactgggcggcgaagggaatccgcctctagtgtttatcgccccccacgaaggtttaagcgcccaagtcccattatagcatgcagggcgtaggattgaaccacgcacctgcgtgccggtagcagccggtaccatcccagcgccgacggccgctcctgaaccactggatgaaccgccgggtgtgcgaccactatcccaagcatttctcgtcgggccagggttaccgaaagcgaattcagtggtgacggttttgccaatcataactgcgccgcctcttctaagaaaatagacgcaagctgcatcccaacctgtctcgtagccctcgaaaataggactcccgagctgcatgggcatatcttcagtttcaaacacatctttcatccctaatggcatgccatcgagcggtgaaagaattcggttttctttatagcgtaatgtcgaggcgtcggctgcttcacgggcgcggtcaagggaaagtgttacaaatgccttaacttcatgttcccgtgtttcaatggtttcaatgcaccgctctaaataagcgcgtggtgtatcagttccgttaacaaaacctggaattttgtcgtaaaaagatagtaattttgaggaggaggggtcgtaaggaattttcattattcattctcaattaatactaatccagacgaacaaatcttagaagcgagttatccaccaccgatgttgcaaatggagggcccgcaacttccagagcttatggttgccccagtttacagacgtcttgccaggtcgtgttttgggaaattatagcttcttcagctctaagtctctcatacggtatttgttcgtttaggccgagaggtggttttccgtttttcataaaacctcgcacggcttggagcataagacgtcgcatgcgaacaacagcgatatcggtggttcctaaatgctccgtgcttctatcgaaaattggccccatgctctcttgtataacagcatcttcgacttgaacgccgcgcaatcccgatgctgattttccgtcctccattgcagcacggtcttgaagccagtcgttttctcggtttcgagtcatacgaaagttatcatcaatatcaacgcccggtatgagcccagaccaggtgatttgtcgttctctttctttgtcgtcaacaggctgttttaaattgtatcggacaaaataaagcatcgtgttttcgtcatcgatggggacgaatgcctgtaaggcaccccaattcttttgaccggcaaacaaaccatagaacggggcaacgaaaagcgtggtccggatgtaggatttgtcttgttcctcggctatcgttctccgaatggcggcataacggaaaccgtaatctgtattttccacttcaaggcgtggttggccatcgccagaaggccggtcgacgacaagagagtcgccgcgataatcagaactggaattggctgctggcttaaaggtatcgctgtgtagataattggaatgcgcggtgtccaataccccctccagacattgcacccaattacacgctatatgcaatttggtatggactaaatgcgactcgggataatttgtgaactcaaaattgactggtgctggcttatcttcttcaggtcccatataggcccaaatgattccaccagcctcttgtaccgggtaggcaacggcttgtacccggttgatgacagcctcgatgttaatctcggtcggcatctcgataacgcgacctgacacatcaaatttccatccgtgatacaggcagcggagcccgcattcttcgttgcgggccaaaaacaacgaagccccgcggtgaggacaaagttcctggagaagaccgacgtcgccattactgtcccggaaggcaaccaaattttctcccattaactgaacgcgaacgggctgacgatcattctctagttcatggctaaataaggcagggatccaataccgtcgaaccatctggcccatcgaattttgtccgatgatgcgacataagagctcgttgtcttcaggcgtgagcatgtctcaaacttccatagatgcactgaaatttatccgaatgataaatccatagcgctgttaatcatagggcgctagcaaacgctgtccgcagcaccaatctgcttcggcaaactgaccgctagttacacatcgcgtggcgcttgatcgtggttcgtatcgatcctaggatttttccaacgagcacgatctcggcaaaattggggagatggggcatggccgggtacaaaaaactttcctctatcgaccacgcaaccaaagacagaggccatcaggatatcttggttggtttggatgatgagtaagaagggattcccatgatttgttctgcttggactaaataccgagcttctcggcaaattccgagcgccattccgagaacggcttcttggtcgggtcgtccttgatcaaatcctcggtaaaactcattatttcatcatcatcgagggacaggtcgagcggcacgccgcagggttgcgccacataccagggcgtgtcgagaaacacctcggaccggttttcttccggatcatagaaatagaccgaccaggcattgccgtggcagatcggaccgatccgggtgacaccgggataggccaacaatgcggtatgaattttgcgcagccggtcgagcgaatcgacccggaacgaaacgtgattatggtgcactgtgtcggacgtcgcggtgcgcccttcatacaacacgaattgatgatgatcgcgcgggtcggcacccatgaacgtgacctcgccgcgatcctcgataaagccgtgatcggtgacatgaaacccgtacacggaggtgtaaaaatcaaccatctttttcatatcgaagacatgaaaaccagagtggccgatggaaatagggggtgttttcataatgacgtcccaaattgaagccgtgataatgggtcaacgatattgattgccgctaccaagtgcaaatggcgattttgcgagctttacggagtgcggtgggtcgaggaatacggtcgcccgatgcgtgctgcactatttacattcttgatgaacgttacaaatcgctcggacaatttctaccggaacgctttaaggatagctggaccgagtgtggtcggcgtgaggttgtgcagtctgtagccgaacgcagcccgtcacacagaaaagccgccctcaagcattacggctgcaaatgttactcgtgtggttttgcgccagccagttcacacctcatcgatattcaccaccttgacccgattgcagaaggtgaaagggagacaaaatttgaagacctgatccctctttgcccgacgtgccacaggcaagctcattcgcaacgcccgcctatgcagattgaggatttaaaggcttgggctagtgaaaataagccttagaaacaagctcccgtatgcgtcgtgttggttctgccagccctcaggtgatgtggggtcatacaagcaaccccctagttttgcattaatcgcatggtcgggtcccttttggcagcccctgaattctgaaattttgggcaaattattgggaaatacgtgacgggcccacgtcatcggtatgggacggtgtaggtcagtatcccgcgcatacgatactacgcacaatccatcgcggatcaaaaatcacgcacagccctgaggctcggctgcccgtttcgttggctggatggtggatcgggcggcaaggctcgatggggtggctgtttagattgggctttgggctgggtttgtcgcaaagactccacatcccaaacaattcctaccagacttatccgatgagaaactggttacgtgggcgtcactccggaattcaggagtgctaaaattcaggaaaagttaatgagaatggcgaagttcggcatcggccaaatcgtccagcatcggaaacatccgttttgcggcggcattttcgatgttgatcccatattcaacaattca

SEQ ID NO: 316 - DNA, 10839 bp, Artificial Sequence
  Synthetic Oligonucleotide
  misc_feature (1)..(7126): n is a, c, g, or t
nnnnnnnnnnnnnnnnnnnnnnnnnnnnnnnnnnnnnnnnnnnnnnnnnnnnnnnnnnnnnnnnnnnnnnnnnnnnnnnnnnnnnnnnnnnnnnnnnnnnnnnnnnnnnnnnnnnnnnnnnnnnnnnnnnnnnnnnnnnnnnnnnnnnnnnnnnnnnnnnnnnnnnnnnnnnnnnnnnnnnnnnnnnnnnnnnnnnnnnnnnnnnnnnnnnnnnnnnnnnnnnnnnnnnnnnnnnnnnnnnnnnnnnnnnnnnnnnnnnnnnnnnnnnnnnnnnnnnnnnnnnnnnnnnnnnnnnnnnnnnnnnnnnnnnnnnnnnnnnnnnnnnnnnnnnnnnnnnnnnnnnnnnnnnnnnnnnnnnnnnnnnnnnnnnnnnnnnnnnnnnnnnnnnnnnnnnnnnnnnnnnnnnnnnnnnnnnnnnnnnnnnnnnnnnnnnnnnnnnnnnnnnnnnnnnnnnnnnnnnnnnnnnnnnnnnnnnnnnnnnnnnnnnnnnnnnnnnnnnnnnnnnnnnnnnnnnnnnnnnnnnnnnnnnnnnnnnnnnnnnnnnnnnnnnnnnnnnnnnnnnnnnnnnnnnnnnnnnnnnnnnnnnnnnnnnnnnnnnnnnnnnnnnnnnnnnnnnnnnnnnnnnnnnnnnnnnnnnnnnnnnnnnnnnnnnnnnnnnnnnnnnnnnnnnnnnnnnnnnnnnnnnnnnnnnnnnnnnnnnnnnnnnnnnnnnnnnnnnnnnnnnnnnnnnnnnnnnnnnnnnnnnnnnnnnnnnnnnnnnnnnnnnnnnnnnnnnnnnnnnnnnnnnnnnnnnnnnnnnnnnnnnnnnnnnnnnnnnnnnnnnnnnnnnnnnnnnnnnnnnnnnnnnnnnnnnnnnnnnnnnnnnnnnnnnnnnnnnnnnnnnnnnnnnnnnnnnnnnnnnnnnnnnnnnnnnnnnnnnnnnnnnnnnnnnnnnnnnnnnnnnnnnnnnnnnnnnnnnnnnnnnnnnnnnnnnnnnnnnnnnnnnnnnnnnnnnnnnnnnnnnnnnnnnnnnnnnnnnnnnnnnnnnnnnnnnnnnnnnnnnnnnnnnnnnnnnnnnnnnnnnnnnnnnnnnnnnnnnnnnnnnnnnnnnnnnnnnnnnnnnnnnnnnnnnnnnnnnnnnnnnnnnnnnnnnnnnnnnnnnnnnnnnnnnnnnnnnnnnnnnnnnnnnnnnnnnnnnnnnnnnnnnnnnnnnnnnnnnnnnnnnnnnnnnnnnnnnnnnnnnnnnnnnnnnnnnnnnnnnnnnnnnnnnnnnnnnnnnnnnnnnnnnnnnnnnnnnnnnnnnnnnnnnnnnnnnnnnnnnnnnnnnnnnnnnnnnnnnnnnnnnnnnnnnnnnnnnnnnnnnnnnnnnnnnnnnnnnnnnnnnnnnnnnnnnnnnnnnnnnnnnnnnnnnnnnnnnnnnnnnnnnnnnnnnnnnnnnnnnnnnnnnnnnnnnnnnnnnnnnnnnnnnnnnnnnnnnnnnnnnnnnnnnnnnnnnnnnnnnnnnnnnnnnnnnnnnnnnnnnnnnnnnnnnnnnnnnnnnnnnnnnnnnnnnnnnnnnnnnnnnnnnnnnnnnnnnnnnnnnnnnnnnnnnnnnnnnnnnnnnnnnnnnnnnnnnnnnnnnnnnnnnnnnnnnnnnnnnnnnnnnnnnnnnnnnnnnnnnnnnnnnnnnnnnnnnnnnnnnnnnnnnnnnnnnnnnnnnnnnnnnnnnnnnnnnnnnnnnnnnnnnnnnnnnnnnnnnnnnnnnnnnnnnnnnnnnnnnnnnnnnnnnnnnnnnnnnnnnnnnnnnnnnnnnnnnnnnnnnnnnnnnnnnnnnnnnnnnnnnnnnnnnnnnnnnnnnnnnnnnnnnnnnnnnnnnnnnnnnnnnnnnnnnnnnnnnnnnnnnnnnnnnnnnnnnnnnnnnnnnnnnnnnnnnnnnnnnnnnnnnnnnnnnnnnnnnnnnnnnnnnnnnnnnnnnnnnnnnnnnnnnnnnnnnnnnnnnnnnnnnnnnnnnnnnnnnnnnnnnnnnnnnnnnnnnnnnnnnnnnnnnnnnnnnnnnnnnnnnnnnnnnnnnnnnnnnnnnnnnnnnnnnnnnnnnnnnnnnnnnnnnnnnnnnnnnnnnnnnnnnnnnnnnnnnnnnnnnnnnnnnnnnnnnnnnnnnnnnnnnnnnnnnnnnnnnnnnnnnnnnnnnnnnnnnnnnnnnnnnnnnnnnnnnnnnnnnnnnnnnnnnnnnnnnnnnnnnnnnnnnnnnnnnnnnnnnnnnnnnnnnnnnnnnnnnnnnnnnnnnnnnnnnnnnnnnnnnnnnnnnnnnnnnnnnnnnnnnnnnnnnnnnnnnnnnnnnnnnnnnnnnnnnnnnnnnnnnnnnnnnnnnnnnnnnnnnnnnnnnnnnnnnnnnnnnnnnnnnnnnnnnnnnnnnnnnnnnnnnnnnnnnnnnnnnnnnnnnnnnnnnnnnnnnnnnnnnnnnnnnnnnnnnnnnnnnnnnnnnnnnnnnnnnnnnnnnnnnnnnnnnnnnnnnnnnnnnnnnnnnnnnnnnnnnnnnnnnnnnnnnnnnnnnnnnnnnnnnnnnnnnnnnnnnnnnnnnnnnnnnnnnnnnnnnnnnnnnnnnnnnnnnnnnnnnnnnnnnnnnnnnnnnnnnnnnnnnnnnnnnnnnnnnnnnnnnnnnnnnnnnnnnnnnnnnnnnnnnnnnnnnnnnnnnnnnnnnnnnnnnnnnnnnnnnnnnnnnnnnnnnnnnnnnnnnnnnnnnnnnnnnnnnnnnnnnnnnnnnnnnnnnnnnnnnnnnnnnnnnnnnnnnnnnnnnnnnnnnnnnnnnnnnnnnnnnnnnnnnnnnnnnnnnnnnnnnnnnnnnnnnnnnnnnnnnnnnnnnnnnnnnnnnnnnnnnnnnnnnnnnnnnnnnnnnnnnnnnnnnnnnnnnnnnnnnnnnnnnnnnnnnnnnnnnnnnnnnnnnnnnnnnnnnnnnnnnnnnnnnnnnnnnnnnnnnnnnnnnnnnnnnnnnnnnnnnnnnnnnnnnnnnnnnnnnnnnnnnnnnnnnnnnnnnnnnnnnnnnnnnnnnnnnnnnnnnnnnnnnnnnnnnnnnnnnnnnnnnnnnnnnnnnnnnnnnnnnnnnnnnnnnnnnnnnnnnnnnnnnnnnnnnnnnnnnnnnnnnnnnnnnnnnnnnnnnnnnnnnnnnnnnnnnnnnnnnnnnnnnnnnnnnnnnnnnnnnnnnnnnnnnnnnnnnnnnnnnnnnnnnnnnnnnnnnnnnnnnnnnnnnnnnnnnnnnnnnnnnnnnnnnnnnnnnnnnnnnnnnnnnnnnnnnnnnnnnnnnnnnnnnnnnnnnnnnnnnnnnnnnnnnnnnnnnnnnnnnnnnnnnnnnnnnnnnnnnnnnnnnnnnnnnnnnnnnnnnnnnnnnnnnnnnnnnnnnnnnnnnnnnnnnnnnnnnnnnnnnnnnnnnnnnnnnnnnnnnnnnnnnnnnnnnnnnnnnnnnnnnnnnnnnnnnnnnnnnnnnnnnnnnnnnnnnnnnnnnnnnnnnnnnnnnnnnnnnnnnnnnnnnnnnnnnnnnnnnnnnnnnnnnnnnnnnnnnnnnnnnnnnnnnnnnnnnnnnnnnnnnnnnnnnnnnnnnnnnnnnnnnnnnnnnnnnnnnnnnnnnnnnnnnnnnnnnnnnnnnnnnnnnnnnnnnnnnnnnnnnnnnnnnnnnnnnnnnnnnnnnnnnnnnnnnnnnnnnnnnnnnnnnnnnnnnnnnnnnnnnnnnnnnnnnnnnnnnnnnnnnnnnnnnnnnnnnnnnnnnnnnnnnnnnnnnnnnnnnnnnnnnnnnnnnnnnnnnnnnnnnnnnnnnnnnnnnnnnnnnnnnnnnnnnnnnnnnnnnnnnnnnnnnnnnnnnnnnnnnnnnnnnnnnnnnnnnnnnnnnnnnnnnnnnnnnnnnnnnnnnnnnnnnnnnnnnnnnnnnnnnnnnnnnnnnnnnnnnnnnnnnnnnnnnnnnnnnnnnnnnnnnnnnnnnnnnnnnnnnnnnnnnnnnnnnnnnnnnnnnnnnnnnnnnnnnnnnnnnnnnnnnnnnnnnnnnnnnnnnnnnnnnnnnnnnnnnnnnnnnnnnnnnnnnnnnnnnnnnnnnnnnnnnnnnnnnnnnnnnnnnnnnnnnnnnnnnnnnnnnnnnnnnnnnnnnnnnnnnnnnnnnnnnnnnnnnnnnnnnnnnnnnnnnnnnnnnnnnnnnnnnnnnnnnnnnnnnnnnnnnnnnnnnnnnnnnnnnnnnnnnnnnnnnnnnnnnnnnnnnnnnnnnnnnnnnnnnnnnnnnnnnnnnnnnnnnnnnnnnnnnnnnnnnnnnnnnnnnnnnnnnnnnnnnnnnnnnnnnnnnnnnnnnnnnnnnnnnnnnnnnnnnnnnnnnnnnnnnnnnnnnnnnnnnnnnnnnnnnnnnnnnnnnnnnnnnnnnnnnnnnnnnnnnnnnnnnnnnnnnnnnnnnnnnnnnnnnnnnnnnnnnnnnnnnnnnnnnnnnnnnnnnnnnnnnnnnnnnnnnnnnnnnnnnnnnnnnnnnnnnnnnnnnnnnnnnnnnnnnnnnnnnnnnnnnnnnnnnnnnnnnnnnnnnnnnnnnnnnnnnnnnnnnnnnnnnnnnnnnnnnnnnnnnnnnnnnnnnnnnnnnnnnnnnnnnnnnnnnnnnnnnnnnnnnnnnnnnnnnnnnnnnnnnnnnnnnnnnnnnnnnnnnnnnnnnnnnnnnnnnnnnnnnnnnnnnnnnnnnnnnnnnnnnnnnnnnnnnnnnnnnnnnnnnnnnnnnnnnnnnnnnnnnnnnnnnnnnnnnnnnnnnnnnnnnnnnnnnnnnnnnnnnnnnnnnnnnnnnnnnnnnnnnnnnnnnnnnnnnnnnnnnnnnnnnnnnnnnnnnnnnnnnnnnnnnnnnnnnnnnnnnnnnnnnnnnnnnnnnnnnnnnnnnnnnnnnnnnnnnnnnnnnnnnnnnnnnnnnnnnnnnnnnnnnnnnnnnnnnnnnnnnnnnnnnnnnnnnnnnnnnnnnnnnnnnnnnnnnnnnnnnnnnnnnnnnnnnnnnnnnnnnnnnnnnnnnnnnnnnnnnnnnnnnnnnnnnnnnnnnnnnnnnnnnnnnnnnnnnnnnnnnnnnnnnnnnnnnnnnnnnnnnnnnnnnnnnnnnnnnnnnnnnnnnnnnnnnnnnnnnnnnnnnnnnnnnnnnnnnnnnnnnnnnnnnnnnnnnnnnnnnnnnnnnnnnnnnnnnnnnnnnnnnnnnnnnnnnnnnnnnnnnnnnnnnnnnnnnnnnnnnnnnnnnnnnnnnnnnnnnnnnnnnnnnnnnnnnnnnnnnnnnnnnnnnnnnnnnnnnnnnnnnnnnnnnnnnnnnnnnnnnnnnnnnnnnnnnnnnnnnnnnnnnnnnnnnnnnnnnnnnnnnnnnnnnnnnnnnnnnnnnnnnnnnnnnnnnnnnnnnnnnnnnnnnnnnnnnnnnnnnnnnnnnnnnnnnnnnnnnnnnnnnnnnnnnnnnnnnnnnnnnnnnnnnnnnnnnnnnnnnnnnnnnnnnnnnnnnnnnnnnnnnnnnnnnnnnnnnnnnnnnnnnnnnnnnnnnnnnnnnnnnnnnnnnnnnnnnnnnnnnnnnnnnnnnnnnnnnnnnnnnnnnnnnnnnnnnnnnnnnnnnnnnnnnnnnnnnnnnnnnnnnnnnnnnnnnnnnnnnnnnnnnnnnnnnnnnnnnnnnnnnnnnnnnnnnnnnnnnnnnnnnnnnnnnnnnnnnnnnnnnnnnnnnnnnnnnnnnnnnnnnnnnnnnnnnnnnnnnnnnnnnnnnnnnnnnnnnnnnnnnnnnnnnnnnnnnnnnnnnnnnnnnnnnnnnnnnnnnnnnnnnnnnnnnnnnnnnnnnnnnnnnnnnnnnnnnnnnnnnnnnnnnnnnnnnnnnnnnnnnnnnnnnnnnnnnnnnnnnnnnnnnnnnnnnnnnnnnnnnnnnnnnnnnnnnnnnnnnnnnnnnnnnnnnnnnnnnnnnnnnnnnnnnnnnnnnnnnnnnnnnnnnnnnnnnnnnnnnnnnnnnnnnnnnnnnnnnnnnnnnnnnnnnnnnnnnnnnnnnnnnnnnnnnnnnnnnnnnnnnnnnnnnnnnnnnnnnnnnnnnnnnnnnnnnnnnnnnnnnnnnnnnnnnnnnnnnnnnnnnnnnnnnnnnnnnnnnnnnnnnnnnnnnnnnnnnnnnnnnnnnnnnnnnnnnnnnnnnnnnnnnnnnnnnnnnnnnnnnnnnnnnnnnnnnnnnnnnnnnnnnnnnnnnnnnnnnnnnnnnnnnnnnnnnnnnnnnnnnnnnnnnnnnnnnnnnnnnnnnnnnnnnnnnnnnnnnnnnnnnnnnnnnnnnnnnnnnnnnnnnnnnnnnnnnnnnnnnnnnnnnnnnnnnnnnnnnnnnnnnnnnnnnnnnnnnnnnnnnnnnnnnnnnnnnnnnnnnnnnnnnnnnnnnnnnnnnnnnnnnnnnnnnnnnnnnnnnnnnnnnnnnnnnnnnnnnnnnnnnnnnnnnnnnnnnnnnnnnnnnnnnnnnnnnnnnnnnnnnnnnnnnnnnnnnnnnnnnnnnnnnnnnnnnnnnnnnnnnnnnnnnnnnnnnnnnnnnnnnnnnnnnnnnnnnnnnnnnnnnnnnnnnnnnnnnnnnnnnnnnnnnnnnnnnnnnnnnnnnnnnnnnnnnnnnnnnnnnnnnnnnnnnnnnnnnnnnnnnnnnnnnnnnnnnnnnnnnnnnnnnnnnnnnnnnnnnnnnnnnnnnnnnnnnnnnnnnnnnnnnnnnnnnnnnnnnnnnnnnnnnnnnnnnnnnnnnnnnnnnnnnnnnnnnnnnnnnnnnnnnnnnnnnnnnnnnnnnnnnnnnnnnnnnnnnnnnnnnnnnnnnnnnnnnnnnnnnnnnnnnnnnnnnnnnnnnnnnnnnnnnnnnnnnnnnnnnnnnnnnnnnnnnnnnnnnnnnnnnnnnnnnnnnnnnnnnnnnnnnnnnnnnnnnnnnnnnnnnnnnnnnnnnnnnnnnnnnnnnnnnnnnnnnnnnnnnnnnnnnnnnnnnnnnnnnnnnnnnnnnnnnnnnnnnnnnnnnnnnnnnnnnnnnnnnnnnnnnnnnnnnnnnnnnnnnnnnnnnnnnnnnnnnnnnnnnnnnnnnnnnnnnnnnnnnnnnnnnnnnnnnnnnnnnnnnnnnnnnnnnnnnnnnnnnnnnnnnnnnnnnnnnnnnnnnnnnnnnnnnnnnnnnnnnnnnnnnnnnnnnnnnnnnnnnnnnnnnnnnnnnnnnnnngtcaagcaggcaagccgcacagcggcggctcgcaaatatgcgccgtccaggcgaattcccccggccacaccacccgaggacaagtgcagtagatttccttttagtccgacagactcctagaagccacccgtgaatccctctccttcatcgcctcactgcgtcccaatcacagcattgatcccgacctgattctgaaaaataaacacggcaagttacaccacaagttcgacacctcgctgaccaacgtaatgaacagttacacactactcaccgcgccgacggtgacctggtatgcagaaggcaatgccgagctcatttcatgcctgctatcgcccgtgcaatttattggcaagcggcgtgcctctggtttttggttgcgtctcgcattggcaagttgaagccgatgaactggatggtatcgaaggaatgttcggtgaagcgctgcgtccggtgccgattgacttgttcgagggcgacacttcccacccgattgttgatgccgcctggcagcctgcctactggaatcccaatcatcggacggcctgctatgcgccagtttaaggacgtgcaatgctgagttttttcaatgaaaattttggccgtcatctgctgttgcgcaccgatatcagcttgaaattgagcagcggccgcaacgcagcatcagcaccggagacattatcggtttcgagttgcgcgcctgtgtcagcaaaaaactcaaaggccgtcacatctactttcgcacctcggattggcaacgtcggcatagctggatggaacgaaagagggaggcgcatggatttacgcttatcaccgtacattgcagcgcctcgatgcaaaccgtgcagactggcgagagacaatttacggttgatcagacggtctacaccggggttctcaaagtaacggacactgaacgttttaacgcagccctcgccaatggcatcggcattaagacccgtgctttcggctttggcatgttggttatttaacagaaggaatcagtatgaaatctatcatcattaacgccacacttaccaccatcggctccttgtctatcgccttgtctatcgccttgccggtctctgaaggtcagcagggcaacaattcccatcgtcacgcgcggcattgatgtagcgggcaacaagcaacaaaccggctacctgccagccagcacgctacgcggatttttacgcgcgccatcgtggtcgaacaaatgacgcaagccgcccccgcagggcatcactacaccctgcaaaaagcctacgccgacttgattggacaggatgccacctccgaatccagtgacgatattgatctgctcaagttgcgtcaaacccgtgaggacaacgcagtactcgatttatttggctcaggtctaggcattaaatcgcgcctgctggtgtcgcatttcttaccgacacataacgtattaccggaagtcttcaccggcgtgcgcaaggatttggacgataccgacggcgtgctggagctgatttctgaagcggatcgcgcgcgttatccggggcgttccgacgcgaacagcaaacgcgcggccgctgtaacggtggtaaaaggactggaggcaaagttgcgcaaagccaaaaaggccggtgagtcactggtcgaattggaactcgcgcggcaagcggcacaggatattgtcgaacgctacgaatccgacatgggcgagatgaccaatttttcacgcacgctgaccaactattttgccctcccggcaggcatcaaactcaaaggccgattagtgattgagaaagcgcgtgagcgtgatctggccatgatcgaactcgcgctgaatagactttcacagcgtccgattcttggcgcgcaaagcgcgcgcggctgcggggaaattgccggcgtattggatgtattagtggatggcctgcttgccaaaaaaatcaccatctgcgcatggcaagcagcgattattagcaatttttctgctgtcgaatcttgaaaataggtttaataatcaatgcataacaacagattggatcaagccaccccttgtttgggtgcttactataaataaaaatctggcattgtttcacgtgaaacaatcggtttggtcgtttacgaaaaagggaagttgaatgttccgttctgccgagcaaggtaattttgccgctatcgtcgcccggcacatcgcctcggctgacgcaccgttattgctggaaggcggcacggggatcggtaaaactcgtgcctatctttccgcgctgattcaatccggtttgcgcgtcactatcgtgctgcctacccatcagttgattgaccagatgttggcctcaaacgacttggcggcgacgcgaagcgcggccagtattgccgcctttcgtccagcgcgactatttgaaaattggtcggactatgaagctaataagcgcgccgcaatggccgcaaccgtgatgttttgcacagcggccagcgtcatcattgatcagcgtctgggcggcgaatataacggcgcaacaaaccgcgactatttgttgtttgatgaagccgatcaactaccggacatggccgcattgcaaagcgacttcaccattacacaggcggaactgacagcgttgggcataacactcagctgcgtgactgaagccttgcaagccattttggtcaaagcgccaaacgtggttgagccggaaaccagagccgccgcacgcatcattctcgatgccatcgagcaaccagcgtggtatcagtccgctggtgtaagcgatgaaggcgacattatgctgacgcacagcttgcccggtcgtttactgaaataaatcagcaattcagcccatttcgcctttgtctctgccacgctaaccgtcgccagacagctcaaggattttcaaaattcgatgggcattgcgacggtaagtaacttgtcgggcgtgatagaaccggagcgtcacggtacgcttgatttccactttatgccggtggtggttgataccgaggaatggcgcagtgccgtcatccgaatggcgaacgaagcgcctaaaccggtgctgatcgcgaccacatcacaccgtttttccagcctgctcggcgaacaattatcaggtgcaacggtaaggtcggacagcgaatccaccgctcacgccgccgtgcgcgtttcagccaatgggttttttattgcagccggtgcctgggcagggctggatacgccgttgcgctggcgttcgatcatcgtgccgcgcgtgccatacggacaaccagtggtgatagacggcgaaaccaccacccgttatttcgatgcgcacaacacggcgattcgccgtttgcgccaggtgataggccgtggtttacgttcggcggatgcaatctgtagcgtttacatcctcgatggcagggctgaaaaattaacgggctttgtaccggagcgtttttccgccgcatgggcatcacgcaaaacgtatttggagggggcgaggcaagcgctgattttgagcaggaacgaacgctatcccgccgtccgtcgtgccgcactcaattactatggtcgaaaatgtatggcgtgtagctttgtgccgcgcgtggatgcacaactggacgtgcatcatctcgacccgattgccgaaggtgttcgctgcatcaggattgaggatgtggtcgttttgtgtgcaaactgtcaccgtctggttcacgctacccatccccctttagcactcaccgatctaattgcgctactcaacgcg

SEQ ID NO: 317 - DNA, 10598 bp, Artificial Sequence
  Synthetic Oligonucleotide
  misc_feature (1)..(5058): n is a, c, g, or t
nnnnnnnnnnnnnnnnnnnnnnnnnnnnnnnnnnnnnnnnnnnnnnnnnnnnnnnnnnnnnnnnnnnnnnnnnnnnnnnnnnnnnnnnnnnnnnnnnnnnnnnnnnnnnnnnnnnnnnnnnnnnnnnnnnnnnnnnnnnnnnnnnnnnnnnnnnnnnnnnnnnnnnnnnnnnnnnnnnnnnnnnnnnnnnnnnnnnnnnnnnnnnnnnnnnnnnnnnnnnnnnnnnnnnnnnnnnnnnnnnnnnnnnnnnnnnnnnnnnnnnnnnnnnnnnnnnnnnnnnnnnnnnnnnnnnnnnnnnnnnnnnnnnnnnnnnnnnnnnnnnnnnnnnnnnnnnnnnnnnnnnnnnnnnnnnnnnnnnnnnnnnnnnnnnnnnnnnnnnnnnnnnnnnnnnnnnnnnnnnnnnnnnnnnnnnnnnnnnnnnnnnnnnnnnnnnnnnnnnnnnnnnnnnnnnnnnnnnnnnnnnnnnnnnnnnnnnnnnnnnnnnnnnnnnnnnnnnnnnnnnnnnnnnnnnnnnnnnnnnnnnnnnnnnnnnnnnnnnnnnnnnnnnnnnnnnnnnnnnnnnnnnnnnnnnnnnnnnnnnnnnnnnnnnnnnnnnnnnnnnnnnnnnnnnnnnnnnnnnnnnnnnnnnnnnnnnnnnnnnnnnnnnnnnnnnnnnnnnnnnnnnnnnnnnnnnnnnnnnnnnnnnnnnnnnnnnnnnnnnnnnnnnnnnnnnnnnnnnnnnnnnnnnnnnnnnnnnnnnnnnnnnnnnnnnnnnnnnnnnnnnnnnnnnnnnnnnnnnnnnnnnnnnnnnnnnnnnnnnnnnnnnnnnnnnnnnnnnnnnnnnnnnnnnnnnnnnnnnnnnnnnnnnnnnnnnnnnnnnnnnnnnnnnnnnnnnnnnnnnnnnnnnnnnnnnnnnnnnnnnnnnnnnnnnnnnnnnnnnnnnnnnnnnnnnnnnnnnnnnnnnnnnnnnnnnnnnnnnnnnnnnnnnnnnnnnnnnnnnnnnnnnnnnnnnnnnnnnnnnnnnnnnnnnnnnnnnnnnnnnnnnnnnnnnnnnnnnnnnnnnnnnnnnnnnnnnnnnnnnnnnnnnnnnnnnnnnnnnnnnnnnnnnnnnnnnnnnnnnnnnnnnnnnnnnnnnnnnnnnnnnnnnnnnnnnnnnnnnnnnnnnnnnnnnnnnnnnnnnnnnnnnnnnnnnnnnnnnnnnnnnnnnnnnnnnnnnnnnnnnnnnnnnnnnnnnnnnnnnnnnnnnnnnnnnnnnnnnnnnnnnnnnnnnnnnnnnnnnnnnnnnnnnnnnnnnnnnnnnnnnnnnnnnnnnnnnnnnnnnnnnnnnnnnnnnnnnnnnnnnnnnnnnnnnnnnnnnnnnnnnnnnnnnnnnnnnnnnnnnnnnnnnnnnnnnnnnnnnnnnnnnnnnnnnnnnnnnnnnnnnnnnnnnnnnnnnnnnnnnnnnnnnnnnnnnnnnnnnnnnnnnnnnnnnnnnnnnnnnnnnnnnnnnnnnnnnnnnnnnnnnnnnnnnnnnnnnnnnnnnnnnnnnnnnnnnnnnnnnnnnnnnnnnnnnnnnnnnnnnnnnnnnnnnnnnnnnnnnnnnnnnnnnnnnnnnnnnnnnnnnnnnnnnnnnnnnnnnnnnnnnnnnnnnnnnnnnnnnnnnnnnnnnnnnnnnnnnnnnnnnnnnnnnnnnnnnnnnnnnnnnnnnnnnnnnnnnnnnnnnnnnnnnnnnnnnnnnnnnnnnnnnnnnnnnnnnnnnnnnnnnnnnnnnnnnnnnnnnnnnnnnnnnnnnnnnnnnnnnnnnnnnnnnnnnnnnnnnnnnnnnnnnnnnnnnnnnnnnnnnnnnnnnnnnnnnnnnnnnnnnnnnnnnnnnnnnnnnnnnnnnnnnnnnnnnnnnnnnnnnnnnnnnnnnnnnnnnnnnnnnnnnnnnnnnnnnnnnnnnnnnnnnnnnnnnnnnnnnnnnnnnnnnnnnnnnnnnnnnnnnnnnnnnnnnnnnnnnnnnnnnnnnnnnnnnnnnnnnnnnnnnnnnnnnnnnnnnnnnnnnnnnnnnnnnnnnnnnnnnnnnnnnnnnnnnnnnnnnnnnnnnnnnnnnnnnnnnnnnnnnnnnnnnnnnnnnnnnnnnnnnnnnnnnnnnnnnnnnnnnnnnnnnnnnnnnnnnnnnnnnnnnnnnnnnnnnnnnnnnnnnnnnnnnnnnnnnnnnnnnnnnnnnnnnnnnnnnnnnnnnnnnnnnnnnnnnnnnnnnnnnnnnnnnnnnnnnnnnnnnnnnnnnnnnnnnnnnnnnnnnnnnnnnnnnnnnnnnnnnnnnnnnnnnnnnnnnnnnnnnnnnnnnnnnnnnnnnnnnnnnnnnnnnnnnnnnnnnnnnnnnnnnnnnnnnnnnnnnnnnnnnnnnnnnnnnnnnnnnnnnnnnnnnnnnnnnnnnnnnnnnnnnnnnnnnnnnnnnnnnnnnnnnnnnnnnnnnnnnnnnnnnnnnnnnnnnnnnnnnnnnnnnnnnnnnnnnnnnnnnnnnnnnnnnnnnnnnnnnnnnnnnnnnnnnnnnnnnnnnnnnnnnnnnnnnnnnnnnnnnnnnnnnnnnnnnnnnnnnnnnnnnnnnnnnnnnnnnnnnnnnnnnnnnnnnnnnnnnnnnnnnnnnnnnnnnnnnnnnnnnnnnnnnnnnnnnnnnnnnnnnnnnnnnnnnnnnnnnnnnnnnnnnnnnnnnnnnnnnnnnnnnnnnnnnnnnnnnnnnnnnnnnnnnnnnnnnnnnnnnnnnnnnnnnnnnnnnnnnnnnnnnnnnnnnnnnnnnnnnnnnnnnnnnnnnnnnnnnnnnnnnnnnnnnnnnnnnnnnnnnnnnnnnnnnnnnnnnnnnnnnnnnnnnnnnnnnnnnnnnnnnnnnnnnnnnnnnnnnnnnnnnnnnnnnnnnnnnnnnnnnnnnnnnnnnnnnnnnnnnnnnnnnnnnnnnnnnnnnnnnnnnnnnnnnnnnnnnnnnnnnnnnnnnnnnnnnnnnnnnnnnnnnnnnnnnnnnnnnnnnnnnnnnnnnnnnnnnnnnnnnnnnnnnnnnnnnnnnnnnnnnnnnnnnnnnnnnnnnnnnnnnnnnnnnnnnnnnnnnnnnnnnnnnnnnnnnnnnnnnnnnnnnnnnnnnnnnnnnnnnnnnnnnnnnnnnnnnnnnnnnnnnnnnnnnnnnnnnnnnnnnnnnnnnnnnnnnnnnnnnnnnnnnnnnnnnnnnnnnnnnnnnnnnnnnnnnnnnnnnnnnnnnnnnnnnnnnnnnnnnnnnnnnnnnnnnnnnnnnnnnnnnnnnnnnnnnnnnnnnnnnnnnnnnnnnnnnnnnnnnnnnnnnnnnnnnnnnnnnnnnnnnnnnnnnnnnnnnnnnnnnnnnnnnnnnnnnnnnnnnnnnnnnnnnnnnnnnnnnnnnnnnnnnnnnnnnnnnnnnnnnnnnnnnnnnnnnnnnnnnnnnnnnnnnnnnnnnnnnnnnnnnnnnnnnnnnnnnnnnnnnnnnnnnnnnnnnnnnnnnnnnnnnnnnnnnnnnnnnnnnnnnnnnnnnnnnnnnnnnnnnnnnnnnnnnnnnnnnnnnnnnnnnnnnnnnnnnnnnnnnnnnnnnnnnnnnnnnnnnnnnnnnnnnnnnnnnnnnnnnnnnnnnnnnnnnnnnnnnnnnnnnnnnnnnnnnnnnnnnnnnnnnnnnnnnnnnnnnnnnnnnnnnnnnnnnnnnnnnnnnnnnnnnnnnnnnnnnnnnnnnnnnnnnnnnnnnnnnnnnnnnnnnnnnnnnnnnnnnnnnnnnnnnnnnnnnnnnnnnnnnnnnnnnnnnnnnnnnnnnnnnnnnnnnnnnnnnnnnnnnnnnnnnnnnnnnnnnnnnnnnnnnnnnnnnnnnnnnnnnnnnnnnnnnnnnnnnnnnnnnnnnnnnnnnnnnnnnnnnnnnnnnnnnnnnnnnnnnnnnnnnnnnnnnnnnnnnnnnnnnnnnnnnnnnnnnnnnnnnnnnnnnnnnnnnnnnnnnnnnnnnnnnnnnnnnnnnnnnnnnnnnnnnnnnnnnnnnnnnnnnnnnnnnnnnnnnnnnnnnnnnnnnnnnnnnnnnnnnnnnnnnnnnnnnnnnnnnnnnnnnnnnnnnnnnnnnnnnnnnnnnnnnnnnnnnnnnnnnnnnnnnnnnnnnnnnnnnnnnnnnnnnnnnnnnnnnnnnnnnnnnnnnnnnnnnnnnnnnnnnnnnnnnnnnnnnnnnnnnnnnnnnnnnnnnnnnnnnnnnnnnnnnnnnnnnnnnnnnnnnnnnnnnnnnnnnnnnnnnnnnnnnnnnnnnnnnnnnnnnnnnnnnnnnnnnnnnnnnnnnnnnnnnnnnnnnnnnnnnnnnnnnnnnnnnnnnnnnnnnnnnnnnnnnnnnnnnnnnnnnnnnnnnnnnnnnnnnnnnnnnnnnnnnnnnnnnnnnnnnnnnnnnnnnnnnnnnnnnnnnnnnnnnnnnnnnnnnnnnnnnnnnnnnnnnnnnnnnnnnnnnnnnnnnnnnnnnnnnnnnnnnnnnnnnnnnnnnnnnnnnnnnnnnnnnnnnnnnnnnnnnnnnnnnnnnnnnnnnnnnnnnnnnnnnnnnnnnnnnnnnnnnnnnnnnnnnnnnnnnnnnnnnnnnnnnnnnnnnnnnnnnnnnnnnnnnnnnnnnnnnnnnnnnnnnnnnnnnnnnnnnnnnnnnnnnnnnnnnnnnnnnnnnnnnnnnnnnnnnnnnnnnnnnnnnnnnnnnnnnnnnnnnnnnnnnnnnnnnnnnnnnnnnnnnnnnnnnnnnnnnnnnnnnnnnnnnnnnnnnnnnnnnnnnnnnnnnnnnnnnnnnnnnnnnnnnnnnnnnnnnnnnnnnnnnnnnnnnnnnnnnnnnnnnnnnnnnnnnnnnnnnnnnnnnnnnnnnnnnnnnnnnnnnnnnnnnnnnnnnnnnnnnnnnnnnnnnnnnnnnnnnnnnnnnnnnnnnnnnnnnnnnnnnnnnnnnnnnnnnnnnnnnnnnnnnnnnnnnnnnnnnnnnnnnnnnnnnnnnnnnnnnnnnnnnnnnnnnnnnnnnnnnnnnnnnnnnnnnnnnnnnnnnnnnnnnnnnnnnnnnnnnnnnnnnnnnnnnnnnnnnnnnnnnnnnnnnnnnnnnnnnnnnnnnnnnnnnnnnnnnnnnnnnnnnnnnnncccgccggtcccggtagctcgggagctgaatctgaggaaagtactaacttcgagtatggtgtacgctacacttctaacgtattgaggggcgaattaatcgcttttcgcagcaactacgataacctactcggccggtgccgcgcttctgatgcggattgcaatatcggacaagaatttagtggaggaaaagtcgaggtgagtgggattgagctcgtagggcagggcgaggtatggctgaatagcaagtggttgttgacttcaaatttaaactacacgttttcaaaatctaagttcaagagtacattcttttctcagttctctcagtggggcttggttcgtaggggcgacgaattgccttatatccctgagcatgttggtcgttttcaggtatctttggagagtgatgaatgggcacttgatttagcgttaaaatatcagcatgagatgagagaagagccgggttccggccctattaccgaaggcctcaagaccgacagtttaacgactattgacttagctatcacgcgctttttgactgacgatcttgatttgaaaatgatgataagaaatgcggtagataattccgctatagtgtcgcacaggccctatggtgcgcggcctaatttgccgagaacactgctggctcagataaagtatcgtttttaagctaactcatcgataggagcgtattttgctagagtttgtgatggcgccagctgaattctttctcaatccgtcaaagcgtatttactggatctacctggccagcgcgctatgtattgcatcctttgttgtagctcgacaggagggccgatttaagccattcgagcagttgcaacgcttggttaatccgcgctattggctatcgctgtcgagtgtatacgatgtttttttaatggtgtttaacagcgtggtacgcctaggattactagttccgctgttcggtagccatttggccattacagtcctggtcggaggcagtttacaagagtatgtcggcgacgctccgcgcctcgatctcggctggttttggatagcctgcctgtttagcctgacatttttactggtcgaggacgctagcagatttggcctgcacttctgcatgcatcgctttgactttctttggctgtttcataagacacatcacagcgccacggtattgacgccgctaacaattttccgtgttcacccagttgagcatattttatatttttctcgcagtttggtggttttcggctcggttactggagtctttgtttggctgttctcacagcgcctcacgggtttacagatcctcggtgtcgatgcctttggcttcttgttcaattttgctgcggctaatctcagacattcgcatatatggatttcttttgggcgttttgaaagagtctttattagtcctgcgcaacatcaaatgcatcacagtatagatcatgcgaacgtcaaccttggcagtgttctatccatttgggatggcctgcttggaactcgcgagtacgccaaacaaaaaatccctatgcgctttggtcttcgacagtctcacatggcgagggaggccgttgctagctcacctgcagccagtccccaaacaactttagtgcgcgaagactacccctgcggtgacctagctgagaaaagtggatcacagcgactcgcctagggcctgctagttatcgattgtgaccgcgcttacgatcaagtaactccctgttgcgaccaacacacttctcatcggtgtgcatgccttgcataccttgacaaccctctttaagctccgttaaggatacgataaaaatatttttgataacgattctaaaggcgatctctcaatgacagatactcatgaaaaagactcaccggtcaacgactcgggtgagggcgatcagaaatcgcagacgtttgcttttttagcgatgacttgcctgttttttttctggggcttcatcacggtcttaaacgatattcttataccttttttaaaggagtcgtttgaactcaattacactcaggcgatgctggtgcagttttgtttctttggggcgtatttcgtggtctccccagttgcaggcagactaattgactgggtcggctaccagcagggcatcgtcttggggctactcctgaccgcgtcgggttgtctgttattttacccgtccgccagcttacatcaatacgaattatttctgttcgcgttttttgtattggctagcggtattactattctgcaggtcgctgctaacccctatgtagccgcactcgggtcggaaaagagtgccgctagccggttaaacttagcacaggcggcaaactctctcggcactacagtcggtccgcttgtcggtgccatactcatactcggcgcggtaactgcggatgcgacggcggtacaagttccatatttaattctcgccggcttgttggtcgttgcggcaatagtcttcagaatgatccagttgccgatcctggcagcagtcgaaacacaggaggatttcgatcagggtagtatttggcaacatcgatcattggtgctgggcgcactggcaatcttcctttatgttggtggcgaagtggcgattggtagttttttggttaactattttgcggagccagatattgctggtatgagcgtggttgatgccggcgaaatggttgcttattattggggtgccgccatggtggggcgcctggtaggttcggcactgatgacaaaaatagcggctactaaatatctcgcaagcaacgctttgatggcgattttgatgatcttactcagtattaatagcaccggtgaaaccgctatgtgggcaattctggcggttggtttttttaactcgattatgtttccaaccatctttaccctcgccgtcaaagggctaggatcgcttaccagtaaaggctccggtctagtctgtcagggtattgtcggcggcgcgctcattccggttgtgcagggattagtggcagataggattggcattcaattgagtttctttgtgcccatgctgtgttacatctacattggctggtatgccctgcggggtgtagactccgctttagaatctgttgcccccgaggtttagctagctccccgctgatagcatcggctgctggctgccacctgattggttagttatttggttgttcggtgtttcttttcgggcggcggcgctctttgagccgtgctagctgccactccggcagtttgacgcgagtgtcatactcagcgtctgggtcgtagtcactcatatcctcgctgactgcgcgattgatccgcgttaagagtctggtcaaccagccttcattttgttgcgacatttatctctcctctgtcacgctcgcttgtgtggccgctgcagactcagttatgttacgcagaataagcctgtatcgatggctgggagcttattttagcctcccattgtgtgaatcactgcatgccagatctcccgtaatagcatactggccagcgctatccaactgagcataaaaaggctaaaacgtagccatacagagttcactgtgcactgcaccaaggagtgcgcgagccgcacaaagcagtaactccacgctgtatatagatgtagactatctgtgtgaccctgagcccagataactaacacaattgcgtaaaatagcgtcggttgttcccacaggtgattgtagttatcggcgatccgctccacgtgacttgggaataccccagataccgcagcgggatgcgcaagtccctgcatatcgactccctgctgttctaaaattttcgccgctggaatcctcgtggcgtacatccaaatcatcattacggtactcagtagccccataaagagaataggctgcaggataagattgttcatcgattaattctcgtggctttaagatctgtcaacataacgcagagcgtcgcccacggcaactttgtacgataccgctgagatcaactggtaactgaaatcagttacactgagtatttagcgacgattttgcggcaggtggtggtcgagtctatagggtcgatattgcaagtctattagatttttttactttgcagcgcgaaagacagtcttaaaatatgatgacttagttggttaatattggccgtatcgaggaagtttactatgcttatcaacccacagtaccactgtttggcgttgcgttaatcgttgcggagatcaccattggcaattttgtgctattgcttttcggtatcgcagcgtttgtagtcggcatcgtatttccgctaagtttgccgactacgggaggacttgcctgctatttatttgcggtgccttcagtcgtgttgctgttcggactgcgctcgcgtatgcgcaagattaccgtcggcgatgtcattacaagtagtctcaacgaggatttcgttggccgcagtgcagcagtcaaaagtggctgtgaagaccaaacctccgagcgtgaacgactcacctacggagggatcaattgggatgccactagccgaaaaacttacctacagactcgcgcagtgctttcgataataggatgacagggcagccgcccagagatcggcgtcgcaccacttctggataatgcagccgacagcgattaatctgcattgacccgtattgtgaactcttcgctagcaatacaataacgactttttgcggtgacaaaaatgggttttatactagttttagttggctcactagcggtactggtgattctgatgttactcatgaccgactgttatgtacaccatgttacatgtaacttagcctaagaggttgatttcaataggggtttttcaagttacactttttgatgtttttgggccttttttgatactttttaggtgaatcttatagccctaattaaaagtcatttaccccttaatgcgcacgacattattggagcctggccctctagcatgcagtctcttattctctagaactagggtcgcattcttggatgtcatttcggcaagcatggcaggcaaaaagaacatactctgagggcgctgaacttcaggtaacactttctctaaaagaaagagatgtgtacttaagaaaagcagctctaaaaaagtatggccttgtatgtcacgtctgcgattggaaaccaaaaacatccaatcaaatccagattcatcatctagaccctattgctgagggtgagcggaaaaccattcttgatgacgtgatacctttgtgtggtaattgtcacttactagcgcactctgtgagaccaccgctttcgcttaaacagatgaaggatattctttgattcgctggaatagtgaaagactagccaattaaaagtaaatctgttgaagcatccatatctagcatcaaagctcagcagatttatgtcaacagagattgagacaatctagctatgatgaaccgactagcccaatggagagagagaaatcaagtgggcttgtagaactagaaagttagatggtgcccagacctggaatcgaaccagggacacaaggattgtattcgaaggcagacgtagtaagaaactcaattaataatatattgagagactacgaattaactacc

SEQ ID NO: 318 - DNA, 12516 bp, Artificial Sequence; identical to SEQ ID NO: 183
  Synthetic Oligonucleotide
  misc_feature (1)..(4945): n is a, c, g, or t
  misc_feature (5389)..(5389): n is a, c, g, or t

SEQ ID NO: 319 - DNA, 12901 bp, Artificial Sequence; identical to SEQ ID NO: 170
  Synthetic Oligonucleotide
  misc_feature (1)..(7163): n is a, c, g, or t

SEQ ID NO: 320 - DNA, 13851 bp, Artificial Sequence; identical to SEQ ID NO: 8
  Synthetic Oligonucleotide
  misc_feature (1)..(3521): n is a, c, g, or t

SEQ ID NO: 321 - DNA, 11950 bp, Artificial Sequence; identical to SEQ ID NO: 216
  Synthetic Oligonucleotide
  misc_feature (1)..(3665): n is a, c, g, or t

SEQ ID NO: 322 - DNA, 14036 bp, Artificial Sequence; identical to SEQ ID NO: 122
  Synthetic Oligonucleotide
  misc_feature (1)..(3900): n is a, c, g, or t

SEQ ID NO: 323 - DNA, 14036 bp, Artificial Sequence; identical to SEQ ID NO: 121
  Synthetic Oligonucleotide
  misc_feature (1)..(6075): n is a, c, g, or t

SEQ ID NO: 324 - DNA, 12229 bp, Artificial Sequence; identical to SEQ ID NO: 200
  Synthetic Oligonucleotide
  misc_feature (1)..(4866): n is a, c, g, or t

SEQ ID NO: 325 - DNA, 12400 bp, Artificial Sequence; identical to SEQ ID NO: 188
  Synthetic Oligonucleotide
  misc_feature (1)..(5067): n is a, c, g, or t

SEQ ID NO: 326 - DNA, 11716 bp, Artificial Sequence; identical to SEQ ID NO: 246
  Synthetic Oligonucleotide
  misc_feature (1)..(6321): n is a, c, g, or t

SEQ ID NO: 327 - DNA, 11716 bp, Artificial Sequence; identical to SEQ ID NO: 246
  Synthetic Oligonucleotide
  misc_feature (1)..(6321): n is a, c, g, or t

SEQ ID NO: 328 - DNA, 20235 bp, Artificial Sequence; identical to SEQ ID NO: 36
  Synthetic Oligonucleotide

SEQ ID NO: 329 - DNA, 20235 bp, Artificial Sequence; identical to SEQ ID NO: 36
  Synthetic Oligonucleotide

SEQ ID NO: 330 - DNA, 11716 bp, Artificial Sequence; identical to SEQ ID NO: 243
  Synthetic Oligonucleotide
  misc_feature (1)..(6297): n is a, c, g, or t

SEQ ID NO: 331 - DNA, 11716 bp, Artificial Sequence; identical to SEQ ID NO: 243
  Synthetic Oligonucleotide
  misc_feature (1)..(6297): n is a, c, g, or t

SEQ ID NO: 332 - DNA, 11716 bp, Artificial Sequence; identical to SEQ ID NO: 244
  Synthetic Oligonucleotide
  misc_feature (1)..(6321): n is a, c, g, or t

SEQ ID NO: 333 - DNA, 11716 bp, Artificial Sequence; identical to SEQ ID NO: 244
  Synthetic Oligonucleotide
  misc_feature (1)..(6321): n is a, c, g, or t

SEQ ID NO: 334 - DNA, 13121 bp, Artificial Sequence; identical to SEQ ID NO: 166
  Synthetic Oligonucleotide
  misc_feature (1)..(6470): n is a, c, g, or t

SEQ ID NO: 335 - DNA, 12202 bp, Artificial Sequence; identical to SEQ ID NO: 202
  Synthetic Oligonucleotide
  misc_feature (1)..(5788): n is a, c, g, or t

SEQ ID NO: 336 - DNA, 16905 bp, Artificial Sequence; identical to SEQ ID NO: 68
  Synthetic Oligonucleotide
  misc_feature (1)..(4311): n is a, c, g, or t

SEQ ID NO: 337 - DNA, 12759 bp, Artificial Sequence; identical to SEQ ID NO: 171
  Synthetic Oligonucleotide
  misc_feature (1)..(199): n is a, c, g, or t

SEQ ID NO: 338 - DNA, 12318 bp, Artificial Sequence; identical to SEQ ID NO: 194
  Synthetic Oligonucleotide
  misc_feature (1)..(3416): n is a, c, g, or t

SEQ ID NO: 339 - DNA, 13272 bp, Artificial Sequence; identical to SEQ ID NO: 155
  Synthetic Oligonucleotide

SEQ ID NO: 340 - DNA, 12515 bp, Artificial Sequence; identical to SEQ ID NO: 184
  Synthetic Oligonucleotide
  misc_feature (1)..(3647): n is a, c, g, or t

SEQ ID NO: 341 - DNA, 12005 bp, Artificial Sequence; identical to SEQ ID NO: 210
  Synthetic Oligonucleotide
  misc_feature (1)..(8027): n is a, c, g, or t

SEQ ID NO: 342 - DNA, 31604 bp, Artificial Sequence; identical to SEQ ID NO: 1
  Synthetic Oligonucleotide

SEQ ID NO: 343 - DNA, 31547 bp, Artificial Sequence; identical to SEQ ID NO: 13
  Synthetic Oligonucleotide

SEQ ID NO: 344 - DNA, 11915 bp, Artificial Sequence; identical to SEQ ID NO: 217
  Synthetic Oligonucleotide
  misc_feature (1)..(6521): n is a, c, g, or t

SEQ ID NO: 345 - DNA, 11915 bp, Artificial Sequence; identical to SEQ ID NO: 217
  Synthetic Oligonucleotide
  misc_feature (1)..(6521): n is a, c, g, or t

SEQ ID NO: 346 - DNA, 22418 bp, Artificial Sequence; identical to SEQ ID NO: 32
  Synthetic Oligonucleotide

SEQ ID NO: 347 - DNA, 20038 bp, Artificial Sequence; identical to SEQ ID NO: 38
  Synthetic Oligonucleotide

SEQ ID NO: 348 - DNA, 13373 bp, Artificial Sequence; identical to SEQ ID NO: 151
  Synthetic Oligonucleotide
  misc_feature (1)..(3817): n is a, c, g, or t

SEQ ID NO: 349 - DNA, 12730 bp, Artificial Sequence; identical to SEQ ID NO: 172
  Synthetic Oligonucleotide
  misc_feature (1)..(6427): n is a, c, g, or t

SEQ ID NO: 350 - DNA, 23961 bp, Artificial Sequence; identical to SEQ ID NO: 27
  Synthetic Oligonucleotide
  misc_feature (1)..(6574): n is a, c, g, or t

SEQ ID NO: 351 - DNA, 31505 bp, Artificial Sequence; identical to SEQ ID NO: 14
  Synthetic Oligonucleotide

SEQ ID NO: 352 - DNA, 12392 bp, Artificial Sequence; identical to SEQ ID NO: 4
  Synthetic Oligonucleotide
  misc_feature (1)..(4007): n is a, c, g, or t

SEQ ID NO: 353 - DNA, 11862 bp, Artificial Sequence; identical to SEQ ID NO: 223
  Synthetic Oligonucleotide
  misc_feature (1)..(6797): n is a, c, g, or t

SEQ ID NO: 354 - DNA, 12001 bp, Artificial Sequence; identical to SEQ ID NO: 211
  Synthetic Oligonucleotide
  misc_feature (1)..(6625): n is a, c, g, or t

SEQ ID NO: 355 - DNA, 23242 bp, Artificial Sequence; identical to SEQ ID NO: 28
  Synthetic Oligonucleotide

SEQ ID NO: 356 - DNA, 15893 bp, Artificial Sequence; identical to SEQ ID NO: 90
  Synthetic Oligonucleotide
  misc_feature (1)..(5208): n is a, c, g, or t

SEQ ID NO: 357 - DNA, 15146 bp, Artificial Sequence; identical to SEQ ID NO: 98
  Synthetic Oligonucleotide
  misc_feature (1)..(6224): n is a, c, g, or t

SEQ ID NO: 358 - DNA, 12548 bp, Artificial Sequence; identical to SEQ ID NO: 181
  Synthetic Oligonucleotide
  misc_feature (1)..(2588): n is a, c, g, or t

SEQ ID NO: 359 - DNA, 13171 bp, Artificial Sequence; identical to SEQ ID NO: 3
  Synthetic Oligonucleotide
  misc_feature (1)..(6491): n is a, c, g, or t

SEQ ID NO: 360 - DNA, 31610 bp, Artificial Sequence; identical to SEQ ID NO: 11
  Synthetic Oligonucleotide
  misc_feature (1)..(5376): n is a, c, g, or t

SEQ ID NO: 361 - DNA, 11869 bp, Artificial Sequence; identical to SEQ ID NO: 222
  Synthetic Oligonucleotide
  misc_feature (1)..(3411): n is a, c, g, or t

SEQ ID NO: 362 - DNA, 16931 bp, Artificial Sequence; identical to SEQ ID NO: 67
  Synthetic Oligonucleotide
  misc_feature (1)..(5945): n is a, c, g, or t

SEQ ID NO: 363 - DNA, 16146 bp, Artificial Sequence; identical to SEQ ID NO: 82
  Synthetic Oligonucleotide

SEQ ID NO: 364 - DNA, 17423 bp, Artificial Sequence; identical to SEQ ID NO: 64
  Synthetic Oligonucleotide
  misc_feature (1)..(5971): n is a, c, g, or t

SEQ ID NO: 365 - DNA, 18419 bp, Artificial Sequence; identical to SEQ ID NO: 53
  Synthetic Oligonucleotide
  misc_feature (1)..(6073): n is a, c, g, or t

SEQ ID NO: 366 - DNA, 24922 bp, Artificial Sequence
  Synthetic Oligonucleotide
gcaagcccgcctcatgagccaagccctgcgcaaattgacggccagcattaaaaaggccaattgcacggtgatcttcatcaaccagatccgcatgaagatcggtgtgatgttcggtagccccgagaccacaacgggtggtaacgcactcaagttttactcatcggttcgcctcgatatccgccgtatcggacagattaaaaagggtgacgagttgaccggtaacgagacccgcgtgaaggtggtcaaaaacaaagtggcaccccctttcaaaaccgccgagttcgacatcatgtacggcaagggcatcagtcttgagggtgaaatcatcgatttaggcgtgttacacagcatcatcgacaagtcgggtgcttggtatgcctaccagggtgaaaaaattggtcaaggccgcgacaacgcccgtgacttcctgaaagaaaaccccagcttggcgcgtgagatcgaaaacaaggtgcgtgccgctttgggtgtacccctgcgtgaggccatcgagcccgccaaggcggcaccagcgcccaccggcaaagccgccaaggccgcggccgcagcagcggcagcgccagcgccagatatcgatttaggtatctcagaggacggtgaaattcccgcgtaaaggcccgcttggtgtctgtgcaaagtctctcgctcaagggccgcgtgttgcggctcttgagccagcgggaacactcccgcaccgaattggctcgtaagctcgccaaactcgaaaccgaggacggcgagctggccaaggtgctcgacgacttcgttgccaaaggcctgatcagtgaagagcgcctggcgcaaagcgttgtcaaccagcgtgcctccaagctgggcgccatgcgcctgcgggccgagttgcagaccaaaggggtcgaccccagccatatccaatccgtcattgccgagctcaaacctacagaggccgcacgtgccaaggcggtgtgggctcgaaaattcaaccaagcccctgaagacgccaaagccatggccaagcaggtccgctttttggcggcgcgcggttttgacagcgcggctatccgcgctgccgttccgcccattagccgagtaagcctcagcgaagacggtgcgcaagcgccgcaaagcgttgacgattacttggataatggggaatgaacaaagacacaaccgcctcgccatcgttatccgactgggccacattgcccatcgacccggcgcaacaaagcaacctcgccgccttggggttcagcaccatgacaccggtgcaagccgccacattgcccctcagcttggcgggaggcgacctcatcgcacaggctaaaaccggtagcggtaagacggccgcctttgcgattccgttgctgcaaaaactcaatgtgggtcaattggcggtgcaaagtctcgtgctgtgtcccacgcgagaactggccgatcaggtatgcgccgagattcgccgtttggcccgggcctatgacaacgtgaaagtgctgccgctgtgcggcggtgtggcgttacgcggccaaacggccagtctcgaaaatggtgcccatatcgttgtgggcacgccgggacgggtgctggatcacctgcaacgtggcaatttggcgctgtcgacgctcaccaccttggtcctcgacgaggccgatcgcatgctggacatgggctttgccgacgatattcaagccatttccaagcaaacgccagccacgcgacaaaccctgctgttttcggcgacctatcccgataccatcgccgcactgtcggcccggctgatgcgtcaaccgcagatagtgaaagtcgacaccacccatgacacccatgccatcgaggagtggtttttcgaagtcgagcccgatacccgattggatgcggtcacgcggttgctaaaccactaccaacccacctccaccgtcgcgttttgcaacacccgggtgcaatgcaacgatttggtgcaaattctgcgtgcgcatggcttctcggccctgacgctgcacggcgacctcgatcagcgcgatcgcgatcaagtactgattcaatttgccaaccacagttgttcggttttagtggccaccgatgtggcggcacgcggtttggatattgccgatctcgccgctgttatcaatgtcgacaccacgcctgacccacaggtctacacccatcgcattggtcgtaccggtcgcgcaggcgcgactggcttggctttgagtctggtcaccatgcccgagatgagtcgcgtggcacgcatcgaagaggtcaacaaccgtccagcgcggtgggcgaatttgtcaacgcttcaagcgacgggcagcgctttgaaggcgccgatgcgcaccttgcaaatcgcgggtggacgaaaagagaaaatccgtgcgggcgatattttgggcgccctaaccggcgaggcggggttcgataaatccgaagttggcaagatcagcttaggcgaattttcaagctacgtcgcggttgcggtgcccatcgcccagcgggcttgtgacgccctcaacgcgggccgcgtgaaaggcaagcgcgtgaaagtgcgcttgctcgataactgatctcaggcggctggccagtcaaacatcaaacccaggttttgcaccgccgccccgctggcgcctttacccaagttgtccaagcgggccaccagcaggctgtggccatgcgtgtcgttgccgaacacgtggatctctaggtcgttggtatcggccagcgccaatgcatcgagcttgccggtgtcggcggcatcctcgtgcctcacgacccgcacaaagcgactgttcccgtagtgcgcctcgaacaccccagccaagcgggccttgtcggtacccgctgccagttggtcgcggtgcaagggcaattgcaccaacataccttgtgcaaaattgcccacgctggggacaaataaggggcgcgtttgcaagcccgtccactgcatgatctcggggatgtgcttgtggctgagtcccaacgcataaagctcatacgcgggcgcactgttggcttcataagcctcaatcatggtgcgaccgccgccactgtagccactcacgctgggcaagcaaaccggcgttgtcgccggcagtacgccagcgtcaatcagggggcgcaacagggcgatggcacccgtggcgtagcaacctgggttggccacacgttccgcctgctggacggcggcggcctgcgacgcacacaactcagggaagccgtaaacccagcccggggcgacgcgatgcgctgtcgaggcatccacaatccgcggtgctttttgacccgccgctttcagctcgtccaccaacgcgaccgtctcgcgggcggcatcatcgtgcaggcactgcaccaccgcatcggcctgcgccaacagggcgcgtttggcagccacgtctttgcgcaaagcggggtcgatttgcagcaactgaacgtgcggcatcgtcgccagacgctcgcgaatctgaagtcccgtggtgccggcttcgccgtcgatgaaaatattagtcatggctgatatttggggttgcggcccgcgtcgccgtcagtttggtgaaaaatttctgcactgcaacatgatacagtctacggttggtaatttcctctgactggcctagcagggttgcccccgtttttgccataaaagggaagtgatttgtccctactttgagagccctgacatgaagatccacgagtaccaaggcaaagagatcctgcgccaattcgaggtgccagttccccgcggcatccctgcctttacagtgcaagaagcggttgaagccgcacaaaaattgggcggccctgtctgggttgtcaaagcgcaaatccatgccggtggccgaggcaaaggcggcggtgtgaaattggcccggtcaattgacgaagtcaagcaactcgctggcgagattttgggcatgcagttggtcacgcaccaaaccggccctgagggacaaaaagttcgccgcctcttgatcgaagacggcgccgatatcaagaaagaatattacgtgtccgcggtcaccgaccgcgccagccaacgcgttgccatcatggcttccagcgaaggcggtatggacatcgaagaggtggcgcacaagacgcccgagaaaatcatcaaggtatttgtcgaccccgcaaccggcctgaccgccgcgcaagcgaccgagctggcaaacggtattggtgtgccagcggcatcaaccgccgctgcggctgatgtgtttcaaaaactgtacaaatgctacatggacaccgacgcctcattggtcgaagtgaaccccctaatcctcgaaggcaacggcggcatcaaagcgctcgacgccaagttcaactttgacagcaacgccctgttccgtcatcccgaaatcgtcgcgtaccgtgaccttgacgaagaagacgcggccgaagtcgaagcctctaaatttgacctcgcctacatcagcctcgacggcaacatcggttgcttggtgaacggcgccggtttggccatggccaccatggacaccatcaagttgttcggtgccgagcccgctaacttcctagacgttggcggaggtgccacgcctgagaaagtaactgaagccttcaagatcatgctgaagaaccccaaagtgaaggccattttggtcaacatctttggcggcatcatgcgttgcgacacgattgcacagggtgttatcaccgcgtgtaaggcggtcaacctgggcgtgccgttggtggtgcgcatgaagggtaccaacgaagagctgggtaagcagatgttggcagagtctggtctgccgatcatcagcgccgactccatggccgaggccgccgaaaaaattgttgctgcggttaaagcctgagcgaaaaggaataagcatgtccatcctgattaataaagacaccaaagtcatcacccaaggtatcaccggtaagaccggtcaattccacacggaaaagtgccaagagtacgcaaacggcaagaactgtttcgtcgcgggtgtgaaccccaaaaaagcgggcgaaagcattttcaacatcccgatttacggctctgtgaaagaagcggccagcaccaccggtgcaaccgtatctgtcatctacgtgccgcccgcaggcgctgccgccgccatctgggaagcggttgaagccgacctcgacttggccatctgcatcaccgaaggtattcctgtgcgcgacatgttggaagtgcgtaaccgcatggccgccaaagaagccgccggtggcaaaaagaccttgctgttgggcccgaactgccctggtttgatcacgcctgacgaaatcaaaatcggcatcatgcccggccacatccacaagaagggccgcattggcgtggtcagccgctccggcacgctgacctacgaagcggtgggccaattgaccgagttgggtctgggccaatccagtgctgttggcattggtggcgaccccatcaacggcttgaagcacatcgatgtcatgcgcatgttcaatgacgaccccgacacagacgccgtcatcatgatcggcgaaatcggtggtcccgatgaagccgaagccgcccgttggtgcaaagaaaacatgaagaagccagtggtcggctttatcgctggtgtgaccgcaccggctggtaagcgcatgggccatgcgggtgccttaatctctggtggtgaagacaccgctgaggccaagctggccatcatggaagcttgcggtttcaccgtgacccgcaacccgtccgaaatgggtaagctgctgaagcgcttgctgtaaaccggatcggcagcgtcagcatgccgctggcgcgtgttcgtgcaaaaatggcaacgtgttccatgcgttgccattttttttgatacgttcaatcgaaagaaaataaccggtgcttgagtttttaacccctgaattctggatcgcggtgggtcaaattatcttgattgatattttgctcggcggcgataacgcggttgtcatcgctttggcctgtcgacagctgcctgaaaaccagcgcatgcagggcatcatgtggggcactgtgggcgcgattggtttgcgggtgttgcttatcgtttttgcgctaacacttctgaccatcccttatctgaaaatcgttggcggtttgttgctggtgtggattggtgtgaagctcatgatccccgatgaggaaggagaccatagcgtcgtcgatgccagtgacaagctctggtcagccgtcaaaacagtcatcttggccgacttggtcatgagcatcgacaacgtcatggccattgctggcgccgcgcagggtgctgccgagcatcaacaagtgccgctggtaatttttggcctgctagtcagcgtgcccatcatcgtatggggcagtcaattggttttgaaaatcatggacagcatgcccattgtcatcaccttgggtgcaatgttgttgggctggattgccggcatcatgatttggaccgacccggtgctggtcgatgtgctgccgtctgagcccctgatgggtttgtctttgcgccattgggcggggtttgtcggtgcttgcttggtgtgggtgattggtcgtgcggtcatcgcaaagcgccctaaacccttaggggcttgacgttatctctgagcgccttagacaccgtgcatcgttggttcaactttggaaacaacccggacactcattcatgcaactttccagcaaccgtaaccttggcttcaccttgattgaattgatggtggtggtggccgtggtgggcatcttggctgcagtggccattccgcaatatcaaaactacacccaacgcgcgcggtgggccgccaacctcggcgccattgccgcgttacagggtacggtcagtgagtgcctcggccaacaagccaacgacatcacgttatgcgacacgtttggcgaacttggggtcaccagtggcctgaataccgacggcgtcatgccgttgccccatggcacggttgccgtgcaagccagcggtgatgccaccgcgattcgggttgttttaacgggcgctgccaatgcgggtaattgcatcatcacagccagcttgacgcccgcagaaggagcccaaatgctgcaatgggccctcacgcgggacaccacacaaactaaatgtaccgctgccaacacgggcgttgacgcagcaggctgattcgggcgtaagatgcggctttaatttttggagcccagcatggcaaaaggtcagcaaaaaacaaacaaggaatccaaaaagcccaagaaggccgccgccgccgcccctgctttgaacagtgcgcaagaacccgtgcgtgccgtggtcaccacatccgtgatgcccaaaggcaaggctaaaaataaaccggccttctaatatttattagctatttattttaaaaattaaacaataaaagagtacttattgactattatgttgtgaagtaatcgacttgccttccgcaagccgttgattcacacatggggcaggctctgcaaacattcactcgacgggcgacgctcaaaaccccggtcatcatgcgggggtacctcacgcttgatgcactgctgatggcggagttggtcactggcgacgtctcgcacttactcaagcgagatgcgcagttgtactacgccagcgccgcctttttggtggacccgcttgaggaaaagcaaaaggcatcatttgttgccagcatgcggcccgagcaccacccggagctccgcgagctcatcgcccccaacacgcacacacccaacgcgccaccgcttttgcacacgcatcggtcgcgtggcaatgtcaacgacgtggcaattggacgcgctcgccgcaaagaagcgggcaacatcctcaaccaatacgtggcccacgctgctgcagccgtcgagtggtatgccaccggccatgccgagcaggtctggcaggttgtgcaagacatcgcatttattggcaaaaagcgatcagcgggctacggcgaaatcgacgcatggcaggtgatccccggccaccttgatggcctcaccgatgacttcggagagcccttgcgccccgtgccggttgagcgatggccaacctccgcgacgcttattccctccgaggccgcatggtgcgccccgtattgggatattcgaaaccgaaccaaatgctacacgccggagccacgatgaacggcgccgacttcttaatgcaacacatcggttatcggttattgccgaaagcgatgcacaccggcgatgccgtcaccgatgccaacgcgctattcagcatcagtttgcccctacacaccggaaaaacactccggctttccagttgctggtgggtgatcacacccgatgcaacgtacaccagcgttaaggccatccccgagaccggcgccattcaggggcagttgcggcaggccgtcatcttgtcatccctaaaaacgggattgcccctcttgatcctcgcgattggcaagagccccatttacgcacgcgacctctttgtgacctacgacccacgcgcaacgcgctattgcagcgatcgcagtttgcgcaccgttgattcaactctggagaagtggtggacaccttaatcagcaagcccatccagctgtgcggctatgcgctgcaccgcttggttgcgcaacatcaaaacggtgcgccagcgctctggcgtgacgagggtgacaccgtgcgaattcgctcgcgtgacgcctgtccgcccacctacgtcacagggcaactgttgggctttgtcacattggcgtgtgtgtcgtttggtagcaaacaccgctacctgccggtcgccgattggcgtggtcgcaaagcgtggctggaggcacagggcatcaaacacggtttcgaggtggttggggtgcacgcccagggtggcatgcaaaccgtgaccacccatgacggtcgccacttcaccattgatgccacgcaattcacgggcttgctgcgcgtcacccagcctgcgccattcaacgactgtctgctcaatggcatcggcaaagtaggtaaagcctttggcctcaacttactcgtcgttcattaacccaacgcttaaaaacgcttatccggagttcaccaccatgcaagacgttcgcatcgatatcgccatcaatacgattcaacccatcaccttcacccatcacggcatcgacgggttgcccaccatggctcgcggcgttgacatggagggtcatcccctgcgcaccgtttacattccagccgcgcagtttcgcggtcggctaaggcatgaggcggcgttggcaaaaatgcgtaccgcacacggccccatcaagttggcggaagcctacatgctggccttggggcaaaacatcgacaccaaagaagacgaggctgatgagaaagtgcggttgggcgagctactcgctttacgggcggccaaccccttcattgatctcttcggaacgtggcgcatggacagccggctttacgtgtcgcacctgatgccggtcgtcaacgtcaagcccgacacctttcaccacatccgccgcgatctagacaccaacgacgcgttgtttgccgagttacccgaagccgagatcgacgtcttttacgaaaggcaagacggacagtcgcaagcctctcaagcggagagtctgattaaggtggccacccgcgaactgcgcaaagccaaaaaagaaaacgacctcgccaaatgcgacgagttcgaagccaagatcgaagaactcaaagccctcaagaaggcgcacaaagccggtgacgaatcgggaaacaccaaacacttggtggcgatggaggccgtccctgcgggaattcaattgttgtgcaaactcatcataaagcgggccacgccgctcgacctcagcatgctcacgggtgcgcttaacgcgatcagcgaattccccatgatgggtgcccagcgggcccgtggctgaggcaaggtgagtggcgccgcaaccgtctgccacacccagggtgaggtgttggcgcaaatcgccttcggtggttttttgccagctgcactggagtggaccgatgcgggcaccgcgttcatgactggcctcgaaacggttgccgtcgccgcgtgaaaggcccttaccgcagcccacagcaggcgcaatacgccaagctcatcgagcgcgctgtcagcaaacccggtgcgcccctgttggcgggtgctgcgcccgggctcggtaagacacacggctacgccatcccgttgttgtgcagtggcaaaaaagttgccatcgccatgagcacgcgccaactgatcgatcaatttatagcgagcgatgcactcgccgctgcgcaagccgcactagaggccgaggggcggcccgctgccaccgttgtcgccttgcaaccccgccgtcaatttgaaacggcggtggcctacagcgcgcacaaaacggcggcgcttgatgccgacgtcttggtgctcacacacatgggcgtgctcatcgatacccacatcccagcctacgcccagctgcgtcagcgcgctgtcttgttgtttgacgaagccgatcttttggccgatgccgccgacttgcgcagcacctatcgcattgaggctgaggccttagcccgcgcaggcgtcgaaaacgccacaccgacaaaggcggttgaaaccatcattaaaaaatccgatgaccccgaggaaaaagcagtcgccacagccatccaacgcgctttggcagagccggcttggtacaaagtgatcggtaaagaagacaacggcgatttggtgctgacccaccgcatgccggggcgcatgttgcgcaccctcatcaatgacatgccgcggtgcattttcaccagtggcaccctcacggtatcggggcgttttgaccactttgtcaaagccatcggcctgaccgcagtggcacccgaaagccagcacattgaccccgtgcaacacggccaactgcgcgttgaggtggccagtgaggccctcaccccagaagcacaagccgaacgcatcatgcacgcggcgacaccggtattggtgctgaccaccagccacgcgactacggcggcgttgggctctttgtgccccggtgccatctgccgcgcacccggtgaagccctcatggatgcggtggcgcgatgccctgatgatggcatcttgatcgccgctggcgcctggtctggcctcgatgcgccgcgcctgcggtggcaaaccgtggtcatccccaaaacaccgtacggcaaaccactcatccttgacgcccagcagataagcgcttacgtggacagcaaggttgttgccatcaggcgcaccaaccaagggttacaccgtgggctgcgcaccaccgatgccacctgcaccttgctgttactcgatccggatagccgtcgtgccgatttacgtcaagccattccccgtcgtttcttggtggattgggacagcgtggccgagggctcgttggttttgcgcacgcacttcgcccgtgaacgaaaaaaaggtctgcgtgaaaaaaccctgagccggcgcgggcagcactgcgaacaccccggctgtacggccacccaagagcatttgctggaggtgcaccacctcaacccgattgccaacggcccccgcgacacagttactgatgacctgcgggtgctttgtaaaaatcaccacgcggatgcccaccaagccatgcgaaaagctgattttttaaaagtgaaaacaactgaaaagcgtgcagaggcagacacttaggccacagctggtcaagctacgccgtaaatgcgtagttactggaacttcgcgcgagtgcttagataggcttccatcggtcaagctacgccgtaaatgcgtagttactggaacttgcgtgtggtatcagttcagcgtggatcgggtcaagctacgccgtaaatgcgtagttactggaacgaagttcacgttgacactgccttggatacgggtcaagctacgccgtaaatgcgtagttactggaactggtagcggctgcttgttaagtaaggccgaggtcgtctggggtcaagctacgccgtaaaggcgtagttacttttagcagccagttttgctggttttaagcggtccaatggcccgacttgccgcccatcttttcaagcaggcgcacgcccgtcatggtcatgccgcggtcggcggctttgcacatgtcgtagatggtcagcaagccgacttgtacggcggtgagggcttccatttcaacacccgtggggccggtggtttcggcggtgacggtgcaatgaacgtgggggggctggtcaccggtggtgaaggctacgcgcacatggctgagcgccaagggatggcacaggggaatgaggtcagcggtgcgcttggaggcttgtatagccgccacgcgcgcaatgcccaacacatcaccctttttggcgttgccatcgcgaatcagagccaaggtgtcggcgtgcatttcaatgcgcccttctgctgtggcgctgcgcttggtgttggctttgtcacccacgtcgaccatgtgggcttggccttgtgcatcaaagtgggtcaggggtgaagggggctggctggacacggtgcaatctccgaaactttgcaaaacttagggcatcatacccatatgccttcccccttgtttgttgctcgccgtcgccctcgtttggcgtgggcgttgccgtgggctttgggtgccgccctgctgctggggccaaccacactcaccgttgcgcaaccccgcgcggccttgcccaacttgggtggtggggtgtcgttaacgctgggggatgagcgccggctgggccaacaaatcatgcccagcttgcacaacagtggcttggtggtggaagacccgctgctcaaccaatacctcaccgatctgtggcgccctgtgtttgcaacggcgcgcgcacgcggtgatgtgcccgatgacatgttgcagcagtttgcttggcagttgtggttgctcagccccaaagccatcaacgcgtttgcattacccgggggttactttggttttcacttaggtttgttggcatcggccacggatgacgctgcactggcgtcggtgttggcgcacgagttgagccatgtgacacagcgccatattgcccgcatcatccaagcccaagagagccaagcgccttggctgattggcgccatgattttgggtgctgccaccatcgccgccagccccgatgcaggcgccgcactgattgtgggtgggcaggcagcgtccattcaaaaccagctcaacttctcgcgggacatggagcaagaggcggaccgccaaggcttggtggtgttgtcggaggcggggtttgatccgaaggggtttgtgcgcttatttgaaaccctgcaaaacgccaaccgcttgaatgacgatggtgcctttccctacctgcgcagccacccgctcacgaccgagcgtgtggcggatatgcaaggccgcttgttcagcgtaccggccgagcccaacccggtgggcgatggtgcggtgcagatgcgcgaccccgatgcctctgctttgttgcgcgtgcgtgccgccgtcatcgcctcggctgatgaggtggatgtgttgcaaggttggggtgcggcgcccgccgccactgggtcagtgggcagcgccacccgcccggcagaacaatgggcgagcgactaccggcgcgcactggccgcgtgggcactgaagcgccccgatgtggcatggacgcgcctgcgccaattgatgaccgaggcggctacgcaacccgccgtgtcgcaggtgctgcgcgagacggcgttggcttggctggccagccccgctaagtttgagccgatacccgctgcaacggtgcaggcttgggttgaggcggccttggctgatgcccaagccgggcggcgttcggcgctgctgctgttggcgggttatgcggccagcgccaattcagccgtgccggatgcgcggcgcgcgcaggtgatcggggccttgcgtacctggttggcgacccaccccaatgatgcgttgggctggcagttgttggcccgtttgagtgcgcaacaaggccaagccttggtggcgttgagggccgaggccgaggcctttgtggcgcgcgagctgtggcaaggggcgcttgaccgtttgtctgccgccaagcgcctgattgcggaggctaaaacccgtttcagtgaagccgacattgcgattatttacgcccgcgaaaaggcagttaatcaagccatggcatttgcacggtctgagcgccgttgagcgcgcaccggtacactaagtcccccatggcagtcatccacatctctgacatcgagtcggccatcaactattggcggacacaaaaaccttcacccgacggtgtgacgctgtgcgccgaggtgcgcgccttggccgaggtttatgcgctgctggtgtactaccacgagaccgaggccgatgaggccagtatgccgtttgatgcctatgcggcctgggaggcttggttcgacacgacacccgatacgccgtgtatcgcgatctgctcaaccagccagggcgatgacctgtgtaaaggttgtggccgtacctttgaagaggtgcagtactggaccgaaatgcagcccgccgaaaagcgcgcggtttggcgtcgcatcaccctgcatggcgatgcgtggcgctttaaccgctaccgcgaacgggcgatcgagaacgcggcgtaaccgcgtgccgtcagcctttggcggcgcgcaacgccaattcggcggctttaccgacgtaggtggcaggcgtcatggccaacaaacgcgctttgtcggcgtctggaatagccagtgactgaatgaggccgtgcaaggcttcacgcgtgacggttttgccccgtgtgacggctttgagttgctcgtacgcgccatcgataccgtagcgccgcatgacggtttgaatcggctctgccaacacttcccacgcgttgtcgaggtcgtccgccaaggcgtccgcgttgagttcgagtttgcgcagacccaccgccatcgattgatacgccaacaccgagtagccaaacgcgacgcccatgttgcgcaacaccgtgctgtcggtcaggtcacgttgccagcgcgagatgggtagcttttcactgaggtggcgcagcaaggcattggccagccccaagttaccttcggcgttttcaaagtcgatcggattgactttgtgcggcatggtggatgagccgatctcaccgtctttgaggcgttgcttgaagtaacccaagctgatgtaaccccacacgtcacgcgcaaggtcgatcaagatggtgttgacacgggccatggcgtcgaacagctcggccatgtaatcgtgtggctcaatttgaatgctgtagtcctggaacgttaagcccaagccattgggtgcgggtgaggccaccacgcctttggcaaaggcctcccaatcgacgtcgggccaggcgctcatgtgggcgttatagttaccaaccgcgccgttcattttggccatgatggcgacttgctcaatgcgcaaggtggcgcgttgcaggcgcacggcgacgttggccatctctttaccgacggtggtcgggctggcggtttggccgtgggtccggctgagcatgggcacgtgggcgtactgctcggccatgcccagcagcagattcacgacgtcgcccaacatgggcaacagcacttcgcgtagcgcggcttgcaattgcagtgcgtggctggtgttgttgatgtcctcgctggtgcaggcaaagtgcacaaattcgcctgcacgctcaagctcttcgcggaccgctgggctaagacggtcatttcggaaagcgcgtttgatccaatactcaactgctttgacatcgtggttggtctcgcgctcgatggccttgatgtcggcggtgtcggcttcgctgaattgctgaaccaagccccgcaggtaggcggtcgcctcggccgataaggcgggacactccaccagaccggcttgcgtgagggcgataaaccacgtgatctcgacttgcacccgcttgtgcatgtagccatgctcgctcatgatgggtcgcaaggcagccagtttgccgctgtagcggccgtcaagcggggatagggcggagatggtgtagaggtcttgagtcattgggggcggggcgcgatgtgcaccaaaatagatagccaatattgtaggcgcccagccaaattaaacctttggctgtatacaggtttgatgagcttaaaagcgaccaggattccttttggcgcccgtgttttggggctttctgtggctagaatcattgctcgatcaaccattattgaaacccatgaaactcatcggctctccaaccagtccatatgtgcgcaaggttcgcgtcgtcttggttgaaaagcgtctcgagtacgagttcgcaaccgaagatgtgtggtcggcggataccctgatcgcagcggctaatccactcgggaagatcccctgtttgatcatggacgggggtgaggccatgtttgattcgcgcgtgatcgtagagtacctcgatggcttgtcgccggtgagtcgtttgattcccgcaagcggccgcgagcgtgcggaagttaaaacctgggaggccttggctgacggtgtcatggatgccgccatcttggctcgcttagaggcttcatgggctgggcgcaccgaggcccaacgctcaccggcttggattgaccgccagttgggcaaagtggagttggcggtggctgccatggccaaaggcttgggcgacaagccttattgcagtggcattcatttcagtttgtcagacgtggctgtgggtagcgcgttggcgtatctggagttccgctttccacaaattaattggcgcgaaacgcatcccaatttgtccgcgttgttagaccgcttgatgcagcgggccagctttgcaggcacggcgcacgcctgatagcccatcgctctgcggggtttatcccgcgcgctttttgagccagcgcatgagggcgccgatgacggggagcttttcatacagctcttccgcagcgtcccagtagtcgcggtgaaacaccaccaagccctgcgcgtcgaagcgcaaatggctggcaccccggatggtccaggggcgaccgcccttgccgccctttcggcctttggtgctgaatagaaaatcccaagttaaaaagcagtcatcaccctgttcaatggccgtcgtgaccacgaagcgcggttgttcaaggcgcttgaacatgtcatcgaagatgtgctgaacttgcgccaactgcgtgacttcgttgaaagggtctttgaaaaagagcggatcggcgtagtacgcacccatgcgcgtcacgtcagcggcttgcaggttttcaaaccatgccaataacgcttgtgtgcgggccgatacctgatgacgggatgcgctcatagtcgggtgagttttttgatgagcgcttgtgcccagcgatgcggcaatacgcgcagcaatttgagccaccaggtgaagcgtttgggaaagtggatgtcaaagaggccatcagcccaaccagccaaaatttcggtggctgcaacatcggtggtgatcaacgcaggcatggtgaactcgttctgcgcggtgagtggggtttctacaaagccggggtggatggcgctgatacccagccccttgcccgccaagtcgtaatgcagtacttcagcgaaatgggtgagcgcggctttggtgggaccgtatgccaacgagttgggtaacccgcgccagccggcgacgctactgataaaactgaggtgaccaaatccttgttgcaataaggtgggcaaggtggcatcgaccaagttataggcgcccacgacgttgacgtcgagatgttgcttcatgcgtgccaagtcaaaccggtaggcgcgcaggggcttgtaaatcccggctgcaaacagcaccagatcgagccgcccttgcgcctgcacaatgtgttgcaccgtgttttgcagcgcgggcaagtcggtcacgtctagtgggtaggccgccgcactggggtgctgtgttgcaaattgctgcaggggctcgctttggcgtgccgagaccattacccgggcaccgcgttgtgccaactgctcggcaacggcgtggccaatgccggtggaggctccaacaatccacaccactttgccagaccattccgtcagcggtgggttcatgggtttgaacaagcgggccatcaggcggcagtcattggtttttcgagcgtgaactggatcacgtccgtgttcgactccatgaaggcggcttcacagtaggccaagtagaactcccatgtgcggatgaaaggcgtgtcaaaacccagcgcgcggacggcgggttcctcgtgcaggaatttgtggcgccatgtgcgcagggtctcggcgtaatcgagaccgaatgccttctcattgacgacacgcaaaccagcgcgcccagcagattcgcggaattggcgtggactgggtaaacagccgccaggaaagatgtactgctgtatgaagtccgtgccttggatgtagcggctgaacaggtgatcggcaatcacgatggactggatacaggccttacctccgggtttgaggcgcttggcgatggtgtcgaaataggtgggccagtaggcgcgcccgaccgcctcgatcatctcaatcgagcaaaccgcgtcgaatggttcttcggggctgaccacgccaatgtcacggtaatcctgcaaccgcaagtcggctaactgtccgttgggggttgcagcgagtcgcttgttggcccagtcgagctgttctgtggacagcgtcaggccgaccatttcgctttgaaattcgttggtagccatttctgccaaggcgccccagccgcagccgatctctagcaagcgttggccgggcttcaagtccacctcttgcagcgcgcggcgcaccttttcgttttgcgccatggccatgtctgtgatgccattggcatacaacgcgctggagtagttcatggtgttgtctaaccacaaacggtaaaagtcgtttccgaggtcgtagtgcgcgtgaatatttttgcggctgttggctttggtgttgcggttcaaccagtgcttcacttggtaggcaaaacgcccaatgggatgaccgtatacggctttctcgatggcgtcgcggttttgaatcagcacctgcaacaagtgggcgagttgcggggtgtgccagtaaccggcaatgtaggtttcggcgaagccgatatcaccacttttaatggctgccgaaaacacacgccaatttttcaggatgatgtagccctgcaaaccaccaggtttgccgtagaccagccaggtgccgtcagggcattgaatgtgcaactccccatgcgtgattttggtgagcagcttgagcagtcgcttggccgcgaaggggactttgacgtgggcgagggctgccgcggtggtggtgtctcgttgcatgggtcgtcgaatgaaggctaggtaatgaactcggtgggtggcgcaggttttctgaaaaacggtacacgcttcagaaacaataacagggcttgccaatgaatgcgcgccatcaccccaaaggtcatgagggggtaggcccatagcgcgcgtcggcggctgcgcgcgtttaggggttcgagcgtaccactcacgctggtgcacagcaaaggaccgtccgcccattgggtgtcggtgtagtcaatgcgggcgaccacgcggtttggcaccccctgccccgtttgtttttggtgcatgaagttgaaccggtaactgccccgcacctcgcaaaagggggaaacatgaaaaaccttttcagtgcgctgctgtacacccagggttacgtggtccagtacgtagatgtgccgctcgccaaatgtgttgttgacctcgacgaccacggcttttagttcgtgcgcggcggtgtagcagtaccaaaaactgacgggcttaaaaacgtagcccaacacgcgtgggtaggtgtgtaaccacacttccccggtgcagtcggtgatgccctgctcgattagcaaggcatcaagccaagccaagctgtcggccccgccgacgccgtggtcactgtcgtaaaacgacaagggtgcccatcggttgcgcggaatggcctcgtcgaaggctgcagggtcttgcgcgccttggcgcatcggcagccaaacaaagtagttgccgtacgcaaattgatgcggggctggtcgggtgcgggtgtgccgcaccacgccaaatccaatctggggggaggccgtcacgcgctcgtccgttgggtggccgccatgtcaaggtgagcgcgcaacgcgttagctgcacgcagcccggactgcagcccgtcttcgtgaaaaccatagcccgtccacgcgccacagaagtaggtgtgttgggtgccctgtagcccggcaatttggcgttgggcgtcgatcgccgccaaatcaaaaatggggtgatcgtagtgataggtgcccaataccgactcgggcgcgatggcactgaccgggttcagtgacaccaccacgggctgcgtgaagggcagcggctgtaattggttgatgaggtagtgaaggcagacgcgggcgtcttcttgtgccaaagcgggtgcgcgttcgtagttccaggccgaccacgcttgacgagccgagggcaagaccgatgggtccgtatgtaaaacagccacattgggctggtagcggatcgcgcgcaaggtgctcgtttcggcgggggtcgcgtccgcgagcatggccaaggtttggtcggggtggctggccacgatgacgtggtcaaagggctcgataccccgtgctgtggtgatggacaccccattggcgtcacgggtgatgcggctaacggggctgctcaagcgcgcatcaggaactgttttgaggatggcatccacgtattggcgcgcgccaccggcaacggtgaaccatttagggcggttcgccacttgaagcagcccgtggttgtcacaaaactgtaccaaggtggcgacggggaacgccagcatctgagcggttggacagctccatatgctgcccagcatggggaggaggtaccagttgatgaatggctttgaaaaacggtgagcctctagaaaggtcgagagtggctggttttcttgatggccccgcgcctcagggggcgtgcgggcaattgcggtggcgattttgttgaaccgcagaatgtcgcggagcatgcgccagaagtcgggtcgaaacaggttggtcttttggctgaacaccgccccgagtgtggtgccactccactccagtgtctggccgtttccccgtgcattgggcaccttgaccgaaaacgacatgtctgagggcgccagcgggatcttgagttcggcaaataacgccaacagaccggggtaggtgcgctcattgaggaccaaaaagccggtgtcgatgccccaggtttgttcgccggtgggcgtgggcagggtgacatcaacggtgtgggtgtgtccaccgaaatagtcattggcttcgagcagggtcacgtgagcggtgtcacgcaacgcatacgcagcggacaaaccggcgatgccagagcccacaatggccacgcggggccgtatgccggacaaaggtgtttctgttgattgcgttaaagttttcatgcgcaggttggacaaaaggtcattattgggggtatgtccacaggtagataccctaggttgcccaaaaagtacttgccaaagtaacgatctggccgatactaacttgtcttagacaaaagacaaatttatttttacacccttacggttccaatttatatgacgtggatatacaccatctcggacatcgagcgcgataccggcatcgctaaagatcgtttgcgcgtttgggagcgccgatacggcttccccctgcctcagcgggatgacacccaagagcgggtctatgacgaagaccaattactccgattgcgcctcatcaagcggttgttggatgttggcatgcgcgccgggcgtgttgtgcccatgccgcttgaggtactgcagcgagaggtggaaagcgtaaccacccccatcgtggcgcgcgtggctgcgcaagaggatcaggcgctgctggcccatttggtctcgctgctcaaagccaccaatcgccgcgctttgcaccagacactcatgcaaatcattgcagaacggggtttggcggacgccatcgaggaggtcattgcgcccctcggcgcgcaggtgggtgagttttggctgagtggccaaatggccatttaccaagagcatttgtttaccgcagtcgtcaaaagcgtactgatgcaagccatggaacagttgccgttgcaagcgaacggaaaaccaccccgggtgttactggccacgttatcgacagaacgccacgaggtgggtttgttgatggcggagtccatgtttgcgcaagccggttgtgaacggttgtcgttgggccccagcatgcccctaaccgaggcggttacggcctgcttggcggtcaagcccgatatcttcgccctgagcttctccagccagaatgcgcccaaagaggtgctcagccagttgcgacagttgcgcggcatgttgccacccgagaccgaaatttgggtgggaggcagcgccgtcgcattgcgtttaattccagacgccaaagtcgccaaagtgttcggccgagccaaagatctgcgggacgctatcgaggcgtggcgtatcgagcggcactagcagaagccctttaaccactgagggggtctatgcgcatcatttttacgaggggcatgagcccccgtaaaatgcggtgatcgaaccaagttgcgcaggagtagtggatgctgtaccccgagttgttcaaacaactggaagcggtgagatgggacatggacaaggatattccttggaaagactttgacccctctgccctgtccgatgaacaggcccaaaccatcaagatgaacgccattaccgagtgggctgcattgcccgccacggagatgtttctgcgcgacaaccgcgatgactctgatttctccgcgttcatgtccatttggttttttgaagagcaaaagcattcactcgtcttgattgagtacttgcgccgcttccggcctgacctcgtgccaactgaagccgagttgcacgccgtgcgcttcgacttcgaccccgcaccggcactcgaaaccttgatgttgcatttctgcggcgagatacgactgaatcattggtaccgtcgcgcggcacagtggcacaacgagcctgtcattaagcacatttacaccaccctcagccaagacgaggcacgacacggcggtgcgtatttgcgttacatgcgccgtgcgattgagcgtttcggtgacgatgcacgcgccgcatttgccaaagtcggtgtgctcatggccagcgcgcgtcggacggcgcaggctttgcaccccaccaacttacacgttaacaaaacgctgttccccaacgacaccgtgcaaagccgaatgcccgaacccggctggttagagcattggttggatggtcaaatccagtttgatgtgacgtgggaaaccaaagtggtcgagcgcattttgcacaacctgggtttgttgtttggccagcggtttgatactgtgcaggcgctcaaccgctaccgcaaacagatcacaccggcgaccgcttaagcggtctcgaatacgctgttccacagggccaatatggcctctcggtatgcggctgcatcatccagcggcacttgggtgggtgcttcgtcgagacgcgcgcggtgttggatttgtcgcagcgaccggtaggcgtccatcgctgcctcactcacggttggcggcagtaaaccgcaggtttgcgcaattcggatcagcttgatattccctaaattgggaatcaattctgggtgctgagcgctgtgtgccagcagcaggtattgcacaacaaactcggcatccaccatgccgcccacgctgtgtttgacatcgaagagcccgtccggtacgtgatgggcttggcgcacgcgctcgcgcatgttcatgatttcggttttcaaggcggtggtgtcacgcggagccaccatgacgctgcgccggacggcgtcaaactgcgcctctagctccggctgccccatcacgaagcgcgcccgggtgatcgcttggtgttcccaagtccacgccgcgttgctgccgcgttgcgcttggtagtcggcataggcctcaaatcgtgtgaccaacatgcccgagttgccattggggcgtaacgcggtatcgatctcgtacaagtcaccctcagccgtcttgacggtcaaccagttgatcagcttgcgcaccagcgctgcgtaaatggtttgggcgtcatcgtggtcatcgtcgtaaacgaaaacgatgtcgagatcgctgccgtaaccgagttctttgccacccaatttgccgtaagccaagatcgcgatgcgtggctctggggcgtggcgttgacgcaagcgctcccagcaccattgcaaggtgacacgcaggatgctgtcggccagtgcactgaggtcgtcagcaacaaactcgacggtcaagcgtccttcaacgtcgcgcgcgagcgtgcgaaacacctcactgtgatgggcgcgacgcaacagatccaatagggcctcgtcggtgtcttcaccggttcgcttgagcgctgcgcgacgggcttgaagctcggcctcaaactgctgcccattgaagcgctcggagaagagctcggggttggccagttcgtcaatcacactggggtgttgaatgagataccgtgccggccacttcgccgcactgaggatgcgcagcatgcgctcatggatggcaggccgctcttggagcaaggccaagtagctgtcccgtcgcatcaagggttcaagccagtcggcgaaccggagcgctccgacttcggatactttgccgtcatccatccaggcctgtgttcgttgcagcaggcgagccaagcgggtgcgtgactcatcgcgcaggcccagaatacgaggttggtctttccaggttgcaaggtgttctttgagtgggctgtgcagcccatctagaacactgtcgaggtcagtctcaagccgcttttcgccgttgcaattggtacagggttgttcgcc

SEQ ID NO: 367 - DNA, 24923 bp, Artificial Sequence; identical to SEQ ID NO: 23
  Synthetic Oligonucleotide

SEQ ID NO: 368 - DNA, 12055 bp, Artificial Sequence; identical to SEQ ID NO: 209
  Synthetic Oligonucleotide
  misc_feature (1)..(2382): n is a, c, g, or t

SEQ ID NO: 369 - DNA, 11963 bp, Artificial Sequence; identical to SEQ ID NO: 215
  Synthetic Oligonucleotide
  misc_feature (1)..(4591): n is a, c, g, or t

SEQ ID NO: 370 - DNA, 14174 bp, Artificial Sequence; identical to SEQ ID NO: 117
  Synthetic Oligonucleotide
  misc_feature (1)..(5051): n is a, c, g, or t

SEQ ID NO: 371 - DNA, 12072 bp, Artificial Sequence
  Synthetic Oligonucleotide
  misc_feature (1)..(6682): n is a, c, g, or t
nnnnnnnnnnnnnnnnnnnnnnnnnnnnnnnnnnnnnnnnnnnnnnnnnnnnnnnnnnnnnnnnnnnnnnnnnnnnnnnnnnnnnnnnnnnnnnnnnnnnnnnnnnnnnnnnnnnnnnnnnnnnnnnnnnnnnnnnnnnnnnnnnnnnnnnnnnnnnnnnnnnnnnnnnnnnnnnnnnnnnnnnnnnnnnnnnnnnnnnnnnnnnnnnnnnnnnnnnnnnnnnnnnnnnnnnnnnnnnnnnnnnnnnnnnnnnnnnnnnnnnnnnnnnnnnnnnnnnnnnnnnnnnnnnnnnnnnnnnnnnnnnnnnnnnnnnnnnnnnnnnnnnnnnnnnnnnnnnnnnnnnnnnnnnnnnnnnnnnnnnnnnnnnnnnnnnnnnnnnnnnnnnnnnnnnnnnnnnnnnnnnnnnnnnnnnnnnnnnnnnnnnnnnnnnnnnnnnnnnnnnnnnnnnnnnnnnnnnnnnnnnnnnnnnnnnnnnnnnnnnnnnnnnnnnnnnnnnnnnnnnnnnnnnnnnnnnnnnnnnnnnnnnnnnnnnnnnnnnnnnnnnnnnnnnnnnnnnnnnnnnnnnnnnnnnnnnnnnnnnnnnnnnnnnnnnnnnnnnnnnnnnnnnnnnnnnnnnnnnnnnnnnnnnnnnnnnnnnnnnnnnnnnnnnnnnnnnnnnnnnnnnnnnnnnnnnnnnnnnnnnnnnnnnnnnnnnnnnnnnnnnnnnnnnnnnnnnnnnnnnnnnnnnnnnnnnnnnnnnnnnnnnnnnnnnnnnnnnnnnnnnnnnnnnnnnnnnnnnnnnnnnnnnnnnnnnnnnnnnnnnnnnnnnnnnnnnnnnnnnnnnnnnnnnnnnnnnnnnnnnnnnnnnnnnnnnnnnnnnnnnnnnnnnnnnnnnnnnnnnnnnnnnnnnnnnnnnnnnnnnnnnnnnnnnnnnnnnnnnnnnnnnnnnnnnnnnnnnnnnnnnnnnnnnnnnnnnnnnnnnnnnnnnnnnnnnnnnnnnnnnnnnnnnnnnnnnnnnnnnnnnnnnnnnnnnnnnnnnnnnnnnnnnnnnnnnnnnnnnnnnnnnnnnnnnnnnnnnnnnnnnnnnnnnnnnnnnnnnnnnnnnnnnnnnnnnnnnnnnnnnnnnnnnnnnnnnnnnnnnnnnnnnnnnnnnnnnnnnnnnnnnnnnnnnnnnnnnnnnnnnnnnnnnnnnnnnnnnnnnnnnnnnnnnnnnnnnnnnnnnnnnnnnnnnnnnnnnnnnnnnnnnnnnnnnnnnnnnnnnnnnnnnnnnnnnnnnnnnnnnnnnnnnnnnnnnnnnnnnnnnnnnnnnnnnnnnnnnnnnnnnnnnnnnnnnnnnnnnnnnnnnnnnnnnnnnnnnnnnnnnnnnnnnnnnnnnnnnnnnnnnnnnnnnnnnnnnnnnnnnnnnnnnnnnnnnnnnnnnnnnnnnnnnnnnnnnnnnnnnnnnnnnnnnnnnnnnnnnnnnnnnnnnnnnnnnnnnnnnnnnnnnnnnnnnnnnnnnnnnnnnnnnnnnnnnnnnnnnnnnnnnnnnnnnnnnnnnnnnnnnnnnnnnnnnnnnnnnnnnnnnnnnnnnnnnnnnnnnnnnnnnnnnnnnnnnnnnnnnnnnnnnnnnnnnnnnnnnnnnnnnnnnnnnnnnnnnnnnnnnnnnnnnnnnnnnnnnnnnnnnnnnnnnnnnnnnnnnnnnnnnnnnnnnnnnnnnnnnnnnnnnnnnnnnnnnnnnnnnnnnnnnnnnnnnnnnnnnnnnnnnnnnnnnnnnnnnnnnnnnnnnnnnnnnnnnnnnnnnnnnnnnnnnnnnnnnnnnnnnnnnnnnnnnnnnnnnnnnnnnnnnnnnnnnnnnnnnnnnnnnnnnnnnnnnnnnnnnnnnnnnnnnnnnnnnnnnnnnnnnnnnnnnnnnnnnnnnnnnnnnnnnnnnnnnnnnnnnnnnnnnnnnnnnnnnnnnnnnnnnnnnnnnnnnnnnnnnnnnnnnnnnnnnnnnnnnnnnnnnnnnnnnnnnnnnnnnnnnnnnnnnnnnnnnnnnnnnnnnnnnnnnnnnnnnnnnnnnnnnnnnnnnnnnnnnnnnnnnnnnnnnnnnnnnnnnnnnnnnnnnnnnnnnnnnnnnnnnnnnnnnnnnnnnnnnnnnnnnnnnnnnnnnnnnnnnnnnnnnnnnnnnnnnnnnnnnnnnnnnnnnnnnnnnnnnnnnnnnnnnnnnnnnnnnnnnnnnnnnnnnnnnnnnnnnnnnnnnnnnnnnnnnnnnnnnnnnnnnnnnnnnnnnnnnnnnnnnnnnnnnnnnnnnnnnnnnnnnnnnnnnnnnnnnnnnnnnnnnnnnnnnnnnnnnnnnnnnnnnnnnnnnnnnnnnnnnnnnnnnnnnnnnnnnnnnnnnnnnnnnnnnnnnnnnnnnnnnnnnnnnnnnnnnnnnnnnnnnnnnnnnnnnnnnnnnnnnnnnnnnnnnnnnnnnnnnnnnnnnnnnnnnnnnnnnnnnnnnnnnnnnnnnnnnnnnnnnnnnnnnnnnnnnnnnnnnnnnnnnnnnnnnnnnnnnnnnnnnnnnnnnnnnnnnnnnnnnnnnnnnnnnnnnnnnnnnnnnnnnnnnnnnnnnnnnnnnnnnnnnnnnnnnnnnnnnnnnnnnnnnnnnnnnnnnnnnnnnnnnnnnnnnnnnnnnnnnnnnnnnnnnnnnnnnnnnnnnnnnnnnnnnnnnnnnnnnnnnnnnnnnnnnnnnnnnnnnnnnnnnnnnnnnnnnnnnnnnnnnnnnnnnnnnnnnnnnnnnnnnnnnnnnnnnnnnnnnnnnnnnnnnnnnnnnnnnnnnnnnnnnnnnnnnnnnnnnnnnnnnnnnnnnnnnnnnnnnnnnnnnnnnnnnnnnnnnnnnnnnnnnnnnnnnnnnnnnnnnnnnnnnnnnnnnnnnnnnnnnnnnnnnnnnnnnnnnnnnnnnnnnnnnnnnnnnnnnnnnnnnnnnnnnnnnnnnnnnnnnnnnnnnnnnnnnnnnnnnnnnnnnnnnnnnnnnnnnnnnnnnnnnnnnnnnnnnnnnnnnnnnnnnnnnnnnnnnnnnnnnnnnnnnnnnnnnnnnnnnnnnnnnnnnnnnnnnnnnnnnnnnnnnnnnnnnnnnnnnnnnnnnnnnnnnnnnnnnnnnnnnnnnnnnnnnnnnnnnnnnnnnnnnnnnnnnnnnnnnnnnnnnnnnnnnnnnnnnnnnnnnnnnnnnnnnnnnnnnnnnnnnnnnnnnnnnnnnnnnnnnnnnnnnnnnnnnnnnnnnnnnnnnnnnnnnnnnnnnnnnnnnnnnnnnnnnnnnnnnnnnnnnnnnnnnnnnnnnnnnnnnnnnnnnnnnnnnnnnnnnnnnnnnnnnnnnnnnnnnnnnnnnnnnnnnnnnnnnnnnnnnnnnnnnnnnnnnnnnnnnnnnnnnnnnnnnnnnnnnnnnnnnnnnnnnnnnnnnnnnnnnnnnnnnnnnnnnnnnnnnnnnnnnnnnnnnnnnnnnnnnnnnnnnnnnnnnnnnnnnnnnnnnnnnnnnnnnnnnnnnnnnnnnnnnnnnnnnnnnnnnnnnnnnnnnnnnnnnnnnnnnnnnnnnnnnnnnnnnnnnnnnnnnnnnnnnnnnnnnnnnnnnnnnnnnnnnnnnnnnnnnnnnnnnnnnnnnnnnnnnnnnnnnnnnnnnnnnnnnnnnnnnnnnnnnnnnnnnnnnnnnnnnnnnnnnnnnnnnnnnnnnnnnnnnnnnnnnnnnnnnnnnnnnnnnnnnnnnnnnnnnnnnnnnnnnnnnnnnnnnnnnnnnnnnnnnnnnnnnnnnnnnnnnnnnnnnnnnnnnnnnnnnnnnnnnnnnnnnnnnnnnnnnnnnnnnnnnnnnnnnnnnnnnnnnnnnnnnnnnnnnnnnnnnnnnnnnnnnnnnnnnnnnnnnnnnnnnnnnnnnnnnnnnnnnnnnnnnnnnnnnnnnnnnnnnnnnnnnnnnnnnnnnnnnnnnnnnnnnnnnnnnnnnnnnnnnnnnnnnnnnnnnnnnnnnnnnnnnnnnnnnnnnnnnnnnnnnnnnnnnnnnnnnnnnnnnnnnnnnnnnnnnnnnnnnnnnnnnnnnnnnnnnnnnnnnnnnnnnnnnnnnnnnnnnnnnnnnnnnnnnnnnnnnnnnnnnnnnnnnnnnnnnnnnnnnnnnnnnnnnnnnnnnnnnnnnnnnnnnnnnnnnnnnnnnnnnnnnnnnnnnnnnnnnnnnnnnnnnnnnnnnnnnnnnnnnnnnnnnnnnnnnnnnnnnnnnnnnnnnnnnnnnnnnnnnnnnnnnnnnnnnnnnnnnnnnnnnnnnnnnnnnnnnnnnnnnnnnnnnnnnnnnnnnnnnnnnnnnnnnnnnnnnnnnnnnnnnnnnnnnnnnnnnnnnnnnnnnnnnnnnnnnnnnnnnnnnnnnnnnnnnnnnnnnnnnnnnnnnnnnnnnnnnnnnnnnnnnnnnnnnnnnnnnnnnnnnnnnnnnnnnnnnnnnnnnnnnnnnnnnnnnnnnnnnnnnnnnnnnnnnnnnnnnnnnnnnnnnnnnnnnnnnnnnnnnnnnnnnnnnnnnnnnnnnnnnnnnnnnnnnnnnnnnnnnnnnnnnnnnnnnnnnnnnnnnnnnnnnnnnnnnnnnnnnnnnnnnnnnnnnnnnnnnnnnnnnnnnnnnnnnnnnnnnnnnnnnnnnnnnnnnnnnnnnnnnnnnnnnnnnnnnnnnnnnnnnnnnnnnnnnnnnnnnnnnnnnnnnnnnnnnnnnnnnnnnnnnnnnnnnnnnnnnnnnnnnnnnnnnnnnnnnnnnnnnnnnnnnnnnnnnnnnnnnnnnnnnnnnnnnnnnnnnnnnnnnnnnnnnnnnnnnnnnnnnnnnnnnnnnnnnnnnnnnnnnnnnnnnnnnnnnnnnnnnnnnnnnnnnnnnnnnnnnnnnnnnnnnnnnnnnnnnnnnnnnnnnnnnnnnnnnnnnnnnnnnnnnnnnnnnnnnnnnnnnnnnnnnnnnnnnnnnnnnnnnnnnnnnnnnnnnnnnnnnnnnnnnnnnnnnnnnnnnnnnnnnnnnnnnnnnnnnnnnnnnnnnnnnnnnnnnnnnnnnnnnnnnnnnnnnnnnnnnnnnnnnnnnnnnnnnnnnnnnnnnnnnnnnnnnnnnnnnnnnnnnnnnnnnnnnnnnnnnnnnnnnnnnnnnnnnnnnnnnnnnnnnnnnnnnnnnnnnnnnnnnnnnnnnnnnnnnnnnnnnnnnnnnnnnnnnnnnnnnnnnnnnnnnnnnnnnnnnnnnnnnnnnnnnnnnnnnnnnnnnnnnnnnnnnnnnnnnnnnnnnnnnnnnnnnnnnnnnnnnnnnnnnnnnnnnnnnnnnnnnnnnnnnnnnnnnnnnnnnnnnnnnnnnnnnnnnnnnnnnnnnnnnnnnnnnnnnnnnnnnnnnnnnnnnnnnnnnnnnnnnnnnnnnnnnnnnnnnnnnnnnnnnnnnnnnnnnnnnnnnnnnnnnnnnnnnnnnnnnnnnnnnnnnnnnnnnnnnnnnnnnnnnnnnnnnnnnnnnnnnnnnnnnnnnnnnnnnnnnnnnnnnnnnnnnnnnnnnnnnnnnnnnnnnnnnnnnnnnnnnnnnnnnnnnnnnnnnnnnnnnnnnnnnnnnnnnnnnnnnnnnnnnnnnnnnnnnnnnnnnnnnnnnnnnnnnnnnnnnnnnnnnnnnnnnnnnnnnnnnnnnnnnnnnnnnnnnnnnnnnnnnnnnnnnnnnnnnnnnnnnnnnnnnnnnnnnnnnnnnnnnnnnnnnnnnnnnnnnnnnnnnnnnnnnnnnnnnnnnnnnnnnnnnnnnnnnnnnnnnnnnnnnnnnnnnnnnnnnnnnnnnnnnnnnnnnnnnnnnnnnnnnnnnnnnnnnnnnnnnnnnnnnnnnnnnnnnnnnnnnnnnnnnnnnnnnnnnnnnnnnnnnnnnnnnnnnnnnnnnnnnnnnnnnnnnnnnnnnnnnnnnnnnnnnnnnnnnnnnnnnnnnnnnnnnnnnnnnnnnnnnnnnnnnnnnnnnnnnnnnnnnnnnnnnnnnnnnnnnnnnnnnnnnnnnnnnnnnnnnnnnnnnnnnnnnnnnnnnnnnnnnnnnnnnnnnnnnnnnnnnnnnnnnnnnnnnnnnnnnnnnnnnnnnnnnnnnnnnnnnnnnnnnnnnnnnnnnnnnnnnnnnnnnnnnnnnnnnnnnnnnnnnnnnnnnnnnnnnnnnnnnnnnnnnnnnnnnnnnnnnnnnnnnnnnnnnnnnnnnnnnnnnnnnnnnnnnnnnnnnnnnnnnnnnnnnnnnnnnnnnnnnnnnnnnnnnnnnnnnnnnnnnnnnnnnnnnnnnnnnnnnnnnnnnnnnnnnnnnnnnnnnnnnnnnnnnnnnnnnnnnnnnnnnnnnnnnnnnnnnnnnnnnnnnnnnnnnnnnnnnnnnnnnnnnnnnnnnnnnnnnnnnnnnnnnnnnnnnnnnnnnnnnnnnnnnnnnnnnnnnnnnnnnnnnnnnnnnnnnnnnnnnnnnnnnnnnnnnnnnnnnnnnnnnnnnnnnnnnnnnnnnnnnnnnnnnnnnnnnnnnnnnnnnnnnnnnnnnnnnnnnnnnnnnnnnnnnnnnnnnnnnnnnnnnnnnnnnnnnnnnnnnnnnnnnnnnnnnnnnnnnnnnnnnnnnnnnnnnnnnnnnnnnnnnnnnnnnnnnnnnnnnnnnnnnnnnnnnnnnnnnnnnnnnnnnnnnnnnnnnnnnnnnnnnnnnnnnnnnnnnnnnnnnnnnnnnnnnnnnnnnnnnnnnnnnnnnnnnnnnnnnnnnnnnnnnnnnnnnnnnnnnnnnnnnnnnnnnnnnnnnnnnnnnnnntgatggtggtggtggccgtggtgggcatcttggctgcagtggccattccgcaatatcaaaactacacccaacgcgcgcggtgggccgccaacctcggcgccattgccgcgttacagggtacggtcagtgagtgcctcggccaacaagccaacgacatcacgttatgcgacacgtttggcgaacttggggtcaccagtggcctgaataccgacggcgtcatgccgttgccccatggcacggttgccgtgcaagccagcggtgatgccaccgcgattcgggttgttttaacgggcgctgccaatgcgggtaattgcatcatcacagccagcttgacgcccgcagaaggagcccaaatgctgcaatgggccctcacgcgggacaccacacaaactaaatgtaccgctgccaacacgggcgttgacgcagcaggctgattcgggcgtaagatgcggctttaatttttggagcccagcatggcaaaaggtcagcaaaaaacaaacaaggaatccaaaaagcccaagaaggccgccgccgccgccgcccctgctttgaacagtgcgcaagaacccgtgcgtgccgtggtcaccacatccgtgatgcccaaaggcaaggctaaaaataaaccggccttctaatatttattagctatttattttaaaaattaaacaataaaagagtacttattgcctattatgttgtgaagtaatcgacttgccttccgcaagccgttgattcacacatggggcaggctctgcaaacattcactcgacgggcgacgctcaaaaccccggtcatcatgcgggggtacctcacgcttgatgcactgctgatggcggagttggtcactggcgacgtctcgcacttactcaagcgagatgcgcagttgtactacgccagcgccgcctttttggtggacccgcttgaggaaaagcaaaaggcatcatttgttgccagcatgcggcccgagcaccacccggagctccgcgagctcatcgcccccaacacgcacacacccaacgcgccaccgcttttgcacacgcatcggtcgcgtggcaatgtcaacgacgtggcaattggacgcgctcgccgcaaagaagcgggcaacatcctcaaccaatacgtggcccacgctgctgcagccgtcgagtggtatgccaccggccatgccgagcaggtctggcaggttgtgcaagacatcgcatttattggcaaaaagcgatcagcgggctacggcgaaatcgacgcatggcaggtgatccccggccaccttgatggcctcaccgatgacttcggagagcccttgcgccccgtgccggttgagcgatggccaacctccgcgacgcttattccctccgaggccgcatggtgcgccccgtattgggatattcgaaaccgaaccaaatgctacacgccggagccacgatgaacggcgccgacttcttaatgcaacacatcggttatcggttattgccgaaagcgatgcacaccggcgatgccgtcaccgatgccaacgcgctattcagcatcagtttgcccctacacaccggaaaaacactccggctttccagttgctggtgggtgatcacacccgatgcaacgtacaccagcgttaaggccatccccgagaccggcgccattcaggggcagttgcggcaggccgtcatcttgtcatccctaaaaacgggattgcccctcttgatcctcgcgattggcaagagccccatttacgcacgcgacctctttgtgacctacgacccacgcgcaacgcgctattgcagcgatcgcagtttgcgcaccgttgattcaactctggagaagtggtggacaccttaatcagcaagcccatccagctgtgcggctatgcgctgcaccgcttggttgcgcaacatcaaaacggtgcgccagcgctctggcgtgacgagggtgacaccgtgcgaattcgctcgcgtgacgcctgtccgcccacctacgtcacagggcaactgttgggctttgtcacattggcgtgtgtgtcgtttggtagcaaacaccggtacctgccggtcgccgattggcgtggtcgcaaagcgtggctggaggcacagggcatcaaacacggtttcgaggtggttggggtgcacgcccagggtggcatgcaaaccgtgaccacccatgacggtcgccacttcaccattgatgccacgcaattcacgggcttgctgcgcgtcacccagcctgcgccattcaacgactgtctgctcaatggcatcggcaaagtaggtaaagcctttggcctcaacttactcgtcgttcattaacccaacgcttaaaaacgcttatccggagttcaccaccatgcaagacgttcgcatcgatatcgccatcaatacgattcaacccatcaccttcacccatcacggcatcgacgggttgcccaccatggctcgcggcgttgacatggagggtcatcccctgcgcaccgtttacattccagccgcgcagtttcgcggtcggctaaggcatgaggcggcgttggcaaaaatgcgtaccgcacacggccccatcaagttggcggaagcctacatgctggccttggggcaaaacatcgacaccaaagaagacgaggctgatgagaaagtgcggttgggcgagctactcgctttacgggcggccaaccccttcattgatctcttcggaacgtggcgcatggacagccggctttacgtgtcgcacctgatgccggtcgtcaacgtcaagcccgacacctttcaccacatccgccgcgatctagacaccaacgacgcgttgtttgccgagttacccgaagccgagatcgacgtcttttacgaaaggcaagacggacagtcgcaagcctctcaagcggagagtctgattaaggtggccacccgcgaactgcgcaaagccaaaaaagaaaacgacctcgccaaatgcgacgagttcgaagccaagatcgaagaactcaaagccctcaagaaggcgcacaaagccggtgacgaatcgggaaacaccaaacacttggtggcgatggaggccgtccctgcgggaattcaattgttgtgcaaactcatcataaagcgggccacgccgctcgacctcagcatgctcacgggtgcgcttaacgcgatcagcgaattccccatgatgggtgcccagcgggcccgaggttgcggcgaggtgagtggcaccgcaaccgtctgccacacccaaggtgaggtgttggcgcaaatcgccttcggtggttttttgccagctgtattggagtggaccgatgcgggcaccgcgttcatgactggcctcgaaacggttgccgtcgccgcgtgaaaggcccttaccgcagcccacagcaggcgcaatacgccaagctcatcgagcgcgctgtcagcaaacccggtgcgcccctgttggcgggtgctgcgcccgggctcggtaagacacacggctacgccatcccgttgttgtgcagtggcaaaaaagttgccatcgccatgagcacgcgccaactgatcgatcaatttatagcgagcgatgcactcgccgctgcgcaagccgcactagaggccgaggggcggcccgctgccaccgttgtcgccttgcaaccccgccgtcaatttgaaacggcggtggcctacagcgcgcacaaaacggcggcgcttgatgccgacgtcttggtgctcacacacatgggcgtgctcatcgatacccacatcccagcctacgcccagctgcgtcagcgcgctgtcttgttgtttgacgaagccgatcttttggccgatgccgccgacttgcgcagcacctatcgcattgaggctgaggccttagcccgcgcaggcgtcgaaaacgccacaccgacaaaggcggttgaaaccatcattaaaaaatccgatgaccccgaggaaaaagcagtcgccacagccatccaacgcgctttggcagagccggcttggtacaaagtgatcggtaaagaagacaacggcgatttggtgctgacccaccgcatgccggggcgcatgttgcgcaccctcatcaatgacatggcgcggtgcattttcaccagtggcaccctcacggtatcggggcgttttgaccactttgtcaaagccatcggcctgaccgcagtggcacccgaaagccagcacattgaccccgtgcaacacggccaactgcgcgttgaggtggccagtgaggccctcaccccagaagcacaagccgaacgcatcatgcacgcggcgacaccggtattggtgctgaccaccagccacgcgactacggcggcgttgggctctttgtgccccggtgccatctgccgcgcacccggtgaagccctcatggatgcggtggcgcgatgccctgatgatggcatcttgatcgccgctggcgcctggtctggcctcgatgcgccgcgcctgccgtggcaaaccgtggtcatccccaaaacaccgtacggcaaaccactcatccttgacgcccagcagataagcgcttacgtggacagcaaggttgttgccatcaggcgcaccaaccaagggttacaccgtgggctgcgcaccaccgatgccacctgcaccttgctgttactcgatccggatagccgtcgtgccgatttacgtcaagccattccccgtcgtttcttggtggattgggacagcgtggccgagggctcgttggttttgcgcacgcacttcgcccgtgaacgaaaaaaaggtctgcgtgaaaaaaccctgagccggcgcgggcagcactgcgaacaccccggctgtacggccacccaagagcatttgctggaggtgcaccacctcaacccgattgccaacggcccccgcgacacagttactgatgacctgcgggtgctttgtaaaaatcaccacgcggatgcccaccaagccatgcgaaaagctgattttttaaaagtgaaaacaactgaaaagcgtgcagaggcagacacttaggccacagctggtcaagctacgccgtaaatgcgtagttactggaacttcgcgcgagtgcttagataggcttccatcggtcaagctacgccgtaaatgcgtagttactggaacttgcgtgtggtatcagttcagcgtggatcgggtcaagctacgccgtaaatgcgtagttactggaacgaagttcacgttgacactgccttggatacgggtcaagctacgccgtaaatgcgtagttactggaactggtagcggctgcttgttaagtaaggccgaggtcgtctggggtcaagctacgccgtaaaggcgtagttacttttagcagccagttttgctggttttaagcggtccaatggcctgacttgccgcccattttttcaagcaggcgcacgcccgtcatggtcatgccacggtcagcggctttgcacatgtcgtaaatggtcagca

SEQ ID NO: 372 - DNA, 28601 bp, Artificial Sequence; identical to SEQ ID NO: 21
  Synthetic Oligonucleotide
  misc_feature (1)..(1839): n is a, c, g, or t

SEQ ID NO: 373 - DNA, 11747 bp, Artificial Sequence; identical to SEQ ID NO: 239
  Synthetic Oligonucleotide
  misc_feature (1)..(5806): n is a, c, g, or t

SEQ ID NO: 374 - DNA, 19331 bp, Artificial Sequence; identical to SEQ ID NO: 48
  Synthetic Oligonucleotide

SEQ ID NO: 375 - DNA, 19268 bp, Artificial Sequence; identical to SEQ ID NO: 49
  Synthetic Oligonucleotide

SEQ ID NO: 376 - DNA, 14075 bp, Artificial Sequence; identical to SEQ ID NO: 119
  Synthetic Oligonucleotide
  misc_feature (1)..(2334): n is a, c, g, or t

SEQ ID NO: 377 - DNA, 19673 bp, Artificial Sequence; identical to SEQ ID NO: 5
  Synthetic Oligonucleotide
  misc_feature (1)..(4565): n is a, c, g, or t

SEQ ID NO: 378 - DNA, 12436 bp, Artificial Sequence; identical to SEQ ID NO: 187
  Synthetic Oligonucleotide
  misc_feature (1)..(6071): n is a, c, g, or t

SEQ ID NO: 379 - DNA, 27817 bp, Artificial Sequence; identical to SEQ ID NO: 22
  Synthetic Oligonucleotide
  misc_feature (1)..(4504): n is a, c, g, or t

SEQ ID NO: 380 - DNA, 31505 bp, Artificial Sequence; identical to SEQ ID NO: 15
  Synthetic Oligonucleotide
  misc_feature (1)..(2353): n is a, c, g, or t

SEQ ID NO: 381 - DNA, 18021 bp, Artificial Sequence; identical to SEQ ID NO: 6
  Synthetic Oligonucleotide
  misc_feature (1)..(4861): n is a, c, g, or t

SEQ ID NO: 382 - DNA, 11790 bp, Artificial Sequence; identical to SEQ ID NO: 232
  Synthetic Oligonucleotide
  misc_feature (1)..(5462): n is a, c, g, or t

SEQ ID NO: 383 - DNA, 11790 bp, Artificial Sequence; identical to SEQ ID NO: 232
  Synthetic Oligonucleotide
  misc_feature (1)..(5462): n is a, c, g, or t

SEQ ID NO: 384 - DNA, 11790 bp, Artificial Sequence; identical to SEQ ID NO: 229
  Synthetic Oligonucleotide
  misc_feature (1)..(5022): n is a, c, g, or t

SEQ ID NO: 385 - DNA, 11790 bp, Artificial Sequence; identical to SEQ ID NO: 229
  Synthetic Oligonucleotide
  misc_feature (1)..(5022): n is a, c, g, or t

SEQ ID NO: 386 - DNA, 11790 bp, Artificial Sequence; identical to SEQ ID NO: 231
  Synthetic Oligonucleotide
  misc_feature (1)..(5126): n is a, c, g, or t

SEQ ID NO: 387 - DNA, 11789 bp, Artificial Sequence
  Synthetic Oligonucleotide
  misc_feature (1)..(5125): n is a, c, g, or t
nnnnnnnnnnnnnnnnnnnnnnnnnnnnnnnnnnnnnnnnnnnnnnnnnnnnnnnnnnnnnnnnnnnnnnnnnnnnnnnnnnnnnnnnnnnnnnnnnnnnnnnnnnnnnnnnnnnnnnnnnnnnnnnnnnnnnnnnnnnnnnnnnnnnnnnnnnnnnnnnnnnnnnnnnnnnnnnnnnnnnnnnnnnnnnnnnnnnnnnnnnnnnnnnnnnnnnnnnnnnnnnnnnnnnnnnnnnnnnnnnnnnnnnnnnnnnnnnnnnnnnnnnnnnnnnnnnnnnnnnnnnnnnnnnnnnnnnnnnnnnnnnnnnnnnnnnnnnnnnnnnnnnnnnnnnnnnnnnnnnnnnnnnnnnnnnnnnnnnnnnnnnnnnnnnnnnnnnnnnnnnnnnnnnnnnnnnnnnnnnnnnnnnnnnnnnnnnnnnnnnnnnnnnnnnnnnnnnnnnnnnnnnnnnnnnnnnnnnnnnnnnnnnnnnnnnnnnnnnnnnnnnnnnnnnnnnnnnnnnnnnnnnnnnnnnnnnnnnnnnnnnnnnnnnnnnnnnnnnnnnnnnnnnnnnnnnnnnnnnnnnnnnnnnnnnnnnnnnnnnnnnnnnnnnnnnnnnnnnnnnnnnnnnnnnnnnnnnnnnnnnnnnnnnnnnnnnnnnnnnnnnnnnnnnnnnnnnnnnnnnnnnnnnnnnnnnnnnnnnnnnnnnnnnnnnnnnnnnnnnnnnnnnnnnnnnnnnnnnnnnnnnnnnnnnnnnnnnnnnnnnnnnnnnnnnnnnnnnnnnnnnnnnnnnnnnnnnnnnnnnnnnnnnnnnnnnnnnnnnnnnnnnnnnnnnnnnnnnnnnnnnnnnnnnnnnnnnnnnnnnnnnnnnnnnnnnnnnnnnnnnnnnnnnnnnnnnnnnnnnnnnnnnnnnnnnnnnnnnnnnnnnnnnnnnnnnnnnnnnnnnnnnnnnnnnnnnnnnnnnnnnnnnnnnnnnnnnnnnnnnnnnnnnnnnnnnnnnnnnnnnnnnnnnnnnnnnnnnnnnnnnnnnnnnnnnnnnnnnnnnnnnnnnnnnnnnnnnnnnnnnnnnnnnnnnnnnnnnnnnnnnnnnnnnnnnnnnnnnnnnnnnnnnnnnnnnnnnnnnnnnnnnnnnnnnnnnnnnnnnnnnnnnnnnnnnnnnnnnnnnnnnnnnnnnnnnnnnnnnnnnnnnnnnnnnnnnnnnnnnnnnnnnnnnnnnnnnnnnnnnnnnnnnnnnnnnnnnnnnnnnnnnnnnnnnnnnnnnnnnnnnnnnnnnnnnnnnnnnnnnnnnnnnnnnnnnnnnnnnnnnnnnnnnnnnnnnnnnnnnnnnnnnnnnnnnnnnnnnnnnnnnnnnnnnnnnnnnnnnnnnnnnnnnnnnnnnnnnnnnnnnnnnnnnnnnnnnnnnnnnnnnnnnnnnnnnnnnnnnnnnnnnnnnnnnnnnnnnnnnnnnnnnnnnnnnnnnnnnnnnnnnnnnnnnnnnnnnnnnnnnnnnnnnnnnnnnnnnnnnnnnnnnnnnnnnnnnnnnnnnnnnnnnnnnnnnnnnnnnnnnnnnnnnnnnnnnnnnnnnnnnnnnnnnnnnnnnnnnnnnnnnnnnnnnnnnnnnnnnnnnnnnnnnnnnnnnnnnnnnnnnnnnnnnnnnnnnnnnnnnnnnnnnnnnnnnnnnnnnnnnnnnnnnnnnnnnnnnnnnnnnnnnnnnnnnnnnnnnnnnnnnnnnnnnnnnnnnnnnnnnnnnnnnnnnnnnnnnnnnnnnnnnnnnnnnnnnnnnnnnnnnnnnnnnnnnnnnnnnnnnnnnnnnnnnnnnnnnnnnnnnnnnnnnnnnnnnnnnnnnnnnnnnnnnnnnnnnnnnnnnnnnnnnnnnnnnnnnnnnnnnnnnnnnnnnnnnnnnnnnnnnnnnnnnnnnnnnnnnnnnnnnnnnnnnnnnnnnnnnnnnnnnnnnnnnnnnnnnnnnnnnnnnnnnnnnnnnnnnnnnnnnnnnnnnnnnnnnnnnnnnnnnnnnnnnnnnnnnnnnnnnnnnnnnnnnnnnnnnnnnnnnnnnnnnnnnnnnnnnnnnnnnnnnnnnnnnnnnnnnnnnnnnnnnnnnnnnnnnnnnnnnnnnnnnnnnnnnnnnnnnnnnnnnnnnnnnnnnnnnnnnnnnnnnnnnnnnnnnnnnnnnnnnnnnnnnnnnnnnnnnnnnnnnnnnnnnnnnnnnnnnnnnnnnnnnnnnnnnnnnnnnnnnnnnnnnnnnnnnnnnnnnnnnnnnnnnnnnnnnnnnnnnnnnnnnnnnnnnnnnnnnnnnnnnnnnnnnnnnnnnnnnnnnnnnnnnnnnnnnnnnnnnnnnnnnnnnnnnnnnnnnnnnnnnnnnnnnnnnnnnnnnnnnnnnnnnnnnnnnnnnnnnnnnnnnnnnnnnnnnnnnnnnnnnnnnnnnnnnnnnnnnnnnnnnnnnnnnnnnnnnnnnnnnnnnnnnnnnnnnnnnnnnnnnnnnnnnnnnnnnnnnnnnnnnnnnnnnnnnnnnnnnnnnnnnnnnnnnnnnnnnnnnnnnnnnnnnnnnnnnnnnnnnnnnnnnnnnnnnnnnnnnnnnnnnnnnnnnnnnnnnnnnnnnnnnnnnnnnnnnnnnnnnnnnnnnnnnnnnnnnnnnnnnnnnnnnnnnnnnnnnnnnnnnnnnnnnnnnnnnnnnnnnnnnnnnnnnnnnnnnnnnnnnnnnnnnnnnnnnnnnnnnnnnnnnnnnnnnnnnnnnnnnnnnnnnnnnnnnnnnnnnnnnnnnnnnnnnnnnnnnnnnnnnnnnnnnnnnnnnnnnnnnnnnnnnnnnnnnnnnnnnnnnnnnnnnnnnnnnnnnnnnnnnnnnnnnnnnnnnnnnnnnnnnnnnnnnnnnnnnnnnnnnnnnnnnnnnnnnnnnnnnnnnnnnnnnnnnnnnnnnnnnnnnnnnnnnnnnnnnnnnnnnnnnnnnnnnnnnnnnnnnnnnnnnnnnnnnnnnnnnnnnnnnnnnnnnnnnnnnnnnnnnnnnnnnnnnnnnnnnnnnnnnnnnnnnnnnnnnnnnnnnnnnnnnnnnnnnnnnnnnnnnnnnnnnnnnnnnnnnnnnnnnnnnnnnnnnnnnnnnnnnnnnnnnnnnnnnnnnnnnnnnnnnnnnnnnnnnnnnnnnnnnnnnnnnnnnnnnnnnnnnnnnnnnnnnnnnnnnnnnnnnnnnnnnnnnnnnnnnnnnnnnnnnnnnnnnnnnnnnnnnnnnnnnnnnnnnnnnnnnnnnnnnnnnnnnnnnnnnnnnnnnnnnnnnnnnnnnnnnnnnnnnnnnnnnnnnnnnnnnnnnnnnnnnnnnnnnnnnnnnnnnnnnnnnnnnnnnnnnnnnnnnnnnnnnnnnnnnnnnnnnnnnnnnnnnnnnnnnnnnnnnnnnnnnnnnnnnnnnnnnnnnnnnnnnnnnnnnnnnnnnnnnnnnnnnnnnnnnnnnnnnnnnnnnnnnnnnnnnnnnnnnnnnnnnnnnnnnnnnnnnnnnnnnnnnnnnnnnnnnnnnnnnnnnnnnnnnnnnnnnnnnnnnnnnnnnnnnnnnnnnnnnnnnnnnnnnnnnnnnnnnnnnnnnnnnnnnnnnnnnnnnnnnnnnnnnnnnnnnnnnnnnnnnnnnnnnnnnnnnnnnnnnnnnnnnnnnnnnnnnnnnnnnnnnnnnnnnnnnnnnnnnnnnnnnnnnnnnnnnnnnnnnnnnnnnnnnnnnnnnnnnnnnnnnnnnnnnnnnnnnnnnnnnnnnnnnnnnnnnnnnnnnnnnnnnnnnnnnnnnnnnnnnnnnnnnnnnnnnnnnnnnnnnnnnnnnnnnnnnnnnnnnnnnnnnnnnnnnnnnnnnnnnnnnnnnnnnnnnnnnnnnnnnnnnnnnnnnnnnnnnnnnnnnnnnnnnnnnnnnnnnnnnnnnnnnnnnnnnnnnnnnnnnnnnnnnnnnnnnnnnnnnnnnnnnnnnnnnnnnnnnnnnnnnnnnnnnnnnnnnnnnnnnnnnnnnnnnnnnnnnnnnnnnnnnnnnnnnnnnnnnnnnnnnnnnnnnnnnnnnnnnnnnnnnnnnnnnnnnnnnnnnnnnnnnnnnnnnnnnnnnnnnnnnnnnnnnnnnnnnnnnnnnnnnnnnnnnnnnnnnnnnnnnnnnnnnnnnnnnnnnnnnnnnnnnnnnnnnnnnnnnnnnnnnnnnnnnnnnnnnnnnnnnnnnnnnnnnnnnnnnnnnnnnnnnnnnnnnnnnnnnnnnnnnnnnnnnnnnnnnnnnnnnnnnnnnnnnnnnnnnnnnnnnnnnnnnnnnnnnnnnnnnnnnnnnnnnnnnnnnnnnnnnnnnnnnnnnnnnnnnnnnnnnnnnnnnnnnnnnnnnnnnnnnnnnnnnnnnnnnnnnnnnnnnnnnnnnnnnnnnnnnnnnnnnnnnnnnnnnnnnnnnnnnnnnnnnnnnnnnnnnnnnnnnnnnnnnnnnnnnnnnnnnnnnnnnnnnnnnnnnnnnnnnnnnnnnnnnnnnnnnnnnnnnnnnnnnnnnnnnnnnnnnnnnnnnnnnnnnnnnnnnnnnnnnnnnnnnnnnnnnnnnnnnnnnnnnnnnnnnnnnnnnnnnnnnnnnnnnnnnnnnnnnnnnnnnnnnnnnnnnnnnnnnnnnnnnnnnnnnnnnnnnnnnnnnnnnnnnnnnnnnnnnnnnnnnnnnnnnnnnnnnnnnnnnnnnnnnnnnnnnnnnnnnnnnnnnnnnnnnnnnnnnnnnnnnnnnnnnnnnnnnnnnnnnnnnnnnnnnnnnnnnnnnnnnnnnnnnnnnnnnnnnnnnnnnnnnnnnnnnnnnnnnnnnnnnnnnnnnnnnnnnnnnnnnnnnnnnnnnnnnnnnnnnnnnnnnnnnnnnnnnnnnnnnnnnnnnnnnnnnnnnnnnnnnnnnnnnnnnnnnnnnnnnnnnnnnnnnnnnnnnnnnnnnnnnnnnnnnnnnnnnnnnnnnnnnnnnnnnnnnnnnnnnnnnnnnnnnnnnnnnnnnnnnnnnnnnnnnnnnnnnnnnnnnnnnnnnnnnnnnnnnnnnnnnnnnnnnnnnnnnnnnnnnnnnnnnnnnnnnnnnnnnnnnnnnnnnnnnnnnnnnnnnnnnnnnnnnnnnnnnnnnnnnnnnnnnnnnnnnnnnnnnnnnnnnnnnnnnnnnnnnnnnnnnnnnnnnnnnnnnnnnnnnnnnnnnnnnnnnnnnnnnnnnnnnnnnnnnnnnnnnnnnnnnggcggcacgctgctgctcggcgggcgtaatttgaaaattgcccttttttgcgcgtcgaccgcaaccgtcgccctttttttcaacctgcaccatgaagtcaccgccgacactgcctacgccgaatacatcgtcggaccggcaccgctgcccggccagaccgacccgcgcgccttctgggtcaacaaatcgacagcctcgctgatcgacgattccgagccgcccaactacacgcgctacatcaagcgcctgcgccagatcctgcttgacgaactggccttccgcgaacgcgagattctcgtcctcggcgccggcggcttcacgctatcgcaccgcgagccgatgaaccgctacacctatgtcgacatcgacccggcgatcaagggcatcgccgagcaacacttcctgcgcgagccgacgcgcggcgaattcatcgccgacgacgcccgccgcttcgtggctaccaccgaacgccacttcgacgccgtcgtcgtcgacgtctacagctcgcatacctcgatccccagccacctggtcacccgtgaattctgggcaggcacccgccgggtgctgaagcccgatggcgttttgctcgccaacctgatcctcgacggcaagctggaaacgccctacgcgcgcaacctgctggcgaccatcgacagtgttttcgggcgttgcgcggtcgacgtgctgcacaaagcagaaacgctgtccaacgtcgtcgtcacctgctttgccagcagccgaccggcggcgaccggcaacatctacgtcgacgaaaaaaaccgcgccgacctcgacatggcacgctcgcgttaggcgaatcaaggccgccgctccattgacaatttgatttgtcacactataaatcgtactattaagcgtgctttaaacaatgcttcaaaaggaaagatcatgtccaacctgacagcgaacgaccttaaaaccaaaggcatcgcagccatcgaatccgtgctggccgaatgcaccgaagcaaccgtttcggtgcgtggcaaggatcgtttcgtggtgatggatattgcgcggtatcactatctgcgcgagtgcgaactcgaagccgcgctggccgaaactcgcgccgacatggcggccgggcgttttgtgcaggaatcgccagaggcgcatctggcacgaatcaaatccgccgcatgagccattgcctgatcttcaccgcgcaatacaacaagcgcgcggcgcgtttcctgaaacggcatcccgaactcgaaaagcagtacctcaaaacactgcaactgctggaactcaatccccatcacccatccctgcgcctgcatcctttgagtggcaaactgcaagccctgcattccgtctcgatcaacctctcctaccgcattacgctggagctgctgatccaggacgagcagatcatcccggtaaacgtgggcgaccacgacgcggtgtattgaggatcgttgcaacgcgtttccggcgagcaataccatttcgccacgctgaccggcaatccgccttttccgtcaatgcccaacgcatagcagagtaaaatcctcacggacaaccagaaaacggagggcgaatggacaagctaaaaataaccgcgcatcttctcgcgccgctcgttaccggcggcggctacatgacgctcgacggcctgctggcggcacttctgttcgaccggcttcatgacgtcgacgctgcccatgcggcaattcctgtccgtcagaccgctggcctgctgcacgccagcgcggcaatcatggagccgattcgcgagcgggtctccttcatcgccgcgcttcggcccacgcacagcatcgaccccgaccacgttcagaagaacaagcacgggcagttgcaccgcaagttcgacacctcgttgaccaatgtcatgaacagctacgccatgctgaccgccccgaccgtcacctggtacgccgaaggcgacgccgaccgcatcggccagttgcttgcaccggtgcaattcatcggcaaacggcgcgccgccgggtttggtcgcgttgcgcaatggcagatcgaaccggacgacctcgacggcatcgaaggcaccttcggcgagccgctgcgcccagtgccggtcgacatgttcaagggcgacaaaacccaccccatcgtcgacgccgcctggcgcccggcctactggaacccgatacacagaacggcgtgttacgcgccaacctgaggaacaacggtgctcgctttcttcaacgacaatttcggccgccatctggtcgaacaaaccgacgatccggtcgccgatgcccggcgcgccctgtcatcggggcaccggatgaaaaagggtggcggcccgcagcgcatcgcatccggctgggccatcattcgccccgcaaaatccaccatgcaatttgaactcgcggcggatggcatcgaatacagcaagcagacacgctacgaagcatttctggccgaactggaaaactgggatggcacgccgcgcatgttcatcgaattcgccaaacgccccgttccggtcggcaatctgttccgcaccttcgatctgcgccaagtgcgcatctgctcgcccagtggcgtcgagacattcgatttcaccaaggcgccggaaaaagacgggtgcaagacacacaaggttctatggaaactcaaaaagggggaaaagtgacggacttcgtactccaaaagccaccgaccgtccgtggctacgccctgcaccgcatggctgccggactggccggtggcgacccggtactgtttgccgattgcggcgaccacttgcggttgcgtaccgacaaaccactggcggtggatcggcagccgctgcgcagcgtcagccccggcgacatcgtcggtttcgagctgcgcgcctgtgtcggcaagaagatcaagggcaaacatcgctactttccgaccgccgactggcgcagccggcaccaatggctggcgcggcagggcgagctgcacggattcaccatcgttaccgtgcattgcaccgccgcgatgctggccatcaaggcgggcgaacgacaattcaccgtcgaccagaccgatttcaccggcgttctcaaagtcaccgacgttgaacgcttcaaccaagccgtcgccaatggcatcggcaacaaggccagggctttcggctttggcatgctgctcatttaacgaggtacgccgccgtgaaaaccatcgtcatcaacgcccgcatcgccaccgttgccccgctctccatcaccctgccggtggccgaaggccagcttggcaacaagttcaacaacttccccatcgtcacccgtggccttgacgacgatggcaacaagttgcagaccggctacctgccggccaccacgctgcgcggatttctccgtcgcgccatcgtcaccgaccagatgatgcaggcagcggcggcaggcaaacactacaccctgcaaaaagcctatgccgacctgatcgggcaggatgcggcatcggaatcgaaagacgacatcgacctgctgaaactgcgccagacccgcgaggaaaatgccgtgcttgacctcttcggttccgggctgggcatcaagtcgcgcctgctggtgtcgcacttcatgccgacccacaacgtcctgcccgaagtcatgaccggcgtccgcaaagacctggaagacaccgacgacgtactggacatgctctcgccggccgaccgcgacctttatctcggccgcgccgaagccaacagccggcgcgccgccgcccagaccgtggtcaaaggcctggaaggcaagattcgccgggcacgaaaggccggcgaggaagttggcgaactggagcaagccctgacggaagcacaggcggtggtcgcccgccacgaatccgagatgggcgacatgaccaattcgtcgcgcaccctgaccaattacttcgccctgcctgccgggatcgaactgagcgggcgcctggtcatcgaaaacgcccgcgagcgcgacctgccgatgctggaactggcgctggacgcgctgtcgaagcggccgatactcggcgcgcaaagcgcccgtggttgcggcgaaatcgaaggcatgttcgatgttgcggtcgacggcgttttaacccggaaaatcaaaatcggcggctggcaagcggcgacggttacggacttttcagcggcggcaatggcaaaaactgctgtctgagcagtgggttgcggatagtgagatcaagctacctcgctgttgggtggttactggaactcagcccagcgaaggccttgcgcatctcgggatcaagctacctcgctgttgggtggttactggaacccgcgcgcagatcgacctgaccccaatgtcgatcaagctacctcgctgttgggtggttactggaacttctcggatcgggcaatgattcgatggacggatcaagctacctcgctgttgggtggttactggaactagttctcgacgatgcgctgcgcattggttgatcaagctacctcgctgttgggtggttactggaactgcaccaccatcctcgacttctacaaggtggatcaagccacctcgctgttgtgtggttactggaactaggcgcgcatataggtattgaccagctccgatcaagccaccccgctgttgggtggttactggaacagtcgaccgcgacaggtgtcgtaacggcgaagtcaagccacccggagggtgggtggttcctggaacttgcaatagccgaagccttccagcacggcggaccaagccaccccgttgttgggtggttactggaacaaaaatgcctcaaaatagccgtcagccgccaatcaagccacctgctgttgggtggttactagaacgagtatcacgagaatttcatcgatagcgaagatcaagccaccccgccgtggctactacaaaaagcaaatgtcatgtttcgctcaaccgagcaatcgacttacgcagccattgtcgccaaacacctggctatcgccgatgcgccgctgttactggaaggcgggacgggcatcggcaagacgcgggcgtatctttcggcgctcttccaatccggacggcgggttgccgttgtcctgccgacgcaccagttgatcgatcaattgctggattccggcgatctggcggcaacgcgcgacgcggctacggtggccgcgttccggcccgcgcggatgttcgagcggcgcgccgactatgaagcaggcaaacgcgccgccgacgccgcacaagtcatgttgtgcacggcggccagtgtcatcatcgaccatcgtctggatggcgaatacaacggctcgacgacccgcgactacctgttgttcgacgaggcggatcagctcccggacatggctgccctgcaaagcgatttcgccatcaccagcgccgaactggccgagttgggcattcgcgtaacgaatgttgccgatgcgctgaatgcgatcctggcgaagaagccacgcagcgtggcaccggaaacccgggcggcggcgcgcgtcattctcgacgccatcgtggaaccggcctggtatcagtccgccggcttgaacgacgatggcgacatcgtactgacgcacaagctgcccggccgcctgttgaagaagatcagcaaccggggcaacgtggcttttgtctcggcgaccctgaccgtcggcggtcgcttcaaggatttcatgaacagcatggccatcgaagcatgcagccacctgtcctgcgccatcgaaccggaacggcacggcgcgctcgatttccacatgatcccgctggcggtcgatacaccggaatggctggcggccatcgtccagacggcgcaggaggcggccaagccggtgctgatcgcaaccccgtcgcacgagctttcgtacctgcttggccaacggctgccggacgccattgtcaggacggccgatgaaaccgccacgcaagccgccatacgtgtgcccgccgggggcatcctgattgcggctggcgcctgggcggggctcgataccgcgctgcgctggcgctcaatcattgtaccaagagtaccgttcggacagccgcaggtgatcgatggcgaggtaacgaccagctatttcgatgcacgcaacacggcgacccgccgcttgcgtcaggtcatcgggcgcggcctgcgcacgcccgatgcggtctgtagcgtttatcttctcgacgcccgagccgagaaactcggtggtttcgttccggcacgcttctcggtcgcatggtcggggcgaacctatccggaaggtgcgcggcaagagttggtgctgtcaaaggcggaacgcgacccggcactacgccgcgcggcgctgaaccactacgggcggaagtgcatggctcccggctgtggtttcgtgccgaaagtcgattcgcagctcgatgttcaccacctcgacccgattgccgaggggcaacgggaaacacgaatcgaggatgtggtggttctgtgtgcgaactgccatcgactggcgcactcgacttactgaaaaccttggaggcctaacgcctttgatcgctggcctgttgcggtcgaccgccaaaaaagggcaaatttgcccgatccggaatcgcgcgacggcgcccagcccattacatccggaaacatttgcgtacacatcggcgtcagtcgcttccatcgttcccgcgttatttccatcatgaaccacgatgagataacgtcatgtccagcttactgaaaatcgccgcctcgctgg

SEQ ID NO: 388 - DNA, 11880 bp, Artificial Sequence; identical to SEQ ID NO: 220
  Synthetic Oligonucleotide
  misc_feature (1)..(6412): n is a, c, g, or t

SEQ ID NO: 389 - DNA, 11978 bp, Artificial Sequence; identical to SEQ ID NO: 213
  Synthetic Oligonucleotide
  misc_feature (1)..(7485): n is a, c, g, or t

SEQ ID NO: 390 - DNA, 12057 bp, Artificial Sequence; identical to SEQ ID NO: 208
  Synthetic Oligonucleotide
  misc_feature (1)..(7236): n is a, c, g, or t

SEQ ID NO: 391 - DNA, 11870 bp, Artificial Sequence; identical to SEQ ID NO: 221
  Synthetic Oligonucleotide
  misc_feature (1)..(7192): n is a, c, g, or t

SEQ ID NO: 392 - DNA, 11736 bp, Artificial Sequence; identical to SEQ ID NO: 240
  Synthetic Oligonucleotide
  misc_feature (1)..(6987): n is a, c, g, or t

SEQ ID NO: 393 - DNA, 13905 bp, Artificial Sequence; identical to SEQ ID NO: 126
  Synthetic Oligonucleotide

SEQ ID NO: 394 - DNA, 13932 bp, Artificial Sequence; identical to SEQ ID NO: 125
  Synthetic Oligonucleotide

SEQ ID NO: 395 - DNA, 12334 bp, Artificial Sequence; identical to SEQ ID NO: 192
  Synthetic Oligonucleotide
  misc_feature (1)..(6076): n is a, c, g, or t

SEQ ID NO: 396 - DNA, 24266 bp, Artificial Sequence; identical to SEQ ID NO: 26
  Synthetic Oligonucleotide
  misc_feature (1)..(3261): n is a, c, g, or t

SEQ ID NO: 397 - DNA, 13935 bp, Artificial Sequence; identical to SEQ ID NO: 7
  Synthetic Oligonucleotide
  misc_feature (1)..(5681): n is a, c, g, or t

SEQ ID NO: 398 - DNA, 31673 bp, Artificial Sequence; identical to SEQ ID NO: 9
  Synthetic Oligonucleotide

SEQ ID NO: 399 - DNA, 18179 bp, Artificial Sequence; identical to SEQ ID NO: 54
  Synthetic Oligonucleotide
  misc_feature (1)..(3632): n is a, c, g, or t

SEQ ID NO: 400 - DNA, 11983 bp, Artificial Sequence; identical to SEQ ID NO: 212
  Synthetic Oligonucleotide
  misc_feature (1)..(6235): n is a, c, g, or t

SEQ ID NO: 401 - DNA, 31646 bp, Artificial Sequence; identical to SEQ ID NO: 10
  Synthetic Oligonucleotide

SEQ ID NO: 402 - DNA, 11860 bp, Artificial Sequence; identical to SEQ ID NO: 224
  Synthetic Oligonucleotide
  misc_feature (1)..(7154): n is a, c, g, or t

SEQ ID NO: 403 - DNA, 13788 bp, Artificial Sequence; identical to SEQ ID NO: 138
  Synthetic Oligonucleotide
  misc_feature (1)..(3769): n is a, c, g, or t

SEQ ID NO: 404 - DNA, 11910 bp, Artificial Sequence; identical to SEQ ID NO: 219
  Synthetic Oligonucleotide
  misc_feature (1)..(7940): n is a, c, g, or t

SEQ ID NO: 405 - DNA, 11966 bp, Artificial Sequence; identical to SEQ ID NO: 214
  Synthetic Oligonucleotide
  misc_feature (1)..(5264): n is a, c, g, or t

SEQ ID NO: 406 - DNA, 20 bp, Artificial Sequence
  Synthetic Oligonucleotide
  misc_feature (1)..(1): n is a, c, g, or t
  misc_feature (3)..(3): n is a, c, g, or t
  misc_feature (7)..(8): n is a, c, g, or t
  misc_feature (12)..(12): n is a, c, g, or t
  misc_feature (16)..(16): n is a, c, g, or t
  misc_feature (20)..(20): n is a, c, g, or t
ndnhdsnndvbnhhdnbccn

SEQ ID NO: 407 - DNA, 20 bp, Artificial Sequence
  Synthetic Oligonucleotide
ctgctctgtgtgtatttcct

SEQ ID NO: 408 - DNA, 20 bp, Artificial Sequence
  Synthetic Oligonucleotide
gagatgttagccacagcccc

SEQ ID NO: 409 - DNA, 20 bp, Artificial Sequence
  Synthetic Oligonucleotide
cattagatacgacaatgccc

SEQ ID NO: 410 - DNA, 20 bp, Artificial Sequence
  Synthetic Oligonucleotide
tgtcagcaagtgaattgcca

SEQ ID NO: 411 - DNA, 20 bp, Artificial Sequence
  Synthetic Oligonucleotide
aaatgcgtgattcaacgccg

SEQ ID NO: 412 - DNA, 20 bp, Artificial Sequence
  Synthetic Oligonucleotide
cgctacacaccgctgaccca

SEQ ID NO: 413 - protein, 4 aa, Artificial Sequence
  Synthetic Peptide
GGGS

SEQ ID NO: 414 - protein, 5 aa, Artificial Sequence
  Synthetic Peptide
GGGGS

SEQ ID NO: 415 - protein, 9 aa, Artificial Sequence
  Synthetic Peptide
GGSGGSGGS

SEQ ID NO: 416 - protein, 15 aa, Artificial Sequence
  Synthetic Peptide
GGGGSGGGGSGGGGS

SEQ ID NO: 417 - protein, 10 aa, Artificial Sequence
  Synthetic Peptide
GGGGSGGGGS

SEQ ID NO: 418 - protein, 20 aa, Artificial Sequence
  Synthetic Peptide
GGGGSGGGGSGGGGSGGGGS

SEQ ID NO: 419 - protein, 25 aa, Artificial Sequence
  Synthetic Peptide
GGGGSGGGGSGGGGSGGGGSGGGGS

SEQ ID NO: 420 - protein, 30 aa, Artificial Sequence
  Synthetic Peptide
GGGGSGGGGSGGGGSGGGGSGGGGSGGGGS

SEQ ID NO: 421 - protein, 35 aa, Artificial Sequence
  Synthetic Peptide
GGGGSGGGGSGGGGSGGGGSGGGGSGGGGSGGGGS

SEQ ID NO: 422 - protein, 40 aa, Artificial Sequence
  Synthetic Peptide
GGGGSGGGGSGGGGSGGGGSGGGGSGGGGSGGGGSGGGGS

SEQ ID NO: 423 - protein, 45 aa, Artificial Sequence
  Synthetic Peptide
GGGGSGGGGSGGGGSGGGGSGGGGSGGGGSGGGGSGGGGSGGGGS

SEQ ID NO: 424 - protein, 50 aa, Artificial Sequence
  Synthetic Peptide
GGGGSGGGGSGGGGSGGGGSGGGGSGGGGSGGGGSGGGGSGGGGSGGGGS

SEQ ID NO: 425 - protein, 55 aa, Artificial Sequence
  Synthetic Peptide
GGGGSGGGGSGGGGSGGGGSGGGGSGGGGSGGGGSGGGGSGGGGSGGGGSGGGGS

SEQ ID NO: 426 - protein, 60 aa, Artificial Sequence
  Synthetic Peptide
GGGGSGGGGSGGGGSGGGGSGGGGSGGGGSGGGGSGGGGSGGGGSGGGGSGGGGSGGGGS

SEQ ID NO: 427 - protein, 32 aa, Artificial Sequence
  Synthetic Peptide
LEPGEKPYKCPECGKSFSQSGALTRHQRTHTR

SEQ ID NO: 428 - protein, 32 aa, Artificial Sequence; identical to SEQ ID NO: 427
  Synthetic Peptide

SEQ ID NO: 429 - protein, 32 aa, Artificial Sequence; identical to SEQ ID NO: 427
  Synthetic Peptide

SEQ ID NO: 430 - protein, 20 aa, Artificial Sequence
  Synthetic Peptide
PKKKRKVEASSPKKRKVEAS

SEQ ID NO: 431 - DNA, 9 bp, Artificial Sequence
  Synthetic Oligonucleotide
ggtggtagt

SEQ ID NO: 432 - DNA, 27 bp, Artificial Sequence
  Synthetic Oligonucleotide
ggtggtagtggagggagcggcggttca

SEQ ID NO: 433 - DNA, 72 bp, Artificial Sequence
  Synthetic Oligonucleotide
ggtggaggaggctctggtggaggcggtagcggaggcggagggtcgggtggtagtggagggagcggcggttca

SEQ ID NO: 434 - DNA, 48 bp, Artificial Sequence
  Synthetic Oligonucleotide
tcgggatctgagacgcctgggacctcggaatcggctacgcccgaaagt

SEQ ID NO: 435 - DNA, 192 bp, Artificial Sequence
  Synthetic Oligonucleotide
gtggataacaaatttaacaaagaaatgtgggcggcgtgggaagaaattcgtaacctgccgaacctgaacggctggcagatgaccgcgtttattgcgagcctggtggatgatccgagccagagcgcgaacctgctggcggaagcgaaaaaactgaacgatgcgcaggcgccgaaaaccggcggtggttctggt

SEQ ID NO: 436 - DNA, 108 bp, Artificial Sequence
  Synthetic Oligonucleotide
ggtggttctgccggtggctccggttctggctccagcggtggcagctctggtgcgtccggcacgggtactgcgggtggcactggcagcggttccggtactggctctggc

SEQ ID NO: 437 - protein, 7 aa, Artificial Sequence
  Synthetic Peptide
PKKKRKV

SEQ ID NO: 438 - protein, 16 aa, Artificial Sequence
  Synthetic Peptide
KRPAATKKAGQAKKKK

SEQ ID NO: 439 - protein, 9 aa, Artificial Sequence
  Synthetic Peptide
PAAKRVKLD

SEQ ID NO: 440 - protein, 11 aa, Artificial Sequence
  Synthetic Peptide
RQRRNELKRSP

SEQ ID NO: 441 - protein, 38 aa, Artificial Sequence
  Synthetic Peptide
NQSSNFGPMKGGNFGGRSSGPYGGGGQYFAKPRNQGGY

SEQ ID NO: 442 - protein, 42 aa, Artificial Sequence
  Synthetic Peptide
RMRIZFKNKGKDTAELRRRRVEVSVELRKAKKDEQILKRRNV

SEQ ID NO: 443 - protein, 8 aa, Artificial Sequence
  Synthetic Peptide
VSRKRPRP

SEQ ID NO: 444 - protein, 8 aa, Artificial Sequence
  Synthetic Peptide
PPKKARED

SEQ ID NO: 445 - protein, 8 aa, Artificial Sequence
  Synthetic Peptide
PQPKKKPL

SEQ ID NO: 446 - protein, 12 aa, Artificial Sequence
  Synthetic Peptide
SALIKKKKKMAP

SEQ ID NO: 447 - protein, 5 aa, Artificial Sequence
  Synthetic Peptide
DRLRR

SEQ ID NO: 448 - protein, 7 aa, Artificial Sequence
  Synthetic Peptide
PKQKKRK

SEQ ID NO: 449 - protein, 10 aa, Artificial Sequence
  Synthetic Peptide
RKLKKKIKKL

SEQ ID NO: 450 - protein, 10 aa, Artificial Sequence
  Synthetic Peptide
REKKKFLKRR

SEQ ID NO: 451 - protein, 20 aa, Artificial Sequence
  Synthetic Peptide
KRKGDEVDGVDEVAKKKSKK

SEQ ID NO: 452 - protein, 17 aa, Artificial Sequence
  Synthetic Peptide
RKCLQAGMNLEARKTKK

SEQ ID NO: 453 - protein, 107 aa, Homo sapiens
IEVMYPPPYLDNEKSNGTIIHVKGKHLCPSPLFPGPSKPFWVLVVVGGVLACYSLLVTVAFIIFWVRSKRSRLLHSDYMNMTPRRPGPTRKHYQPYAPPRDFAAYRS

SEQ ID NO: 454 - protein, 8 aa, Artificial Sequence
  Synthetic Peptide
IEVMYPPP

SEQ ID NO: 455 - DNA, 36 bp, Artificial Sequence
  Synthetic Oligonucleotide
ggtcaagccaccctgcatctgggtggttactacaac

SEQ ID NO: 456 - DNA, 624 bp, Artificial Sequence
  Synthetic Oligonucleotide
atggacaagatcaaagtaaccgcgcacctgctggccccagttgtcacagggggcggctacatgaccctcgacggtctgctggcggcactcctgttcgatgacctgcaagacgtggacgccgcacacgcggccatcccgattcggcagaccgacggcctgcaccacgccagcgccgccatcatggaggcaagtcgggagcgtatctcgttcattgccgcactgcggcccggccacagcatcgatcctgacctgatccagaagaacaagcacgggcagttgcaccgcaagttcgacacgtccctgaccaacgtattgaacagctacgccctgctgactgcgcccacggtgacgtggtatgccgagggtgatgcggatcacatcgagcggctgatctccccggttcagttcatcggcaagcgccgagcctctgggtttggccgcgtggcgcgctggcaagtcgagcctgatgatctggatggtatcgaaggcccgttcggcgaaccgttgcgacccgtgccggtagggatgttcaagggtgacacgtcgcatcccatcgtcgacgctgcatggcgaccggcctactggaacccgattcaccgcacggcgtgttacgcgcccgtttaa

SEQ ID NO: 457 - DNA, 495 bp, Artificial Sequence
  Synthetic Oligonucleotide
atggactacgcaatgcaaaagccgccaagtgtgcgcggctacgccctgcaccggatcgccgctggcttggctgatggcgagaaggtgctgttcgcggactgtggcgatcacctgctgctgcgtaccagcaagccgctggacgttgatcggcgcaaggttcgcaccatcacggcgggagacatcgtcggctttgaacttcgcgcctgcgtcggcaagaaggtcaagggcaagcaccgctacttccactcgtccgactggcgcagccggcatgactggctggaacgacagggcgaagcgcacggctttgggatcatcacgctgcactgcacgacgcagttgcagaccgtcaaggcaggcgaccgggaattcacggtcgatcagaccgacttcaccggcgttctaaaggtcacggatgccgaacgcttcaacagcgctgtcgccaatggcgtcggcaacaaggccaaggctttcgggtttggcatgttggtcatctaa

SEQ ID NO: 458 - DNA, 1605 bp, Artificial Sequence
  Synthetic Oligonucleotide
atgtttcgttctaccgaacaatcaacctttgcggcaatagtcgccaagcatatggcgagtagtgatgcccctctgctgttggaagggggagtcggcatcggcaagacccgcgcctatatgtcagcgctggttcaatccgggcaacgggtcgctgtcgtcctgccgacgcatcagttgatcgaccagttgctcgcatcgtccgatctgggggcgacgcgcggcaccgctacgctggcggcgtttcggcctgcccgaatgtttgaacgccgggccgactacgaggccaacaagcgcgcggcgactgacgcacaactgatgttctgtaccgccgccagcgtcatcattgaccatcgcttgggcggcgagtacaacggttccaccacccgcgcctacatcgtgttcgatgaggctgaccaactgccggacatggcggcactgcaaagcgacttcaccatcacgcagacagaactggctgacatgggtatccgcctgacgaccgtcgaggatgcgttgcaggcgattctggcgaaaccgccacgcatcgtagaaccggaaaccaaggccgcagcgcagatcatcctcgatgccatcgaggaaccggcgtggtatcagtccgcaggcatcagcgacgacggcgacatcatgctgacgcacaagctgcccggccgcctgctgaagaagatcagcaaccgcagcaacgtggcgttcgtctcggccaccctgacggtcggcggtcgcttcaaggattttcagaactcgatgggcatcgagaagatcagccacctgtcgtccgcgattgaaccgcggcagcatggttcgctggatctccacatgatcccgatggcggtcgatacgccggaatggatcagcgcagtcgtacaagtggcgaacgatgcgccgaagcccgtgctggtggcaactccatcgcatgacctatccagcctgctcggcggacgtctgccgggggctgtcgtcaggtctgtcgaggaaacggcggctcaggctggcgacagggtgagcgccgctggcatcctgatttctgccggggcatgggcagggctggatacaccgctgcgctggcgctcgattgtcgtgccgcgcgtgccgttcggtcagccggtcgtgattgacgggcaagccacgaccacctatttcgatgcgcgcaacaccgccgtgcgccgcttgcgtcaagtcatcgggcgcggactgaggacaccggatgcagtgtgcagcgtgtacatcttggatgccagagcggagaaactaagcggcttcgtaccggagcgcttttctaacgagtgggctactcggacatatatcgaaggggcgaaaaaggaggtcgtactgtccaaggctgaacgcgaccccgcagttcgtcgggcggcgctgaatcactacggacggaagtgcatggcctgcggcttcatgccgaaggtcgattcacagcttgacgtgcatcaccttgaccccatcgccgaggggcagcggcgtaccaagatcgaagacgtggtggtgctgtgcgcgaactgccaccgactggcgcacgcgaccaatccgccgacacggctggatgttacggagacagggcagccgcttccttgctga

SEQ ID NO: 459 - DNA, 35 bp, Artificial Sequence
  Synthetic Oligonucleotide
atcaagccaccctctaaatgggtggttactagaac

SEQ ID NO: 460 - DNA, 465 bp, Artificial Sequence
  Synthetic Oligonucleotide
atggatcacacaatcacaaaaccagcgcgcgtcgaaggctacgccgtccaccgtatggtcgccgctttggtagacgacgcacccgcgctgcatctcgatgccggcgacaccctaaccattcgcaccgatgcgcccctgcccagtgggcatattgtgggcttctcgttgcgtgcctgtgtctctgtcaagaacaaggggcggcaccgctatttccccagtgctgactggcgctctcgccacagttggctcgagcgaaaaggcgtacagcatggcttcgaagtcatcaccgtgcattgctctgccaaacacttggtcatcgaaaaacaatctggccaattcagtgttgatgacaccttgtttacgggtgtcctcaaagttgtcgattacgacaagtacaacgccgcgctgctatcgggcatcggcaacacggcacgcgccttcgggttcggcatgttagttatttaa

SEQ ID NO: 461 - DNA, 981 bp, Artificial Sequence
  Synthetic Oligonucleotide
atgccaaagcaaaccatcgttatcgacaccgttatcaccacacaaggcccgctgtctatcgccatgcccgtcgcacagggcacacgggcaaacgactacaacaactttccattgatggcccgtgggcaggatgaactgggcgccgtattgcaaacagcctacctgcccgctagtacggtgcgtgggttccttcgccgtgcggctggcattgccgcgatggaaaagcgcggcgtaggcaacaccacattgcagcaagcgtattccgatattttggggcagtctaaagacgccaaagaaacggtggacttggtccagctgtctgccatacgcgaggcagaccccatactcgacctctttggttcgtggtctatcaagtcgcgcttactggtgagtaacttcttgcccacaaccaacgtgttgccacaggccatcacgggtgtcagaaaagacttagaagacaccgaaggcgtgttgaccctcttgagtgagaccgaccaacaggcctattacaaccgcagtgacatcaacagccagcgcgcagccgctgacgcagtcgtcaagggcctcactcgtgacatcagaaaagccaaaaaagacggcaacgcactcactgacctagaggcggcgcttgtgatcgccgacgcgaaggccgtggccttaaaaacggatatgggcgagatggcgaactcatcacgcaccatcaccgagttttttgccttgcccgctaacatggccttgcacggacgcatcgtggttgagcaagccaaggagcgtgaccttgcattgatcgtggaggcgctagacaccctgtctattcgccccatgttgggcgcccaagtagcgcgcggctgtggcgaggtggcggggcagttcaccatcaaggtggatggcatcgtggtcaagacagtcaccacgggcggctgggtgcctgcgcaggtcgaagacttctcgtctgatgcgcctgcaccagccgctgtctaa

SEQ ID NO: 462 - DNA, 618 bp, Artificial Sequence
  Synthetic Oligonucleotide
gtggaccagttacgaatcaccgcccacctcagcggcccccttgtgacggggggcggctacctcacctttgatgcgttgctcgcctctgccacttacagcttgacgcaagacattgagcaggcccacaaccagctgccacttaaacaagttgccggcctgtaccacgccagcgccgccatttatgaacccgttgccatcggggcattggctattgtgcaagccatgcgtcccgacgacctgtggcttgaccaccagtggttaaagaagaacaagcgcggcgctgtgcacaccaagttcgacaacctatccgacaacatactgaccacctacaagaccatagcggcaccgaccatgacctggtactgcgaaggtgatgcagaccgcattcgtgtcttactagcgcatctacccctcattggtaaaaagcgggtttgctccgtgacccagtggaccgttgaggcgggcgagcttgacggtctgcatggctatgccgatgagccactgcggcctgtacccgttgagctgtgggatggtgacaagagcagccccatcgtggacgcggcatggcgtcccgcttattgggatgcgactgggcgcaccgcttgttttgtgaactga

SEQ ID NO: 463 - DNA, 1506 bp, Artificial Sequence
  Synthetic Oligonucleotide
atgtttcgttcctcagagcagcagcatttctgcaatgtgcttattaagcatttgaaacgcgtcgatgcgcccatattgctggaaggcggggtgggtcttgggaagacgcgtgcctacctggccgcactggcaactacgacgcaaacggttgccattgtgttacccacacaccaactgattgaccagttgctggctagcgctgacttgtcagccgttgccttgccattggccgtgttcaggccagccagtcggtttgacacacgggaggcgtaccaagcgcagcgagaggcggcccgtgctgcgcgtgtcatgctctgcaccgctgcaagcgtgattattgaccaacgccttgcgggggcttacaacggcgcaacacagcgtgatgtggtgttatttgatgaagccgaccagttacccgatatggcggcattgcagagcgactttgtgattgaggcggcgctactgcagggccagccgctgcacgcggccttagagcgcataagcaccacccgttcacagtcggttgaggccgagcaaaaggctgctgcgcgggtcatgcttgagatattggccgaaccggtgggctacgcatccgtcgggcttgatgatgatggcaatgcgcggctacaccacgccctgccaggtcgcttattaaagaaaattagcaatcgcggtagcacggtgtttctttctgcaacgctgacccacaacgataagtttgatgacttcaagatcgccatgggcctagacgcggtgagtagcctgtcaacaagcattgagccagaacagcatggcacgctcgacttcaccgtacacgcgcacgaggtggacacgcctgactggtttgcggccaccgttcagtgcatacaaagcgcgcagcgccccacgttggtggtcacacctagccatgacctcacagagcggctacaaaccgccgtgggtgagcaagcagacttgcttatacgtgcgggtgcatgggcgggtcttgacacgccaacgcgctggcgtaccgtggttattccgcgcgtgccatttggcgcaccagtcattgttgacggggtggcggtcacgtcttacttggccgccaaggtgacggccagtcggcggatgcgccaagcaattggccgtgggcttagaacacctgaggcggtgtgcacggttgtggttttggatgcgcgggcacacaacttaggtcgctttgtgccagagcgttttgcggcagattggtcgtctcggcaagtgtttgaggagggtgcccgccatgcggtggtgctgtccaaagcggagcgcgaccccgctttggccaaagccgcgctcagacactacggcgctcaatgccaacaagcgggttgttccgtgacagaggcgtgtcagctggacgtgcaccaccttgaccccgtaagcgaaggcgtgcgccgcacaaccttgaaggatgtgaccgtgctgtgtgcaaaccaccaccgacaggcccaccacgacatgaaaatggggctgaacgtgtcgtag

SEQ ID NO: 464 - DNA, 35 bp, Artificial Sequence
  Synthetic Oligonucleotide
atgcagccaccctctcaaggggtggttactacaac

SEQ ID NO: 465 - DNA, 645 bp, Artificial Sequence
  Synthetic Oligonucleotide
atggaaaaactaaccgtaacggcgcatatgaagacaccgttcataacaggtgggggctacatgacctttgacgctttgctcgccggtatcttatttgaccagctgcaagatgttgaagccgcgcacgcctccgtccctatcaaatgcactgacggcttgttccatgcaagcgcggccatgtacgaacccttggatcagtcaagagttgcgttcgttgcaaacatgagagccgaccactctcttgatgcagatctgtttccacggaagaaggacggaacaatgcgcaagatgggccgactaaggcggcgtgactttggcgctgtcatgaatagctacgattcaaaacaagttgattcacttgaatggcatgttgaaggtgattccgaggagatattaaaactaattgagccgatttcttttattggcaaacgcagagcaagtggctttggcgaagttcatcgttggagcattgaatcttctgaactggatggactcatgggctacctgaacgagcctttgcgcccaatacctgttgagcgtttcaagggtaatacaggctcactcaaagtagatgctgcttggcggccggcctattggcatccagccaacagagcgatttgctacgctccggagacacctcaatga

SEQ ID NO: 466 - DNA, 501 bp, Artificial Sequence
  Synthetic Oligonucleotide
atgcttcgtgaatatgaaataaacaaaccggccaatttacgtggataccccttgcatagaatggtggctgaattaacaaagaatgagccaagcctcttcagcgatgaaggtgcgaccatgcttgtgcgaactgaagcaacaattgacttagaaccaaaggctttgaaacagataagccttgggcagctaacggcatttgagctccgcgcatgcgtttctaaaaaacgtaagggcaaacatatttacccgcctagcgacgactggagagtgagacacgaatggctaaagaataaagctaatagcaacgggtttgagatattgaccctgcattcttcatcaaaaatggtgcggatacaggaccaagcacgttccttcaaagttgatcaaactgactttacgggaattttaaaagtcacagatgaagcccaattcagaatggccctagctaaaggaattggctccactgccaagacttttggttttggcatgctagttatttaa

SEQ ID NO: 467 - DNA, 957 bp, Artificial Sequence
  Synthetic Oligonucleotide
atgatcgttattaaagcaagtattaaaactgaagcacccctctcaattgccatgcctgtggcccaaggatcccgagaaaatgcgtacggcaactttccattaatggtacgcggcatagatgaagagggagaaaagcaatacaccggatacctgcctgctacaactattcgaggctttctgagacgaggcatcgtgttggaggaaatgaaagaagcggcggaaaacaatcaacattacaaactgaaccaagcctatgctgaactgattggtcaggatgccgcaagcgaacaagggggcggggatatagacctcgtcgctttaaaggatacgcgtgaaggatcacccatattagatttgtttggctcgggactggggatcaaatcaaggctgcgagtcagtcattttataccctcgcacaatctactgcctgacccgattacaggtacaagaaaagatttagatgataatgaagaagcctttgacctcatagatgcagatgaaaaaagtgagttcttcgagcgatccgaagccaacagcaagcgcgcaagagccgcaagccagctggacggattacagcgacaacgcagggccgctgaacgcaagggcgaagatacaaaggatttagccgaacaagtggctgctgcagaagcgctggtgaagaaatacgaggcggttatgggcgatatgaagaactcgtcacgaacaatcctaacgcattacgccttagccgctggtttagagctagagggtaaattggtcatagagaacccgaaggaacgcgacatcggactgcttgaaacagggttaaatgccttgtcgttattccccattcttggcgcgcactcagcaagagggtgtggcgaaatatcaggtacatttgattttattaaggatggcgcattgtttaaacgaatcacaataggaggctttgaagctgcaagagttgatgacttttag

SEQ ID NO: 468 - DNA, 1626 bp, Artificial Sequence
  Synthetic Oligonucleotide
atgactgttaacttccgatcaaccgaacaagctaatttttcaaagcttctacaggctcacctatctaacccagatgcccctcttcttttggaaggtgcgaccggattgggcaagacgagggcctatctttatccgttgttggaagctgctaacaacggtaagaaaatcgcaatcattcttcccacacgtcaactgattgagcagttgctgaactcagaagacattgacgtatgcaataaagccggcattgagattcaagcgttcatcccgaagcgttactttgaagatgcagatcaatacggcgagcagcgtcaaaaagctttaaatgccccggtgatgctctgcaccagcgcctcagtaatcattgatcaaagactgggcggtgattacaacggcgtcaccaagcgggattacttgttatttgacgaggctgatcagttacctgatgttgcagcgcttcagtctgacgtgacaattaactatcaaacactgggggatctcaacataaagccggtatccgctcagcaagcagcagaagaacttctgaaaaagaaacacgttgagccagaagacagggccaaagctaagattattctagaagcgttagctgagccattttggtttatgtccgccggccttgatgatgaaggcgggattgttctgtatcacaagctacccgggagactccttaaacggatcgctaatcagcgaaatactgcattcgtttctgcaaccctgactattggtaacaagtttgacgacttcacgcgagctatgggaatcagtgaaatcagccgtcattcatcagccgttgagccaaagctgcatggctatttaaccttttcgttgcaccagtcggaggaagttaatagtcccgaatggattcaggcagtgattgatgcaatcgacgaagctcaaaaaccttgccttgttgttacctctagctacgagacagcgactaatcttgttgagctatatccaagctcaattgcgaggaaccaagaagaatcagagacagctagccaagcagctatacgtttagccaatgatgattcaaaagataccctaattgcgacagcggcttgggctggcttggacacgcccgtggtatggaaatctattgttgttccaaagatcccgttctcaaaacctacgattattgatggtcaggttgaaagtcactatatcaatgcaaggaacgcagccatacgacggatgcgccaagttatcgggagaggtttacgaagcccggatgccgaatgcgacatcattatttgtgatcctaggtggcaaaaaatagagtctttcgtccctgatagattcaaacaaaactggtccaacaaaaccttcagcgaaggcgatcggtatgaactgactctttcggcagttgaaagaaatccatctgttaggaggaatgcaattaagcattatggcttgaagtgttatgcctgtgacctcacgcccaaaacatcaaatcaaatagacgttcaccatcttgacccgattgctgaagggcaacgacagacaataatggaagatgtgataccgctttgtgcgaattgtcatcgcttggcacactccgagcgaccgcctctaacaatagaggaaatcaagagcgtactataa

SEQ ID NO: 469 - DNA, 35 bp, Artificial Sequence
  Synthetic Oligonucleotide
ctgaagctaccctcgttttgggtggttactgaaac

SEQ ID NO: 470 - DNA, 642 bp, Artificial Sequence
  Synthetic Oligonucleotide
atgcagtgtgtagaaataaaagcaattctcaaaacgccaattattctaggcggaggttatctgacgctagatgcccttttagcatctcttatctttgagaaatgtggcgatgttgaggtagcccataccacggttccaattaagcaaaccaacggactttttcacgctagcgctgcactgctagaaccaatttcaagaagttctgtctcatttgttgccagtctcagagcagagcatgacctcaaccctgatttgctaaaaaaaagagcgggagctctaaaaaaaataaagcggttacgacggagtgattttggcaacgttttaaatacttatgggtctcttcaagccgctcatatatcatggttcgctgagggcgataaagatgaaattagccagcttcttcaggacgtgaagtttattggaaagcgtcgcgccagtggatttggcgaaattgaaacttgggttatcgaggacagcgacatagacggtgttgtcgggccgtttgatgaacctctgcggccagttccagttgaaatgttcattggtgatcagtcttctctgaaagtagatgccgcttggaaaccagcttattggaaccctgaaaacagagcgatctgttatgcgccggagctgatttcatga

SEQ ID NO: 471 - DNA, 504 bp, Artificial Sequence
  Synthetic Oligonucleotide
atgctgcttgatcacgtaatctctaaaccaaaaaatattggaggctacgggctccaccaactcgttcaagggctaacagatggggaaagccccttatttgtggatatgggcgacaaatttatagttcgcactgtcaaaacaattactgaaactggcacccccccaaggtccgtagcagataaagacgttatcggttttgagttacgagcttgcgtcagtaaaaaactgaaaggcaagcacatatactatcccacttcagattgggctagcagacataattggctaaaacgtcagggcaaaaagcacggttttgaaccactcacgatgaattgtcgctcaaatcttgcaaaaataactgatggaaaaggtcgcaagttcacggttgatcaaactgattttgttggggttctaaaagttttggatgccttggcttttcagaaagctgttggacaaggcgttggttctactgccaaagcctttggttttggaatgttaattatttaa

SEQ ID NO: 472 - DNA, 948 bp, Artificial Sequence
  Synthetic Oligonucleotide
atgggtgacataattataaacggagcaattactctggtgggaccgttatcaatttgtgcgcacaacttagatgactacaacgggtttcccataatgtctcggggcactcctgaggatggcaaactttcaaaaactggatacctgcccgcgaccacaatacgggggaaattgcgtcgcgcttatgtttttgaaaatatgaaagaagctgctgctaaaaatgagcattacccacttagacgtgtttatgcagaactgattgggcaggacccagatagtgaaaaacaggctggtgaaatagacttacttcaaatcaaaaaaacgcgggatgactcaccggtgcttgatttgtttggcagtggtctcagtgtggcaagccgtttgagagtggggcatttttttccaagtatgaatattcttcctgaggaaattggttcgataaggaaagatttggatgaaactgaagaagttgttgaagccctagctccagaagacgtgcaacgtttctttgagcggaaagacctcaccagccgacgttctcaagcagttgcgctagtaacgtcattagaacgaaaaattagagctgttaaaaaaacaagtggcccgacaaatgaacttgaggtggagctcaaagaagctgagggtctagttgaaaaatacaatcaaggcatgggcgacatgcaggttggcgcaaaacagcttcctacctatttcgctctgccacccggattgatattgtcagggcgcattgtgatcgtaaatgcgaaagaccacgatctggccattattgaaaagggtttggattgtatgagcctatcccctgtgcttggagcacaatccgcgcgcggctgtggcgaaatagagggcagttttgatgttcaaatagatggaaaaactgttaaaaaaatcacgataggaggctacaaatcaagcagaattgatgttttttaa

SEQ ID NO: 473 - DNA, 1542 bp, Artificial Sequence
  Synthetic Oligonucleotide
atgtttcgctccaatgaacaagaatatttcaatacactgcttgagcgacatatgtctgttctggatggacctctgttgcttgagggaggcactggtctaggtaaaacccgcgcttatcttgctgcaataaaaggttttcaaggcaaagtcgcaatcgttttgcccacgcaccagcttatagaacaacttatcatttcaagtgatttaaaagcagttggcattgaaattaaagccttccgtccaagaccgatgtttgacacacaggctgactatgatttgcaaaaagatgaggcgtcagcggctgcggttatgatttgcacatctgcaagtgtaataatcgatcaaaggctttctggtggttacaacggagcgacacagcgagactatattctttttgatgaagctgacgctctaccagacgctgctgcattgcagaaagatttggaaatctcagcatttgaaatcaaagatgctggcgtaaaaacctctgtggtcgcaaatgctttggacgacttcattgacaaaaccgccgatgtagagctgaaagcaaaagctcgtataattaaagaagcatcggaaaacccggcttggtaccataccgtggggtctacagaggagggcggcattagcctctttcaccgaatgcctggcttgctactcacccgaattgccaatcagaaaaacgttgccttcatcagtgcgaccttgaaagtcgcaagttcatttgatgacttcaagcgcagcctagggattaaaaaggaaagccgcctttcggatagtatcgaccccaaaatacacggtgatatgcttgtcgagtatccactttctgagaatattgtgactgtaatatctggcgcaccaaaaccttgtctagttgccacgacaagctttcagtcttccgaagagctcgctgcattaatcccaacggctgttttgcgcaccagagatgaaacgcccagtatggctgctttgcgggtctctgaagacggcgttttgatcgcaactagtgcatgggccggtctggatactcccagacgttgggcatcggttgtcgttcccaaagtgcctttcggcaaaccggttgagcaagacggtcacatcgaaagccggtatttggatagtcgtaatgtggcaattcggcgaatgcgtcaggtattaggccgagggcttcgaacacctgacgcgaaatgcacattctacatctgcgactccagatacaaatctcttggaaatttcttacctgataggttttctaaaagctggtgggaggggggtaaaaaaaccattgagctttcaaaatcagaacgctgtccggcaattagaaaggccgcattaaaacattatggatgtttttgccaccgctgcgatcttaggccaaaaaatccgacaattatcgaggttcatcatttatttccaatcgctgatggaacccgtaagacaaaaatagaggatgttatccccctgtgcagaaattgccatgagcttgctcatacagaaaatccaccgatacccatagatcgattgaaaacgactgatttgtag

SEQ ID NO: 474 - DNA, 36 bp, Artificial Sequence
  Synthetic Oligonucleotide
atgcaagctgccctttgtcggggcagctactagaac

SEQ ID NO: 475 - DNA, 627 bp, Artificial Sequence
  Synthetic Oligonucleotide
atgcaggctttcgtgctgcgcgcgcatctgcgcacgcccttaattcagatgggatacaccactctggatgcgctgttgatggcgacacttgagacaggtgatgtcagccacctgctgcgctgtgaaacgggcctttactacgccagtgccggtttcccggtggatggaattgccggccccaatgccgcattcatcgccagcatgcgtccggagcacacccccgagtggttggatgtaattgctcccaatacgatgaagggcgatgtgcaaattggcctcgcccgtcagcgtgaaggcggcaacgtgctgaatagttatcccaccacgactgcgtcagccgtggagtggtatgccaccggggacatggcagcagtgttggaggtcgtcgcccccatcatgttcatcggcaagcgacgtgcttcgggctatggtgaggtagttcgctgggaagctgagcccggggtactggatggcattgttggtcacctgggtgagccgcttcgccccatccccgtcgagcggtggactgagggcggcgattgggtcccggtggaggctgcgtggaggcctccgtactgggaggtgcgcaaccgaaccaagtgctacgtccccgaggtggctctgtga

SEQ ID NO: 476 - DNA, 483 bp, Artificial Sequence
  Synthetic Oligonucleotide
atggacatcctgatcgacaagcctccgcgattgaaaggttatgcgttgcaccgtttggtcgagcagtaccagcaagggcgccccgcactatgggctgacgaagggcaacaactacgcatccgcccgcgtgatgcgcaagctccactctttgaagttagcaagctgctgggctttgcgaccacggcctgtgtggtgcccagtacccacgccaaacacaaatacctgccgctcaacgattggcgcggccggcgtgagtggcttgagaaacaagccggcaagaacggctttgagctggttggggtgcacgtctcaccaggcatgcgccgtattgagacccacgatggccgcagcttcaccatcgatgccacggagttcacgggcattctcaaagtcacagagccagagaggtttgccgcgtgcctggtgaaaggcctgggccgtgtcggcaaagccttcggcttgaacctgcttgtagttcagtaa

SEQ ID NO: 477 - DNA, 978 bp, Artificial Sequence
  Synthetic Oligonucleotide
atgactaaccgcatcatcggcaccgtgagcctagccaccgtgcagcccatcgccttcacccatcatggcattgagggccagccactcatgacgcgaggcgttgatgccgaagggcgccccttgcgtaccgtttttctaccggcctctcagctccggggccgcattcgacatgaggctgcaatggccgcactgcacagcaagggtgcgcctgtgaagcttgaagaggcctatctcgctgcgctagggcaggatctgcgccccgaagaagatcgggccgaagaactcgttcgtttgcgtgagcagcaggtgctgcgtgaagctcagcccctgctcgatttgtttggaacctggaaggttgccagtcgcttgaaggtcggccatttgctgcccgatgtcaatgtcgctcccgatagtttcagcatcatccgccgcgacctcgactccaatgaagaactgatgaacttgctgccagacgaagagcaagaccgcttttatgcccgccaggatagtcagtccatggcctccaaggtggacggcatgatcaaggtggccgagcgcgaactgcgtgccgccaagaaggccaagaacgaggctcttactgctgagttgacacagaagctggaagaactgaagaccgccaagcagtctcacaagggtgatgatgaatcctccaattccaagcacttgctcagcgtcgaagccatccctgcaggggtcaatctgagtggacgctgggtcatcgagcgagcccgtccgcgcgatctggacgtgatcgttgctgccttcgacgggcccagccggcgccctgtcatgggtgcagccacagcccgtggctgcggcgaggtttccggggcggttgtgttctctgactctgagggcgaagtcctgcttcgcatcaagtttggccagtacaccccggccatcgttgagtggacagtgtcgggcaaggccttcatgaccccagcccaggccgcatga

SEQ ID NO: 478 - DNA, 1596 bp, Artificial Sequence
  Synthetic Oligonucleotide
atgatctatcgcagcaaggagcaggccgcttatgcgaagctgattgcaggcgcgctgcgccccggctcccctttgctggctggcggtgcggctggcctgggcaaagctcatggctacagcatcccgcttctggcatcgggcctgcgtgttgccattgccctgtccacgcgccagctcattgatcagttcgtgagcagtgatgcccttgccgaggcgaataggggccggcaaagagtggtcatggccctcaagacgcgggcccatttcgagaccgctgctgactatcaagcccaccgagcccaggctttggcggcagatgtcctcgtcctgacgcatgcggctgccttgatcgacagctggatccccggttatgccgagctgcggcagcgcgacgtggtgctgtttgatgaagctgatctactggccgatgcggcagaccttcggggcagcttcaccatcccggaagatcaactgcgtggacgtgactgtgagcccagggaagccgccacctatgtgatgcagcacaccgatgacccggaaatcaaggctgcggcgtcagcgattttgtatgcccttgatcaccccacgccttacaaggtcgtgggtcgagatcttgagggcaacctggtcctcaagcaccgcatgcccgggcgcatgctcaagcccctggtgcgcgatgtggccagctgcatcttcaccagtggcacgttgatggtcaatggccgttttgactactttgtgcgggccttgggtctgtcgggcatcgacccagcctcgcgccacattgatcccctgactcatggggacctgaacatcatctgtgccgagagcgagatgagcccggagcaaaaggcggcgcagatttcgcaggctgcgcgccccgcgcttgtgctcacttcaagccacgaggatacccaggcgctggggggtaacttgcccctggccacggtccgcatgccgggtgaggcactgctggacgctctggagcgatgccctgacgatggcatcctgattgcggcaggtgcatggtcgggccttgacagtccacgccttcgctggtggtccgtcatcatccccaaggcgccatacggccccccagtcgaagtggatggacagcaacttacccattacctagacagtcgcgtggtcgccgtgcggcgcatctgccaggggctgcatcgcggtttgcgcaccccggatgcccattgcacgctgatccttcaagatcctcgctgtcgtcggcccgagctgatggaagccatcccttcaaggttcaagggagcgctgatcagtgccatggaaggcgaagttgaggcggccctgcgcaatgagcgtgagcgacatagacccttcaggaccctggcgctcaagcactatggatgccagtgcatgtggcatgagggctgcgatgtcaaagcgccttatttgctggatgtgcatcaccgcgatcccgtctcagaaggggtgcgccgcaccgctctgcaagacctgatggttctttgtaaaaaccaccatgctgaagcccatcagcagatgcggctactcattttcaatggaggagattcaacaaaaattgatgatggatcaatgatttag

SEQ ID NO: 479 - DNA, 36 bp, Artificial Sequence
  Synthetic Oligonucleotide
gttgtggcccccattaatttgtggggcaactgaaac

SEQ ID NO: 480 - DNA, 651 bp, Artificial Sequence
  Synthetic Oligonucleotide
atgtttgaacaagtgaaaattgaggcaacccttcgtactccgattattattcaggggtatatgacatttgatgcgctattaggtgcattactgtttgagcggctacaggatgtcgacaaaacgcactccagcattccaattcaatgtgatgatgggctgttttatgcttctgcagctcaggttgaagtcattgatcgtggtggtttggcaattgctgctaatctgagggcccagcatgacttgaacccaaatcatgtaaagaaaagtcgtgatggctcaaaactgcacaaaagtttaggattgaagcgccgtagacagtttggagcagttctaaataaatacagaacaatcactgtaaattctatcagttgggatgtgactggcgatattaaccagattgaagacttgcttaatgatgctttttttatcggcaaaaaaagaacagcaggttatggtgaagttataagttgggacttcaagaacagtgaaacagacggtctcatagatgcgcaaggacaggcactaaggcctattccggtagaacgttttaatggtgataagtctttgccaataattgataccgcttggaagcctgcttattggaatcctgagaacaggtcagcctgttatgctcctgagcctgtctcatga

SEQ ID NO: 481 - DNA, 513 bp, Artificial Sequence
  Synthetic Oligonucleotide
atgctgtttgattataaaatattaaaatctgatgcaaaaaatgcctatgacttgcatcagcttgtcgctgccacctttaagggtgagagtggcagaaatttgttctgtgattacggcgaccacatacgtgtgcggagcacaaagcacactctaaatgcgaaacaaggtgtcgccgttactgtgcctgccgtcggcgcaatagctttcattgaattgcgagcatcctgttatgtgtctgggggaggaaaaaaatatttcctgatgcaaggtgattggagagccaggcatacctggcttgaaaaaaagagcgcccaaagtggcttttcggttttaaatgtaacctgtcaatcagaactgatgaaaatcccaaagccaggtgcacagttcacgcttgattgcaccgactttgctgcatgcatcaagatcaatgacatagaaaaattcgaaactgccttgcgcgatggaattggatcgaaaggcagagcgtttggttttggaatgcttgttttatga

SEQ ID NO: 482 - DNA, 960 bp, Artificial Sequence
  Synthetic Oligonucleotide
atggtaaatacgatctttaatatggttctaacatctgagcagcctttgagtatcacgctacccgtggccgagtacactcgggcaaataaatttgctaactctccagttatgacccgagggctcgacgcggaaggtgcgaagcaagaaacatgttacattcctgctacgacttttcgcggaatgctcaggcgtcatgtggttgtcccgctgatggaggagcgagccagaaacggtgatcactatactttggatgaagcctaccgtgatttgattgggcaggatgctgccagcgaacaacagccagatgaaattgatctgatggctttaaaaaatatgcgtgcacaaaatccaattgtcgatttgtttggtctcggtttgggtgttcaatcacgcctaaaagtcagtcactttcttccagagcataatattttgccagaggtatttaccaccgctcgaaaggacttaggcgatgcagacgatggtgcaatactggacttggttcgcgatgaagagagagaaaaatatctcaaaagagccaacgcaaattcaaagagatctgctgcagaaagccttctggcgcggctggtgaagcagaagaaaaaggacggttcatcagcagacttggatgctcaaatagttgcgacagaaagtaaggttgaagagtaccgtgatgcgatggatggcatgaccaattcttctcggaccatacttacgcattacgccatgcctgcgggtgtacagtggacgggacgtttaattattacaaactccactgaaaaagatatcgatgctctgtgtggagccttagatcgtttcagtagctatccgatgattggtgcccagcatgcccgtggatgcggtgagattagtggtattgctaatatagaaacagatagaaggctggttaaaagaattagttttggtggctttgcgccagcacaaatagacaacgtagcctag

SEQ ID NO: 483 - DNA, 1683 bp, Artificial Sequence
  Synthetic Oligonucleotide
atgatcagaatttttagatcggaagagcaagatcagttttttaagctgatccaaaaacatatagaaacccctgatgcacctttactgctggaaggagccactggactgggtaaaacgctgccgttccttgttgccgcagcggtaagtggtaaaaaggttgcgatagttttcccaacccatcagctgatcaatcaggctttggatagctgggacttaaaagcaacacttgcggcctatcccgcagtgattgtgaaggcctttagacctaggtcatatttcgaagcctcacctgcagattacgcggcacacaaacaagaagcgttagacgcagacataatgttctgcacctcggtatccgtgatcatagaccaaagactcaatggcgattataatggctcaacagacagagatgtgattatctttgatgaggcagatcagcttcctcaatttgctgctttgacctctgatatttcactcagcagaattgatctaagaagcctcagaattaatgaatcttcgccaaaagagaccattgatgcaatcttcaaaaagaagacattgccgtcagaaatcagggcaaaggcgcgcttgatagaagaagcgttaggccttggcgatgtttggtttattaaggtgggttttgcggatgatggagccttagaggtgcgctcacgcttgcctggaaggctgttaaaacgcgtatccaaccgagcatcgacaatttttataagcgcaaccctgtctgtaaatggtacatttaaagacttttgtcgtgcgatgggaatagaagagaagagtagactgtctgcaatagttgagcccaagaaacatggggacctacaatttgattttataactgatgaagagcttggaagcgatgcttggctggacgcagtttgtgaagcaattgaatatgccgatcatcctgtactggtcgctacaccgtcgcattctttagctcaacagattgcaagtaatgctactcaggcgaccttaagagccgcggatgaaacaacgtcgcaagctgctgcgcgtatgggagatacaaaggttctcatagcagcgggtgcatgggcagggcttgatacgccggtacaatggaaaacggttgtggtacctagaataccctacactgggccaaacaatctcagagagttttggtatgatgatgaagaggactttggcgtccagaagccagatccgatgtcatcttttatagattcaaaaaatgctgcggctcgtaggctgaagcaggtctttggcagaggcttaagaacacccgatgccgaatgctcaataatactttgcgacccgcgaattgatcgttttaataagattgcaccagccagatttcagaaaacgtattttgagggaatggccatttcagttaatgcaacaaaatctgaacgttcgcctctgcttagaaaagcagcactcgctcattatggtgaaacctgcatggcctgtgactttattcctgagtctttaaggcaattagaaatccaccatcttgagccccttgctgatcgtgggccaagccacacgaccctgaatgacgtcgtggtattgtgcagaaactgccacggtttggcacatgacactaatccgcccatacagttgccagagcttaaattacgatctcaaaagttgaaaaagaaaagacctggattgtccatgatttaa

SEQ ID NO: 484 - DNA, 36 bp, Artificial Sequence
  Synthetic Oligonucleotide
gatcaagccgcctgttagatgggcggttactggaac

SEQ ID NO: 485 - DNA, 669 bp, Artificial Sequence
  Synthetic Oligonucleotide
atggttcctttcacattgagggcacggctggcagcgcccatcatccggcgtgggttcggcaccttggatgccctactgatggctgtgcttggtcgtggggacgtttccgacctgctccagtgtgaacaggagttgtacttcgcaagtgccgggatcatggccgtcgggggcgcagcacaacccgcctcatttgtggccagcatgcggcctgagcacacacctgagtggcttgacgtcgtggcgcccaacaccgtcaataccgatctgtccatcccggatggtgccaaggggcgtgcccgttacaacgacctgaggatcggcctgtccaggcagcgcgagtgcggcaacgtcatcagcagttacaccgccgtttccggtggttccgtcgagtggtacgccacgggtgatgcccaagctgtgctcgatgtcgtcaagcacgtgccattcataggcaaacgccgtgccgcaggctatggagaggtggaaggctgggaggttgaggagggcgtgcttgacggggtctgcgggttcctgggggaacctttacggccagttcctgtttcgcgctgggtccatggcggtgactggataccagttgaagccgcctggaaggccccgtattgggacgtccgtaaccgagcgaagtgcttcgtgcccgagatcgcatga

SEQ ID NO: 486 - DNA, 486 bp, Artificial Sequence
  Synthetic Oligonucleotide
gtggtggacctcctgatcaacaaacctgcaagcgttcgcggctacgccctgcaccgtctggttgcagagtacctccaaggccgccctgcactgtgggcggatgaaggtggccaagtccgaatacgaccgcgagacgccacgcctcctgcgtacgtcgccggcaccctgctggggttcaccgtccgcgcctgcgtttcacacagcaccaaaaaccgccaccactatctgcctgtgggcgactggcggcggcgccgcacatggctggaggccaaagctgcgccgaatgggttcgaggtcgttgctgttcatgtcagtggtgatatggcactgatcgaggcacatgacggacgccgtttcacggtggacgcaaccgatttcactggcctgctgcgcgtgacagacccgcaagccttttctcgatgtcttgttacaggggtgggcaaggttggcaaggcgttcggcctgggcctgctcatcgtgcagtga

SEQ ID NO: 487 - DNA, 978 bp, Artificial Sequence
  Synthetic Oligonucleotide
atgaatccggcattcatcctggccgatgtgctcatccatacggcccagccgctgacctacacccatcacagcgtcaaggatttgccgctgatgacccggggcgtcgatgcggaagggcgcccccaacggaccgtgtacctgcctgcaggccaattcagaggccgtttgcgccatgaagccgccatggcggcactgcgcgccaagcctgagaaggtcagacttgaagatgcatatcttttggctcttggccaggacctcgctcggcaagaagaagatgaacccgaggcggtgcgcctgggtgaccagatcaagttccggcaagacaacccgctgctggacctgtttggcacctggaaagttgccagccgcctgtttgtgtcccatctaatgccacaggtcaatgtcatgcccgaccgggtcagccacatcaggcgcgatctcgacagcagcgaggacttgatgggcatgctggcgggtgaagagcaggaccgcatgtatgaccgacaggccaagcaggcactggcctccaaggctgggaccctgatcaagctggcggagggagaactcagggcggtacgaaaggcaaaggacacggcgctcattgatcagcttgaatcgaagctgaaggaacttgaagaactgaagaagcagcacaagggggaagacgactccgacaacaccaagcacctcgtggagttgcaggtaattccggcaggaattgatctgctgggcaagatcaccgtacaagcgccccgacgaacagacatcgggttccttatccaggcacttcagggtgtgagcatgaagcccttgatgggtgcccagcgcgctcgtggctgcggcgaaattcgaggtcgcgcttctttccgtaccccagatggcgaagtgctgacggcagttgagtttggcggctttcagcctgcgaaggtcgactggactgcggagggccaagccttcatggggccagcggcagcctga

SEQ ID NO: 488 - DNA, 1584 bp, Artificial Sequence
  Synthetic Oligonucleotide
gtgaacttccgcagcccagagcaacaggcctatgcccgcctgatcgaaggtgcgctgaagcctggaccacccctgctggccggggcagcaccgggtctgggcaagacacacgggtacaccttgcccttggtggcaagtgggcgccgcattgcggtggccatgagtacccgtcaactcatccagcagtacctgtccagtgatgccatgcgcgctgcacaagcgttgcgtcctgcgagcgtggttgcgcttcaaacccgccgagacttcagcaatgacgcctcccacagagcgcacagggctgcggcgatgcaggctgacgtactggtggtcacccatgcggctgcgctgatcgacagttggcacccaggttacgcagacctgcgttcccgtgacgtggtggtgtttgatgaagcggacctgctggctgacgcagcagacctgcgcagcaccttcagcatcgatgcggaagttcaggaggaatgcggcgctgacaaactggacctgctccaggctgtgcaggcggtaaagcagaaggccaaggcgacggaggatcgtgcagcggcgtcggccatcctctatgcactggagcatccggcttggtacaaggttgtgggccgtgaagaagacggcactttgacgctgaagcacaggatgccggggcgaatgctgcgtcgtttggtcgaggaggcgccgcgttgcatcttcaccagcggaacgctgcaggtgggtggccgtttcgaccacttcgtgcaggcagtcggcttgaagtcgatggcgcccgagagccggcacattgacccggtaaagcatggtgacctgagcgtggaactcgctgctgaagacatgagtccgcagcagatggcgctgcgcatccaggcagcagagcggcctgttctggtactgacgacgagtcatgccaccacacaaaccctaggcgagttgtgcacaggtgcagtctggcgtgcgcagggcgaaacgctcggtgatgcattgaaccgtgtgccagacgatggcatcttcatcgcagcaggtgcttggtcggggttggatgccccgcgcctgcggtggcgtaccgtggtgattccgaagactccctaccagaggccagccatcctggatgggcagcaggtcacgcggtatctggactcacgggtggtggctatccggcgtataactcaaggcctgcaccgaggtctgcgcacgcctgatgcccgctgcactctcctgctgcttgacccgcgcagcggtcgtgacgaacttcgagaagccatacctgcgcgatttcgggtgaattggcagagttttgacgagggctcgccaagaatgcgcgcccatgtggccggtgaaaggcatccctccctgcgtaacgctgccctgaaggcgctgggggcgcattgcagtcaccctggctgtgaagtcacagccgtgcacctcctggacgtccatcacctgaaaccagttgctgaagggcagcgcaaaaccagcttggctgacatcgccgtgctttgcaaaaaccatcacgccgaggcccatcaccagatgcggcaggccgaaattcttgaggtcaaggaggaagaatcctga

SEQ ID NO: 489 - DNA, 36 bp, Artificial Sequence
  Synthetic Oligonucleotide
ggtgaagccaccccggaattgggtggctactgaaac

SEQ ID NO: 490 - DNA, 651 bp, Artificial Sequence
  Synthetic Oligonucleotide
atgcgccgcttccgggtaactgcccacatgaattcccccatcatcttcgggggcggttacgctactcttgacgggctacttggagccctgctttttgatcaactggacgatgtggatgcagcccatgcggcgatcccgctggccaacaccgacggccttttccatgcctcggcggcgttctacgaacccgtcgaggtcggcaagacgaccttcgttgccagcttgcgggcgcaacacgatctggatgccgacctgctcaggaaaaacaagacgggcaccgcgacgcatcgggccatcagcacgaagcgcgagcgcgacttcggcaatgtgttcaatacttatcgccgggtcaccacgccgaagatcgactggtatgccgagggcgaccaagccgccgtgctgcgcctactccaggacgcgcgcttcatcggcaagcgtcgggccagcggatttggcgaagtcgagaggtggaccatcgaagaggacgaactcgacggcattaccggccacctagatgagcccctgcggcccgtgccggtggagctattcaaaggcgaccagagcgcgatcaaggcggacgcggcctggcgacccgcgtactggaaccctgcacatcgggcgatctgtttcgtgccgggagacggccaatga

SEQ ID NO: 491 - DNA, 501 bp, Artificial Sequence
  Synthetic Oligonucleotide
atgcttgaccacgtcataccgaagcccgcccgcgttgccggctacatgctgcaccaactggcggaagccatgaccgacggtgcacggcccctgttcgtggaccgaggcgaccatctcgtcgtgcgtaccgacaaggcgatcacgccaaatccgacccccacgcgcgcagcgcaaaatggagaagtcatcgccttcgaactgcgtgcctgcgtggccaagaagaacaaggggcaccccatctattttcccctcggggattggcgcgcgcgtcacgaatggctcaatcgcaaggcaggacaaagcggcttcgaggtcctggcgcttcgctcaaccaccgcgatggcgaagatcgccaaggcaggccgcacttttaccatcgatcagacagacttcgtcggggtcctgcgcgtcaacgacgtggcgctgttcgagatcgcgatgaccaagggtgtcgggtcggtaggccgcgccttcggttttggcatgctccacatcaactag

SEQ ID NO: 492 - DNA, 996 bp, Artificial Sequence
  Synthetic Oligonucleotide
atgacgacaacgatcatcaacgcgacgatccacaccgtcggtcccttttcgattgcgatgcccgtcgcggaaggcggcaccgccaatgcctacaagaacttcccggtgatgacacggggggtggacgaggatggcaacaagaagctgaccggctacctgccagcaaccacccttcgtggcttcctgcgccgtgccgttgtcctgcgcgacatgaagaaggcggcggcggccagcctgccctacacgttacagcgcgcctataccgaactgatcgggcaggacgccgaaagcgagagggcggaagacgataggatcaacctcgttgaattgcgcaagacgagagaggcttctccggttctcgatcttttcggtagcggattgggcatcaagtcgcgcctgatggtctcgcacttcctgccgatgtccaatgtcttgcctgatgcgttcacgggcgtacgcaaggacttggaagataccgagggcgttctggatatggtcaaggcggacgaagtcgaggcgtacctcggacggtcggaggcgaacagccggcgcgctgccgccgagggcctgctgtcgcaaatgaagcgtaagctgaacgcaaccaaaaggaagggcgagcctaccgccgatctggaagcccaggtttccgtgcttgagacgaaagtcgagggcctgaaggctgagatgggcgatatgcggaacagttcgcgtaggccggttggccactttgcactgcctgccgggatcgatctcaagggacgattggtgatcaatagctcgaaggacatcgaccttgaaatgatcgagcacgccttgaacgaactctccttgaagccggtgttgggcgcgcaatcagcgcgcggttgtggagagataagcggcacgttcgacgtcgtggtggaaggcgtcttgaagaagaggcttgcaatcggcggctacgaacctgcccggagtatcgatttttcctcaacgccagaaggagaaaaggctgcttga

SEQ ID NO: 493 - DNA, 1611 bp, Artificial Sequence
  Synthetic Oligonucleotide
atgttccgatcatccgaacagcaaaacttcgccgcgatggtcgccgcccacatctccaaggccgacggcccgttgctgctcgaaggtggcaccggcatcgggaagacgcgcgcctatctgtcggcgctcatcggctccggcaaacgggtcgcgattgtgttgccgacccaccagctcatcgagcagctgcttgcttccaccgatctcgcagaggccaatgccagaggcatcaccgtcgccgcttttcgaccggcgtcgaagttcgataccagggccgactacttggcgaaccgtgaagtcgcggccagtgcgcaactcatgttgtgcactgccgccagtgtcatcatcgaccgccgtctggacggcaaatacaacggcgcgaccgaacgggattatcttctcttcgatgaggctgaccagttgccggcgatggccgctcttcagtccgacatggaggttaccggcgaggccctcaagacgctggggatcgaaggcgaaacgacccgtaatctggccgacgccgtcgtcgcgtccaagaaggccgagccggaacagcgcgccgccgccaagatgatcctcgaagtcctgggcgagcccgcgtggtttcatgtggcaggcaaggccgacgatggtggcatccgcctctggcatcggctaccggggcggctactgcgcgagatcgccaaccaaccaaacgtcgcctttgtcagcgccaccctgactgtcggaggtctgtttaacgacttcaagtgtgcgctcggcatccagagtgaaagcgagctgtcgggtgtcgtcgaacctgagcgacacggcacggtcgagttccggaccgttgtgtcgcaagccgtggacgccgacggctggctcgaaaaggtggcggcgaccgtcaggcaggcagaggctcccgtgctggtcgtaacgccctcgttcgaccgtgctgagaagattggcgcgctggtggaaggcgcgacggtgcggcagcgcgaggaagccgttggcgacgccatggctcgaatgggcggctcccgaaccctgattggggcagccgcctgggccggcctcgacacgcccatccagtggcggtcaattgtcgtgcctgttgtgcctttcgagcgcctgacggagatcgaagggcaagtcgagagccactacatcgatgcgcgcaacacggccgtgcgacgcctgcgccaggtgatcggtcggggactgcggtcgcccgatgcccgctgcaccgtctacttcctcgatcctcgtgtcttgaagctaccggccttctggcccagccggttttcctcggcctgggtggcccgccctcgcgatccgggtgtcctcgaaggggcgcgaggcgaggtggtcctgtccaaagccgagcgcgacacgtctcttagaaagcgcgcccttgcccactacggtctgcattgtcgggcgtgtggtctggtacccaaggtcgccgcccagatcgaggtacatcacctcgaccccatctcggaaggcatccggcgcacgacgttagcggacctgtgccccctttgtcggaactgtcactcacttgcccactccacgagcccgcctatgccggtcgaggaggttgcgaagatcgtgggggcctag

SEQ ID NO: 494 - protein, 9 aa, Artificial Sequence
  Synthetic Peptide
LAGLIDADG

SEQ ID NO: 495 - DNA, 131951 bp, Artificial Sequence
  Synthetic Oligonucleotide
  misc_feature (1)..(95399): n is a, c, g, or t
nnnnnnnnnnnnnnnnnnnnnnnnnnnnnnnnnnnnnnnnnnnnnnnnnnnnnnnnnnnnnnnnnnnnnnnnnnnnnnnnnnnnnnnnnnnnnnnnnnnnnnnnnnnnnnnnnnnnnnnnnnnnnnnnnnnnnnnnnnnnnnnnnnnnnnnnnnnnnnnnnnnnnnnnnnnnnnnnnnnnnnnnnnnnnnnnnnnnnnnnnnnnnnnnnnnnnnnnnnnnnnnnnnnnnnnnnnnnnnnnnnnnnnnnnnnnnnnnnnnnnnnnnnnnnnnnnnnnnnnnnnnnnnnnnnnnnnnnnnnnnnnnnnnnnnnnnnnnnnnnnnnnnnnnnnnnnnnnnnnnnnnnnnnnnnnnnnnnnnnnnnnnnnnnnnnnnnnnnnnnnnnnnnnnnnnnnnnnnnnnnnnnnnnnnnnnnnnnnnnnnnnnnnnnnnnnnnnnnnnnnnnnnnnnnnnnnnnnnnnnnnnnnnnnnnnnnnnnnnnnnnnnnnnnnnnnnnnnnnnnnnnnnnnnnnnnnnnnnnnnnnnnnnnnnnnnnnnnnnnnnnnnnnnnnnnnnnnnnnnnnnnnnnnnnnnnnnnnnnnnnnnnnnnnnnnnnnnnnnnnnnnnnnnnnnnnnnnnnnnnnnnnnnnnnnnnnnnnnnnnnnnnnnnnnnnnnnnnnnnnnnnnnnnnnnnnnnnnnnnnnnnnnnnnnnnnnnnnnnnnnnnnnnnnnnnnnnnnnnnnnnnnnnnnnnnnnnnnnnnnnnnnnnnnnnnnnnnnnnnnnnnnnnnnnnnnnnnnnnnnnnnnnnnnnnnnnnnnnnnnnnnnnnnnnnnnnnnnnnnnnnnnnnnnnnnnnnnnnnnnnnnnnnnnnnnnnnnnnnnnnnnnnnnnnnnnnnnnnnnnnnnnnnnnnnnnnnnnnnnnnnnnnnnnnnnnnnnnnnnnnnnnnnnnnnnnnnnnnnnnnnnnnnnnnnnnnnnnnnnnnnnnnnnnnnnnnnnnnnnnnnnnnnnnnnnnnnnnnnnnnnnnnnnnnnnnnnnnnnnnnnnnnnnnnnnnnnnnnnnnnnnnnnnnnnnnnnnnnnnnnnnnnnnnnnnnnnnnnnnnnnnnnnnnnnnnnnnnnnnnnnnnnnnnnnnnnnnnnnnnnnnnnnnnnnnnnnnnnnnnnnnnnnnnnnnnnnnnnnnnnnnnnnnnnnnnnnnnnnnnnnnnnnnnnnnnnnnnnnnnnnnnnnnnnnnnnnnnnnnnnnnnnnnnnnnnnnnnnnnnnnnnnnnnnnnnnnnnnnnnnnnnnnnnnnnnnnnnnnnnnnnnnnnnnnnnnnnnnnnnnnnnnnnnnnnnnnnnnnnnnnnnnnnnnnnnnnnnnnnnnnnnnnnnnnnnnnnnnnnnnnnnnnnnnnnnnnnnnnnnnnnnnnnnnnnnnnnnnnnnnnnnnnnnnnnnnnnnnnnnnnnnnnnnnnnnnnnnnnnnnnnnnnnnnnnnnnnnnnnnnnnnnnnnnnnnnnnnnnnnnnnnnnnnnnnnnnnnnnnnnnnnnnnnnnnnnnnnnnnnnnnnnnnnnnnnnnnnnnnnnnnnnnnnnnnnnnnnnnnnnnnnnnnnnnnnnnnnnnnnnnnnnnnnnnnnnnnnnnnnnnnnnnnnnnnnnnnnnnnnnnnnnnnnnnnnnnnnnnnnnnnnnnnnnnnnnnnnnnnnnnnnnnnnnnnnnnnnnnnnnnnnnnnnnnnnnnnnnnnnnnnnnnnnnnnnnnnnnnnnnnnnnnnnnnnnnnnnnnnnnnnnnnnnnnnnnnnnnnnnnnnnnnnnnnnnnnnnnnnnnnnnnnnnnnnnnnnnnnnnnnnnnnnnnnnnnnnnnnnnnnnnnnnnnnnnnnnnnnnnnnnnnnnnnnnnnnnnnnnnnnnnnnnnnnnnnnnnnnnnnnnnnnnnnnnnnnnnnnnnnnnnnnnnnnnnnnnnnnnnnnnnnnnnnnnnnnnnnnnnnnnnnnnnnnnnnnnnnnnnnnnnnnnnnnnnnnnnnnnnnnnnnnnnnnnnnnnnnnnnnnnnnnnnnnnnnnnnnnnnnnnnnnnnnnnnnnnnnnnnnnnnnnnnnnnnnnnnnnnnnnnnnnnnnnnnnnnnnnnnnnnnnnnnnnnnnnnnnnnnnnnnnnnnnnnnnnnnnnnnnnnnnnnnnnnnnnnnnnnnnnnnnnnnnnnnnnnnnnnnnnnnnnnnnnnnnnnnnnnnnnnnnnnnnnnnnnnnnnnnnnnnnnnnnnnnnnnnnnnnnnnnnnnnnnnnnnnnnnnnnnnnnnnnnnnnnnnnnnnnnnnnnnnnnnnnnnnnnnnnnnnnnnnnnnnnnnnnnnnnnnnnnnnnnnnnnnnnnnnnnnnnnnnnnnnnnnnnnnnnnnnnnnnnnnnnnnnnnnnnnnnnnnnnnnnnnnnnnnnnnnnnnnnnnnnnnnnnnnnnnnnnnnnnnnnnnnnnnnnnnnnnnnnnnnnnnnnnnnnnnnnnnnnnnnnnnnnnnnnnnnnnnnnnnnnnnnnnnnnnnnnnnnnnnnnnnnnnnnnnnnnnnnnnnnnnnnnnnnnnnnnnnnnnnnnnnnnnnnnnnnnnnnnnnnnnnnnnnnnnnnnnnnnnnnnnnnnnnnnnnnnnnnnnnnnnnnnnnnnnnnnnnnnnnnnnnnnnnnnnnnnnnnnnnnnnnnnnnnnnnnnnnnnnnnnnnnnnnnnnnnnnnnnnnnnnnnnnnnnnnnnnnnnnnnnnnnnnnnnnnnnnnnnnnnnnnnnnnnnnnnnnnnnnnnnnnnnnnnnnnnnnnnnnnnnnnnnnnnnnnnnnnnnnnnnnnnnnnnnnnnnnnnnnnnnnnnnnnnnnnnnnnnnnnnnnnnnnnnnnnnnnnnnnnnnnnnnnnnnnnnnnnnnnnnnnnnnnnnnnnnnnnnnnnnnnnnnnnnnnnnnnnnnnnnnnnnnnnnnnnnnnnnnnnnnnnnnnnnnnnnnnnnnnnnnnnnnnnnnnnnnnnnnnnnnnnnnnnnnnnnnnnnnnnnnnnnnnnnnnnnnnnnnnnnnnnnnnnnnnnnnnnnnnnnnnnnnnnnnnnnnnnnnnnnnnnnnnnnnnnnnnnnnnnnnnnnnnnnnnnnnnnnnnnnnnnnnnnnnnnnnnnnnnnnnnnnnnnnnnnnnnnnnnnnnnnnnnnnnnnnnnnnnnnnnnnnnnnnnnnnnnnnnnnnnnnnnnnnnnnnnnnnnnnnnnnnnnnnnnnnnnnnnnnnnnnnnnnnnnnnnnnnnnnnnnnnnnnnnnnnnnnnnnnnnnnnnnnnnnnnnnnnnnnnnnnnnnnnnnnnnnnnnnnnnnnnnnnnnnnnnnnnnnnnnnnnnnnnnnnnnnnnnnnnnnnnnnnnnnnnnnnnnnnnnnnnnnnnnnnnnnnnnnnnnnnnnnnnnnnnnnnnnnnnnnnnnnnnnnnnnnnnnnnnnnnnnnnnnnnnnnnnnnnnnnnnnnnnnnnnnnnnnnnnnnnnnnnnnnnnnnnnnnnnnnnnnnnnnnnnnnnnnnnnnnnnnnnnnnnnnnnnnnnnnnnnnnnnnnnnnnnnnnnnnnnnnnnnnnnnnnnnnnnnnnnnnnnnnnnnnnnnnnnnnnnnnnnnnnnnnnnnnnnnnnnnnnnnnnnnnnnnnnnnnnnnnnnnnnnnnnnnnnnnnnnnnnnnnnnnnnnnnnnnnnnnnnnnnnnnnnnnnnnnnnnnnnnnnnnnnnnnnnnnnnnnnnnnnnnnnnnnnnnnnnnnnnnnnnnnnnnnnnnnnnnnnnnnnnnnnnnnnnnnnnnnnnnnnnnnnnnnnnnnnnnnnnnnnnnnnnnnnnnnnnnnnnnnnnnnnnnnnnnnnnnnnnnnnnnnnnnnnnnnnnnnnnnnnnnnnnnnnnnnnnnnnnnnnnnnnnnnnnnnnnnnnnnnnnnnnnnnnnnnnnnnnnnnnnnnnnnnnnnnnnnnnnnnnnnnnnnnnnnnnnnnnnnnnnnnnnnnnnnnnnnnnnnnnnnnnnnnnnnnnnnnnnnnnnnnnnnnnnnnnnnnnnnnnnnnnnnnnnnnnnnnnnnnnnnnnnnnnnnnnnnnnnnnnnnnnnnnnnnnnnnnnnnnnnnnnnnnnnnnnnnnnnnnnnnnnnnnnnnnnnnnnnnnnnnnnnnnnnnnnnnnnnnnnnnnnnnnnnnnnnnnnnnnnnnnnnnnnnnnnnnnnnnnnnnnnnnnnnnnnnnnnnnnnnnnnnnnnnnnnnnnnnnnnnnnnnnnnnnnnnnnnnnnnnnnnnnnnnnnnnnnnnnnnnnnnnnnnnnnnnnnnnnnnnnnnnnnnnnnnnnnnnnnnnnnnnnnnnnnnnnnnnnnnnnnnnnnnnnnnnnnnnnnnnnnnnnnnnnnnnnnnnnnnnnnnnnnnnnnnnnnnnnnnnnnnnnnnnnnnnnnnnnnnnnnnnnnnnnnnnnnnnnnnnnnnnnnnnnnnnnnnnnnnnnnnnnnnnnnnnnnnnnnnnnnnnnnnnnnnnnnnnnnnnnnnnnnnnnnnnnnnnnnnnnnnnnnnnnnnnnnnnnnnnnnnnnnnnnnnnnnnnnnnnnnnnnnnnnnnnnnnnnnnnnnnnnnnnnnnnnnnnnnnnnnnnnnnnnnnnnnnnnnnnnnnnnnnnnnnnnnnnnnnnnnnnnnnnnnnnnnnnnnnnnnnnnnnnnnnnnnnnnnnnnnnnnnnnnnnnnnnnnnnnnnnnnnnnnnnnnnnnnnnnnnnnnnnnnnnnnnnnnnnnnnnnnnnnnnnnnnnnnnnnnnnnnnnnnnnnnnnnnnnnnnnnnnnnnnnnnnnnnnnnnnnnnnnnnnnnnnnnnnnnnnnnnnnnnnnnnnnnnnnnnnnnnnnnnnnnnnnnnnnnnnnnnnnnnnnnnnnnnnnnnnnnnnnnnnnnnnnnnnnnnnnnnnnnnnnnnnnnnnnnnnnnnnnnnnnnnnnnnnnnnnnnnnnnnnnnnnnnnnnnnnnnnnnnnnnnnnnnnnnnnnnnnnnnnnnnnnnnnnnnnnnnnnnnnnnnnnnnnnnnnnnnnnnnnnnnnnnnnnnnnnnnnnnnnnnnnnnnnnnnnnnnnnnnnnnnnnnnnnnnnnnnnnnnnnnnnnnnnnnnnnnnnnnnnnnnnnnnnnnnnnnnnnnnnnnnnnnnnnnnnnnnnnnnnnnnnnnnnnnnnnnnnnnnnnnnnnnnnnnnnnnnnnnnnnnnnnnnnnnnnnnnnnnnnnnnnnnnnnnnnnnnnnnnnnnnnnnnnnnnnnnnnnnnnnnnnnnnnnnnnnnnnnnnnnnnnnnnnnnnnnnnnnnnnnnnnnnnnnnnnnnnnnnnnnnnnnnnnnnnnnnnnnnnnnnnnnnnnnnnnnnnnnnnnnnnnnnnnnnnnnnnnnnnnnnnnnnnnnnnnnnnnnnnnnnnnnnnnnnnnnnnnnnnnnnnnnnnnnnnnnnnnnnnnnnnnnnnnnnnnnnnnnnnnnnnnnnnnnnnnnnnnnnnnnnnnnnnnnnnnnnnnnnnnnnnnnnnnnnnnnnnnnnnnnnnnnnnnnnnnnnnnnnnnnnnnnnnnnnnnnnnnnnnnnnnnnnnnnnnnnnnnnnnnnnnnnnnnnnnnnnnnnnnnnnnnnnnnnnnnnnnnnnnnnnnnnnnnnnnnnnnnnnnnnnnnnnnnnnnnnnnnnnnnnnnnnnnnnnnnnnnnnnnnnnnnnnnnnnnnnnnnnnnnnnnnnnnnnnnnnnnnnnnnnnnnnnnnnnnnnnnnnnnnnnnnnnnnnnnnnnnnnnnnnnnnnnnnnnnnnnnnnnnnnnnnnnnnnnnnnnnnnnnnnnnnnnnnnnnnnnnnnnnnnnnnnnnnnnnnnnnnnnnnnnnnnnnnnnnnnnnnnnnnnnnnnnnnnnnnnnnnnnnnnnnnnnnnnnnnnnnnnnnnnnnnnnnnnnnnnnnnnnnnnnnnnnnnnnnnnnnnnnnnnnnnnnnnnnnnnnnnnnnnnnnnnnnnnnnnnnnnnnnnnnnnnnnnnnnnnnnnnnnnnnnnnnnnnnnnnnnnnnnnnnnnnnnnnnnnnnnnnnnnnnnnnnnnnnnnnnnnnnnnnnnnnnnnnnnnnnnnnnnnnnnnnnnnnnnnnnnnnnnnnnnnnnnnnnnnnnnnnnnnnnnnnnnnnnnnnnnnnnnnnnnnnnnnnnnnnnnnnnnnnnnnnnnnnnnnnnnnnnnnnnnnnnnnnnnnnnnnnnnnnnnnnnnnnnnnnnnnnnnnnnnnnnnnnnnnnnnnnnnnnnnnnnnnnnnnnnnnnnnnnnnnnnnnnnnnnnnnnnnnnnnnnnnnnnnnnnnnnnnnnnnnnnnnnnnnnnnnnnnnnnnnnnnnnnnnnnnnnnnnnnnnnnnnnnnnnnnnnnnnnnnnnnnnnnnnnnnnnnnnnnnnnnnnnnnnnnnnnnnnnnnnnnnnnnnnnnnnnnnnnnnnnnnnnnnnnnnnnnnnnnnnnnnnnnnnnnnnnnnnnnnnnnnnnnnnnnnnnnnnnnnnnnnnnnnnnnnnnnnnnnnnnnnnnnnnnnnnnnnnnnnnnnnnnnnnnnnnnnnnnnnnnnnnnnnnnnnnnnnnnnnnnnnnnnnnnnnnnnnnnnnnnnnnnnnnnnnnnnnnnnnnnnnnnnnnnnnnnnnnnnnnnnnnnnnnnnnnnnnnnnnnnnnnnnnnnnnnnnnnnnnnnnnnnnnnnnnnnnnnnnnnnnnnnnnnnnnnnnnnnnnnnnnnnnnnnnnnnnnnnnnnnnnnnnnnnnnnnnnnnnnnnnnnnnnnnnnnnnnnnnnnnnnnnnnnnnnnnnnnnnnnnnnnnnnnnnnnnnnnnnnnnnnnnnnnnnnnnnnnnnnnnnnnnnnnnnnnnnnnnnnnnnnnnnnnnnnnnnnnnnnnnnnnnnnnnnnnnnnnnnnnnnnnnnnnnnnnnnnnnnnnnnnnnnnnnnnnnnnnnnnnnnnnnnnnnnnnnnnnnnnnnnnnnnnnnnnnnnnnnnnnnnnnnnnnnnnnnnnnnnnnnnnnnnnnnnnnnnnnnnnnnnnnnnnnnnnnnnnnnnnnnnnnnnnnnnnnnnnnnnnnnnnnnnnnnnnnnnnnnnnnnnnnnnnnnnnnnnnnnnnnnnnnnnnnnnnnnnnnnnnnnnnnnnnnnnnnnnnnnnnnnnnnnnnnnnnnnnnnnnnnnnnnnnnnnnnnnnnnnnnnnnnnnnnnnnnnnnnnnnnnnnnnnnnnnnnnnnnnnnnnnnnnnnnnnnnnnnnnnnnnnnnnnnnnnnnnnnnnnnnnnnnnnnnnnnnnnnnnnnnnnnnnnnnnnnnnnnnnnnnnnnnnnnnnnnnnnnnnnnnnnnnnnnnnnnnnnnnnnnnnnnnnnnnnnnnnnnnnnnnnnnnnnnnnnnnnnnnnnnnnnnnnnnnnnnnnnnnnnnnnnnnnnnnnnnnnnnnnnnnnnnnnnnnnnnnnnnnnnnnnnnnnnnnnnnnnnnnnnnnnnnnnnnnnnnnnnnnnnnnnnnnnnnnnnnnnnnnnnnnnnnnnnnnnnnnnnnnnnnnnnnnnnnnnnnnnnnnnnnnnnnnnnnnnnnnnnnnnnnnnnnnnnnnnnnnnnnnnnnnnnnnnnnnnnnnnnnnnnnnnnnnnnnnnnnnnnnnnnnnnnnnnnnnnnnnnnnnnnnnnnnnnnnnnnnnnnnnnnnnnnnnnnnnnnnnnnnnnnnnnnnnnnnnnnnnnnnnnnnnnnnnnnnnnnnnnnnnnnnnnnnnnnnnnnnnnnnnnnnnnnnnnnnnnnnnnnnnnnnnnnnnnnnnnnnnnnnnnnnnnnnnnnnnnnnnnnnnnnnnnnnnnnnnnnnnnnnnnnnnnnnnnnnnnnnnnnnnnnnnnnnnnnnnnnnnnnnnnnnnnnnnnnnnnnnnnnnnnnnnnnnnnnnnnnnnnnnnnnnnnnnnnnnnnnnnnnnnnnnnnnnnnnnnnnnnnnnnnnnnnnnnnnnnnnnnnnnnnnnnnnnnnnnnnnnnnnnnnnnnnnnnnnnnnnnnnnnnnnnnnnnnnnnnnnnnnnnnnnnnnnnnnnnnnnnnnnnnnnnnnnnnnnnnnnnnnnnnnnnnnnnnnnnnnnnnnnnnnnnnnnnnnnnnnnnnnnnnnnnnnnnnnnnnnnnnnnnnnnnnnnnnnnnnnnnnnnnnnnnnnnnnnnnnnnnnnnnnnnnnnnnnnnnnnnnnnnnnnnnnnnnnnnnnnnnnnnnnnnnnnnnnnnnnnnnnnnnnnnnnnnnnnnnnnnnnnnnnnnnnnnnnnnnnnnnnnnnnnnnnnnnnnnnnnnnnnnnnnnnnnnnnnnnnnnnnnnnnnnnnnnnnnnnnnnnnnnnnnnnnnnnnnnnnnnnnnnnnnnnnnnnnnnnnnnnnnnnnnnnnnnnnnnnnnnnnnnnnnnnnnnnnnnnnnnnnnnnnnnnnnnnnnnnnnnnnnnnnnnnnnnnnnnnnnnnnnnnnnnnnnnnnnnnnnnnnnnnnnnnnnnnnnnnnnnnnnnnnnnnnnnnnnnnnnnnnnnnnnnnnnnnnnnnnnnnnnnnnnnnnnnnnnnnnnnnnnnnnnnnnnnnnnnnnnnnnnnnnnnnnnnnnnnnnnnnnnnnnnnnnnnnnnnnnnnnnnnnnnnnnnnnnnnnnnnnnnnnnnnnnnnnnnnnnnnnnnnnnnnnnnnnnnnnnnnnnnnnnnnnnnnnnnnnnnnnnnnnnnnnnnnnnnnnnnnnnnnnnnnnnnnnnnnnnnnnnnnnnnnnnnnnnnnnnnnnnnnnnnnnnnnnnnnnnnnnnnnnnnnnnnnnnnnnnnnnnnnnnnnnnnnnnnnnnnnnnnnnnnnnnnnnnnnnnnnnnnnnnnnnnnnnnnnnnnnnnnnnnnnnnnnnnnnnnnnnnnnnnnnnnnnnnnnnnnnnnnnnnnnnnnnnnnnnnnnnnnnnnnnnnnnnnnnnnnnnnnnnnnnnnnnnnnnnnnnnnnnnnnnnnnnnnnnnnnnnnnnnnnnnnnnnnnnnnnnnnnnnnnnnnnnnnnnnnnnnnnnnnnnnnnnnnnnnnnnnnnnnnnnnnnnnnnnnnnnnnnnnnnnnnnnnnnnnnnnnnnnnnnnnnnnnnnnnnnnnnnnnnnnnnnnnnnnnnnnnnnnnnnnnnnnnnnnnnnnnnnnnnnnnnnnnnnnnnnnnnnnnnnnnnnnnnnnnnnnnnnnnnnnnnnnnnnnnnnnnnnnnnnnnnnnnnnnnnnnnnnnnnnnnnnnnnnnnnnnnnnnnnnnnnnnnnnnnnnnnnnnnnnnnnnnnnnnnnnnnnnnnnnnnnnnnnnnnnnnnnnnnnnnnnnnnnnnnnnnnnnnnnnnnnnnnnnnnnnnnnnnnnnnnnnnnnnnnnnnnnnnnnnnnnnnnnnnnnnnnnnnnnnnnnnnnnnnnnnnnnnnnnnnnnnnnnnnnnnnnnnnnnnnnnnnnnnnnnnnnnnnnnnnnnnnnnnnnnnnnnnnnnnnnnnnnnnnnnnnnnnnnnnnnnnnnnnnnnnnnnnnnnnnnnnnnnnnnnnnnnnnnnnnnnnnnnnnnnnnnnnnnnnnnnnnnnnnnnnnnnnnnnnnnnnnnnnnnnnnnnnnnnnnnnnnnnnnnnnnnnnnnnnnnnnnnnnnnnnnnnnnnnnnnnnnnnnnnnnnnnnnnnnnnnnnnnnnnnnnnnnnnnnnnnnnnnnnnnnnnnnnnnnnnnnnnnnnnnnnnnnnnnnnnnnnnnnnnnnnnnnnnnnnnnnnnnnnnnnnnnnnnnnnnnnnnnnnnnnnnnnnnnnnnnnnnnnnnnnnnnnnnnnnnnnnnnnnnnnnnnnnnnnnnnnnnnnnnnnnnnnnnnnnnnnnnnnnnnnnnnnnnnnnnnnnnnnnnnnnnnnnnnnnnnnnnnnnnnnnnnnnnnnnnnnnnnnnnnnnnnnnnnnnnnnnnnnnnnnnnnnnnnnnnnnnnnnnnnnnnnnnnnnnnnnnnnnnnnnnnnnnnnnnnnnnnnnnnnnnnnnnnnnnnnnnnnnnnnnnnnnnnnnnnnnnnnnnnnnnnnnnnnnnnnnnnnnnnnnnnnnnnnnnnnnnnnnnnnnnnnnnnnnnnnnnnnnnnnnnnnnnnnnnnnnnnnnnnnnnnnnnnnnnnnnnnnnnnnnnnnnnnnnnnnnnnnnnnnnnnnnnnnnnnnnnnnnnnnnnnnnnnnnnnnnnnnnnnnnnnnnnnnnnnnnnnnnnnnnnnnnnnnnnnnnnnnnnnnnnnnnnnnnnnnnnnnnnnnnnnnnnnnnnnnnnnnnnnnnnnnnnnnnnnnnnnnnnnnnnnnnnnnnnnnnnnnnnnnnnnnnnnnnnnnnnnnnnnnnnnnnnnnnnnnnnnnnnnnnnnnnnnnnnnnnnnnnnnnnnnnnnnnnnnnnnnnnnnnnnnnnnnnnnnnnnnnnnnnnnnnnnnnnnnnnnnnnnnnnnnnnnnnnnnnnnnnnnnnnnnnnnnnnnnnnnnnnnnnnnnnnnnnnnnnnnnnnnnnnnnnnnnnnnnnnnnnnnnnnnnnnnnnnnnnnnnnnnnnnnnnnnnnnnnnnnnnnnnnnnnnnnnnnnnnnnnnnnnnnnnnnnnnnnnnnnnnnnnnnnnnnnnnnnnnnnnnnnnnnnnnnnnnnnnnnnnnnnnnnnnnnnnnnnnnnnnnnnnnnnnnnnnnnnnnnnnnnnnnnnnnnnnnnnnnnnnnnnnnnnnnnnnnnnnnnnnnnnnnnnnnnnnnnnnnnnnnnnnnnnnnnnnnnnnnnnnnnnnnnnnnnnnnnnnnnnnnnnnnnnnnnnnnnnnnnnnnnnnnnnnnnnnnnnnnnnnnnnnnnnnnnnnnnnnnnnnnnnnnnnnnnnnnnnnnnnnnnnnnnnnnnnnnnnnnnnnnnnnnnnnnnnnnnnnnnnnnnnnnnnnnnnnnnnnnnnnnnnnnnnnnnnnnnnnnnnnnnnnnnnnnnnnnnnnnnnnnnnnnnnnnnnnnnnnnnnnnnnnnnnnnnnnnnnnnnnnnnnnnnnnnnnnnnnnnnnnnnnnnnnnnnnnnnnnnnnnnnnnnnnnnnnnnnnnnnnnnnnnnnnnnnnnnnnnnnnnnnnnnnnnnnnnnnnnnnnnnnnnnnnnnnnnnnnnnnnnnnnnnnnnnnnnnnnnnnnnnnnnnnnnnnnnnnnnnnnnnnnnnnnnnnnnnnnnnnnnnnnnnnnnnnnnnnnnnnnnnnnnnnnnnnnnnnnnnnnnnnnnnnnnnnnnnnnnnnnnnnnnnnnnnnnnnnnnnnnnnnnnnnnnnnnnnnnnnnnnnnnnnnnnnnnnnnnnnnnnnnnnnnnnnnnnnnnnnnnnnnnnnnnnnnnnnnnnnnnnnnnnnnnnnnnnnnnnnnnnnnnnnnnnnnnnnnnnnnnnnnnnnnnnnnnnnnnnnnnnnnnnnnnnnnnnnnnnnnnnnnnnnnnnnnnnnnnnnnnnnnnnnnnnnnnnnnnnnnnnnnnnnnnnnnnnnnnnnnnnnnnnnnnnnnnnnnnnnnnnnnnnnnnnnnnnnnnnnnnnnnnnnnnnnnnnnnnnnnnnnnnnnnnnnnnnnnnnnnnnnnnnnnnnnnnnnnnnnnnnnnnnnnnnnnnnnnnnnnnnnnnnnnnnnnnnnnnnnnnnnnnnnnnnnnnnnnnnnnnnnnnnnnnnnnnnnnnnnnnnnnnnnnnnnnnnnnnnnnnnnnnnnnnnnnnnnnnnnnnnnnnnnnnnnnnnnnnnnnnnnnnnnnnnnnnnnnnnnnnnnnnnnnnnnnnnnnnnnnnnnnnnnnnnnnnnnnnnnnnnnnnnnnnnnnnnnnnnnnnnnnnnnnnnnnnnnnnnnnnnnnnnnnnnnnnnnnnnnnnnnnnnnnnnnnnnnnnnnnnnnnnnnnnnnnnnnnnnnnnnnnnnnnnnnnnnnnnnnnnnnnnnnnnnnnnnnnnnnnnnnnnnnnnnnnnnnnnnnnnnnnnnnnnnnnnnnnnnnnnnnnnnnnnnnnnnnnnnnnnnnnnnnnnnnnnnnnnnnnnnnnnnnnnnnnnnnnnnnnnnnnnnnnnnnnnnnnnnnnnnnnnnnnnnnnnnnnnnnnnnnnnnnnnnnnnnnnnnnnnnnnnnnnnnnnnnnnnnnnnnnnnnnnnnnnnnnnnnnnnnnnnnnnnnnnnnnnnnnnnnnnnnnnnnnnnnnnnnnnnnnnnnnnnnnnnnnnnnnnnnnnnnnnnnnnnnnnnnnnnnnnnnnnnnnnnnnnnnnnnnnnnnnnnnnnnnnnnnnnnnnnnnnnnnnnnnnnnnnnnnnnnnnnnnnnnnnnnnnnnnnnnnnnnnnnnnnnnnnnnnnnnnnnnnnnnnnnnnnnnnnnnnnnnnnnnnnnnnnnnnnnnnnnnnnnnnnnnnnnnnnnnnnnnnnnnnnnnnnnnnnnnnnnnnnnnnnnnnnnnnnnnnnnnnnnnnnnnnnnnnnnnnnnnnnnnnnnnnnnnnnnnnnnnnnnnnnnnnnnnnnnnnnnnnnnnnnnnnnnnnnnnnnnnnnnnnnnnnnnnnnnnnnnnnnnnnnnnnnnnnnnnnnnnnnnnnnnnnnnnnnnnnnnnnnnnnnnnnnnnnnnnnnnnnnnnnnnnnnnnnnnnnnnnnnnnnnnnnnnnnnnnnnnnnnnnnnnnnnnnnnnnnnnnnnnnnnnnnnnnnnnnnnnnnnnnnnnnnnnnnnnnnnnnnnnnnnnnnnnnnnnnnnnnnnnnnnnnnnnnnnnnnnnnnnnnnnnnnnnnnnnnnnnnnnnnnnnnnnnnnnnnnnnnnnnnnnnnnnnnnnnnnnnnnnnnnnnnnnnnnnnnnnnnnnnnnnnnnnnnnnnnnnnnnnnnnnnnnnnnnnnnnnnnnnnnnnnnnnnnnnnnnnnnnnnnnnnnnnnnnnnnnnnnnnnnnnnnnnnnnnnnnnnnnnnnnnnnnnnnnnnnnnnnnnnnnnnnnnnnnnnnnnnnnnnnnnnnnnnnnnnnnnnnnnnnnnnnnnnnnnnnnnnnnnnnnnnnnnnnnnnnnnnnnnnnnnnnnnnnnnnnnnnnnnnnnnnnnnnnnnnnnnnnnnnnnnnnnnnnnnnnnnnnnnnnnnnnnnnnnnnnnnnnnnnnnnnnnnnnnnnnnnnnnnnnnnnnnnnnnnnnnnnnnnnnnnnnnnnnnnnnnnnnnnnnnnnnnnnnnnnnnnnnnnnnnnnnnnnnnnnnnnnnnnnnnnnnnnnnnnnnnnnnnnnnnnnnnnnnnnnnnnnnnnnnnnnnnnnnnnnnnnnnnnnnnnnnnnnnnnnnnnnnnnnnnnnnnnnnnnnnnnnnnnnnnnnnnnnnnnnnnnnnnnnnnnnnnnnnnnnnnnnnnnnnnnnnnnnnnnnnnnnnnnnnnnnnnnnnnnnnnnnnnnnnnnnnnnnnnnnnnnnnnnnnnnnnnnnnnnnnnnnnnnnnnnnnnnnnnnnnnnnnnnnnnnnnnnnnnnnnnnnnnnnnnnnnnnnnnnnnnnnnnnnnnnnnnnnnnnnnnnnnnnnnnnnnnnnnnnnnnnnnnnnnnnnnnnnnnnnnnnnnnnnnnnnnnnnnnnnnnnnnnnnnnnnnnnnnnnnnnnnnnnnnnnnnnnnnnnnnnnnnnnnnnnnnnnnnnnnnnnnnnnnnnnnnnnnnnnnnnnnnnnnnnnnnnnnnnnnnnnnnnnnnnnnnnnnnnnnnnnnnnnnnnnnnnnnnnnnnnnnnnnnnnnnnnnnnnnnnnnnnnnnnnnnnnnnnnnnnnnnnnnnnnnnnnnnnnnnnnnnnnnnnnnnnnnnnnnnnnnnnnnnnnnnnnnnnnnnnnnnnnnnnnnnnnnnnnnnnnnnnnnnnnnnnnnnnnnnnnnnnnnnnnnnnnnnnnnnnnnnnnnnnnnnnnnnnnnnnnnnnnnnnnnnnnnnnnnnnnnnnnnnnnnnnnnnnnnnnnnnnnnnnnnnnnnnnnnnnnnnnnnnnnnnnnnnnnnnnnnnnnnnnnnnnnnnnnnnnnnnnnnnnnnnnnnnnnnnnnnnnnnnnnnnnnnnnnnnnnnnnnnnnnnnnnnnnnnnnnnnnnnnnnnnnnnnnnnnnnnnnnnnnnnnnnnnnnnnnnnnnnnnnnnnnnnnnnnnnnnnnnnnnnnnnnnnnnnnnnnnnnnnnnnnnnnnnnnnnnnnnnnnnnnnnnnnnnnnnnnnnnnnnnnnnnnnnnnnnnnnnnnnnnnnnnnnnnnnnnnnnnnnnnnnnnnnnnnnnnnnnnnnnnnnnnnnnnnnnnnnnnnnnnnnnnnnnnnnnnnnnnnnnnnnnnnnnnnnnnnnnnnnnnnnnnnnnnnnnnnnnnnnnnnnnnnnnnnnnnnnnnnnnnnnnnnnnnnnnnnnnnnnnnnnnnnnnnnnnnnnnnnnnnnnnnnnnnnnnnnnnnnnnnnnnnnnnnnnnnnnnnnnnnnnnnnnnnnnnnnnnnnnnnnnnnnnnnnnnnnnnnnnnnnnnnnnnnnnnnnnnnnnnnnnnnnnnnnnnnnnnnnnnnnnnnnnnnnnnnnnnnnnnnnnnnnnnnnnnnnnnnnnnnnnnnnnnnnnnnnnnnnnnnnnnnnnnnnnnnnnnnnnnnnnnnnnnnnnnnnnnnnnnnnnnnnnnnnnnnnnnnnnnnnnnnnnnnnnnnnnnnnnnnnnnnnnnnnnnnnnnnnnnnnnnnnnnnnnnnnnnnnnnnnnnnnnnnnnnnnnnnnnnnnnnnnnnnnnnnnnnnnnnnnnnnnnnnnnnnnnnnnnnnnnnnnnnnnnnnnnnnnnnnnnnnnnnnnnnnnnnnnnnnnnnnnnnnnnnnnnnnnnnnnnnnnnnnnnnnnnnnnnnnnnnnnnnnnnnnnnnnnnnnnnnnnnnnnnnnnnnnnnnnnnnnnnnnnnnnnnnnnnnnnnnnnnnnnnnnnnnnnnnnnnnnnnnnnnnnnnnnnnnnnnnnnnnnnnnnnnnnnnnnnnnnnnnnnnnnnnnnnnnnnnnnnnnnnnnnnnnnnnnnnnnnnnnnnnnnnnnnnnnnnnnnnnnnnnnnnnnnnnnnnnnnnnnnnnnnnnnnnnnnnnnnnnnnnnnnnnnnnnnnnnnnnnnnnnnnnnnnnnnnnnnnnnnnnnnnnnnnnnnnnnnnnnnnnnnnnnnnnnnnnnnnnnnnnnnnnnnnnnnnnnnnnnnnnnnnnnnnnnnnnnnnnnnnnnnnnnnnnnnnnnnnnnnnnnnnnnnnnnnnnnnnnnnnnnnnnnnnnnnnnnnnnnnnnnnnnnnnnnnnnnnnnnnnnnnnnnnnnnnnnnnnnnnnnnnnnnnnnnnnnnnnnnnnnnnnnnnnnnnnnnnnnnnnnnnnnnnnnnnnnnnnnnnnnnnnnnnnnnnnnnnnnnnnnnnnnnnnnnnnnnnnnnnnnnnnnnnnnnnnnnnnnnnnnnnnnnnnnnnnnnnnnnnnnnnnnnnnnnnnnnnnnnnnnnnnnnnnnnnnnnnnnnnnnnnnnnnnnnnnnnnnnnnnnnnnnnnnnnnnnnnnnnnnnnnnnnnnnnnnnnnnnnnnnnnnnnnnnnnnnnnnnnnnnnnnnnnnnnnnnnnnnnnnnnnnnnnnnnnnnnnnnnnnnnnnnnnnnnnnnnnnnnnnnnnnnnnnnnnnnnnnnnnnnnnnnnnnnnnnnnnnnnnnnnnnnnnnnnnnnnnnnnnnnnnnnnnnnnnnnnnnnnnnnnnnnnnnnnnnnnnnnnnnnnnnnnnnnnnnnnnnnnnnnnnnnnnnnnnnnnnnnnnnnnnnnnnnnnnnnnnnnnnnnnnnnnnnnnnnnnnnnnnnnnnnnnnnnnnnnnnnnnnnnnnnnnnnnnnnnnnnnnnnnnnnnnnnnnnnnnnnnnnnnnnnnnnnnnnnnnnnnnnnnnnnnnnnnnnnnnnnnnnnnnnnnnnnnnnnnnnnnnnnnnnnnnnnnnnnnnnnnnnnnnnnnnnnnnnnnnnnnnnnnnnnnnnnnnnnnnnnnnnnnnnnnnnnnnnnnnnnnnnnnnnnnnnnnnnnnnnnnnnnnnnnnnnnnnnnnnnnnnnnnnnnnnnnnnnnnnnnnnnnnnnnnnnnnnnnnnnnnnnnnnnnnnnnnnnnnnnnnnnnnnnnnnnnnnnnnnnnnnnnnnnnnnnnnnnnnnnnnnnnnnnnnnnnnnnnnnnnnnnnnnnnnnnnnnnnnnnnnnnnnnnnnnnnnnnnnnnnnnnnnnnnnnnnnnnnnnnnnnnnnnnnnnnnnnnnnnnnnnnnnnnnnnnnnnnnnnnnnnnnnnnnnnnnnnnnnnnnnnnnnnnnnnnnnnnnnnnnnnnnnnnnnnnnnnnnnnnnnnnnnnnnnnnnnnnnnnnnnnnnnnnnnnnnnnnnnnnnnnnnnnnnnnnnnnnnnnnnnnnnnnnnnnnnnnnnnnnnnnnnnnnnnnnnnnnnnnnnnnnnnnnnnnnnnnnnnnnnnnnnnnnnnnnnnnnnnnnnnnnnnnnnnnnnnnnnnnnnnnnnnnnnnnnnnnnnnnnnnnnnnnnnnnnnnnnnnnnnnnnnnnnnnnnnnnnnnnnnnnnnnnnnnnnnnnnnnnnnnnnnnnnnnnnnnnnnnnnnnnnnnnnnnnnnnnnnnnnnnnnnnnnnnnnnnnnnnnnnnnnnnnnnnnnnnnnnnnnnnnnnnnnnnnnnnnnnnnnnnnnnnnnnnnnnnnnnnnnnnnnnnnnnnnnnnnnnnnnnnnnnnnnnnnnnnnnnnnnnnnnnnnnnnnnnnnnnnnnnnnnnnnnnnnnnnnnnnnnnnnnnnnnnnnnnnnnnnnnnnnnnnnnnnnnnnnnnnnnnnnnnnnnnnnnnnnnnnnnnnnnnnnnnnnnnnnnnnnnnnnnnnnnnnnnnnnnnnnnnnnnnnnnnnnnnnnnnnnnnnnnnnnnnnnnnnnnnnnnnnnnnnnnnnnnnnnnnnnnnnnnnnnnnnnnnnnnnnnnnnnnnnnnnnnnnnnnnnnnnnnnnnnnnnnnnnnnnnnnnnnnnnnnnnnnnnnnnnnnnnnnnnnnnnnnnnnnnnnnnnnnnnnnnnnnnnnnnnnnnnnnnnnnnnnnnnnnnnnnnnnnnnnnnnnnnnnnnnnnnnnnnnnnnnnnnnnnnnnnnnnnnnnnnnnnnnnnnnnnnnnnnnnnnnnnnnnnnnnnnnnnnnnnnnnnnnnnnnnnnnnnnnnnnnnnnnnnnnnnnnnnnnnnnnnnnnnnnnnnnnnnnnnnnnnnnnnnnnnnnnnnnnnnnnnnnnnnnnnnnnnnnnnnnnnnnnnnnnnnnnnnnnnnnnnnnnnnnnnnnnnnnnnnnnnnnnnnnnnnnnnnnnnnnnnnnnnnnnnnnnnnnnnnnnnnnnnnnnnnnnnnnnnnnnnnnnnnnnnnnnnnnnnnnnnnnnnnnnnnnnnnnnnnnnnnnnnnnnnnnnnnnnnnnnnnnnnnnnnnnnnnnnnnnnnnnnnnnnnnnnnnnnnnnnnnnnnnnnnnnnnnnnnnnnnnnnnnnnnnnnnnnnnnnnnnnnnnnnnnnnnnnnnnnnnnnnnnnnnnnnnnnnnnnnnnnnnnnnnnnnnnnnnnnnnnnnnnnnnnnnnnnnnnnnnnnnnnnnnnnnnnnnnnnnnnnnnnnnnnnnnnnnnnnnnnnnnnnnnnnnnnnnnnnnnnnnnnnnnnnnnnnnnnnnnnnnnnnnnnnnnnnnnnnnnnnnnnnnnnnnnnnnnnnnnnnnnnnnnnnnnnnnnnnnnnnnnnnnnnnnnnnnnnnnnnnnnnnnnnnnnnnnnnnnnnnnnnnnnnnnnnnnnnnnnnnnnnnnnnnnnnnnnnnnnnnnnnnnnnnnnnnnnnnnnnnnnnnnnnnnnnnnnnnnnnnnnnnnnnnnnnnnnnnnnnnnnnnnnnnnnnnnnnnnnnnnnnnnnnnnnnnnnnnnnnnnnnnnnnnnnnnnnnnnnnnnnnnnnnnnnnnnnnnnnnnnnnnnnnnnnnnnnnnnnnnnnnnnnnnnnnnnnnnnnnnnnnnnnnnnnnnnnnnnnnnnnnnnnnnnnnnnnnnnnnnnnnnnnnnnnnnnnnnnnnnnnnnnnnnnnnnnnnnnnnnnnnnnnnnnnnnnnnnnnnnnnnnnnnnnnnnnnnnnnnnnnnnnnnnnnnnnnnnnnnnnnnnnnnnnnnnnnnnnnnnnnnnnnnnnnnnnnnnnnnnnnnnnnnnnnnnnnnnnnnnnnnnnnnnnnnnnnnnnnnnnnnnnnnnnnnnnnnnnnnnnnnnnnnnnnnnnnnnnnnnnnnnnnnnnnnnnnnnnnnnnnnnnnnnnnnnnnnnnnnnnnnnnnnnnnnnnnnnnnnnnnnnnnnnnnnnnnnnnnnnnnnnnnnnnnnnnnnnnnnnnnnnnnnnnnnnnnnnnnnnnnnnnnnnnnnnnnnnnnnnnnnnnnnnnnnnnnnnnnnnnnnnnnnnnnnnnnnnnnnnnnnnnnnnnnnnnnnnnnnnnnnnnnnnnnnnnnnnnnnnnnnnnnnnnnnnnnnnnnnnnnnnnnnnnnnnnnnnnnnnnnnnnnnnnnnnnnnnnnnnnnnnnnnnnnnnnnnnnnnnnnnnnnnnnnnnnnnnnnnnnnnnnnnnnnnnnnnnnnnnnnnnnnnnnnnnnnnnnnnnnnnnnnnnnnnnnnnnnnnnnnnnnnnnnnnnnnnnnnnnnnnnnnnnnnnnnnnnnnnnnnnnnnnnnnnnnnnnnnnnnnnnnnnnnnnnnnnnnnnnnnnnnnnnnnnnnnnnnnnnnnnnnnnnnnnnnnnnnnnnnnnnnnnnnnnnnnnnnnnnnnnnnnnnnnnnnnnnnnnnnnnnnnnnnnnnnnnnnnnnnnnnnnnnnnnnnnnnnnnnnnnnnnnnnnnnnnnnnnnnnnnnnnnnnnnnnnnnnnnnnnnnnnnnnnnnnnnnnnnnnnnnnnnnnnnnnnnnnnnnnnnnnnnnnnnnnnnnnnnnnnnnnnnnnnnnnnnnnnnnnnnnnnnnnnnnnnnnnnnnnnnnnnnnnnnnnnnnnnnnnnnnnnnnnnnnnnnnnnnnnnnnnnnnnnnnnnnnnnnnnnnnnnnnnnnnnnnnnnnnnnnnnnnnnnnnnnnnnnnnnnnnnnnnnnnnnnnnnnnnnnnnnnnnnnnnnnnnnnnnnnnnnnnnnnnnnnnnnnnnnnnnnnnnnnnnnnnnnnnnnnnnnnnnnnnnnnnnnnnnnnnnnnnnnnnnnnnnnnnnnnnnnnnnnnnnnnnnnnnnnnnnnnnnnnnnnnnnnnnnnnnnnnnnnnnnnnnnnnnnnnnnnnnnnnnnnnnnnnnnnnnnnnnnnnnnnnnnnnnnnnnnnnnnnnnnnnnnnnnnnnnnnnnnnnnnnnnnnnnnnnnnnnnnnnnnnnnnnnnnnnnnnnnnnnnnnnnnnnnnnnnnnnnnnnnnnnnnnnnnnnnnnnnnnnnnnnnnnnnnnnnnnnnnnnnnnnnnnnnnnnnnnnnnnnnnnnnnnnnnnnnnnnnnnnnnnnnnnnnnnnnnnnnnnnnnnnnnnnnnnnnnnnnnnnnnnnnnnnnnnnnnnnnnnnnnnnnnnnnnnnnnnnnnnnnnnnnnnnnnnnnnnnnnnnnnnnnnnnnnnnnnnnnnnnnnnnnnnnnnnnnnnnnnnnnnnnnnnnnnnnnnnnnnnnnnnnnnnnnnnnnnnnnnnnnnnnnnnnnnnnnnnnnnnnnnnnnnnnnnnnnnnnnnnnnnnnnnnnnnnnnnnnnnnnnnnnnnnnnnnnnnnnnnnnnnnnnnnnnnnnnnnnnnnnnnnnnnnnnnnnnnnnnnnnnnnnnnnnnnnnnnnnnnnnnnnnnnnnnnnnnnnnnnnnnnnnnnnnnnnnnnnnnnnnnnnnnnnnnnnnnnnnnnnnnnnnnnnnnnnnnnnnnnnnnnnnnnnnnnnnnnnnnnnnnnnnnnnnnnnnnnnnnnnnnnnnnnnnnnnnnnnnnnnnnnnnnnnnnnnnnnnnnnnnnnnnnnnnnnnnnnnnnnnnnnnnnnnnnnnnnnnnnnnnnnnnnnnnnnnnnnnnnnnnnnnnnnnnnnnnnnnnnnnnnnnnnnnnnnnnnnnnnnnnnnnnnnnnnnnnnnnnnnnnnnnnnnnnnnnnnnnnnnnnnnnnnnnnnnnnnnnnnnnnnnnnnnnnnnnnnnnnnnnnnnnnnnnnnnnnnnnnnnnnnnnnnnnnnnnnnnnnnnnnnnnnnnnnnnnnnnnnnnnnnnnnnnnnnnnnnnnnnnnnnnnnnnnnnnnnnnnnnnnnnnnnnnnnnnnnnnnnnnnnnnnnnnnnnnnnnnnnnnnnnnnnnnnnnnnnnnnnnnnnnnnnnnnnnnnnnnnnnnnnnnnnnnnnnnnnnnnnnnnnnnnnnnnnnnnnnnnnnnnnnnnnnnnnnnnnnnnnnnnnnnnnnnnnnnnnnnnnnnnnnnnnnnnnnnnnnnnnnnnnnnnnnnnnnnnnnnnnnnnnnnnnnnnnnnnnnnnnnnnnnnnnnnnnnnnnnnnnnnnnnnnnnnnnnnnnnnnnnnnnnnnnnnnnnnnnnnnnnnnnnnnnnnnnnnnnnnnnnnnnnnnnnnnnnnnnnnnnnnnnnnnnnnnnnnnnnnnnnnnnnnnnnnnnnnnnnnnnnnnnnnnnnnnnnnnnnnnnnnnnnnnnnnnnnnnnnnnnnnnnnnnnnnnnnnnnnnnnnnnnnnnnnnnnnnnnnnnnnnnnnnnnnnnnnnnnnnnnnnnnnnnnnnnnnnnnnnnnnnnnnnnnnnnnnnnnnnnnnnnnnnnnnnnnnnnnnnnnnnnnnnnnnnnnnnnnnnnnnnnnnnnnnnnnnnnnnnnnnnnnnnnnnnnnnnnnnnnnnnnnnnnnnnnnnnnnnnnnnnnnnnnnnnnnnnnnnnnnnnnnnnnnnnnnnnnnnnnnnnnnnnnnnnnnnnnnnnnnnnnnnnnnnnnnnnnnnnnnnnnnnnnnnnnnnnnnnnnnnnnnnnnnnnnnnnnnnnnnnnnnnnnnnnnnnnnnnnnnnnnnnnnnnnnnnnnnnnnnnnnnnnnnnnnnnnnnnnnnnnnnnnnnnnnnnnnnnnnnnnnnnnnnnnnnnnnnnnnnnnnnnnnnnnnnnnnnnnnnnnnnnnnnnnnnnnnnnnnnnnnnnnnnnnnnnnnnnnnnnnnnnnnnnnnnnnnnnnnnnnnnnnnnnnnnnnnnnnnnnnnnnnnnnnnnnnnnnnnnnnnnnnnnnnnnnnnnnnnnnnnnnnnnnnnnnnnnnnnnnnnnnnnnnnnnnnnnnnnnnnnnnnnnnnnnnnnnnnnnnnnnnnnnnnnnnnnnnnnnnnnnnnnnnnnnnnnnnnnnnnnnnnnnnnnnnnnnnnnnnnnnnnnnnnnnnnnnnnnnnnnnnnnnnnnnnnnnnnnnnnnnnnnnnnnnnnnnnnnnnnnnnnnnnnnnnnnnnnnnnnnnnnnnnnnnnnnnnnnnnnnnnnnnnnnnnnnnnnnnnnnnnnnnnnnnnnnnnnnnnnnnnnnnnnnnnnnnnnnnnnnnnnnnnnnnnnnnnnnnnnnnnnnnnnnnnnnnnnnnnnnnnnnnnnnnnnnnnnnnnnnnnnnnnnnnnnnnnnnnnnnnnnnnnnnnnnnnnnnnnnnnnnnnnnnnnnnnnnnnnnnnnnnnnnnnnnnnnnnnnnnnnnnnnnnnnnnnnnnnnnnnnnnnnnnnnnnnnnnnnnnnnnnnnnnnnnnnnnnnnnnnnnnnnnnnnnnnnnnnnnnnnnnnnnnnnnnnnnnnnnnnnnnnnnnnnnnnnnnnnnnnnnnnnnnnnnnnnnnnnnnnnnnnnnnnnnnnnnnnnnnnnnnnnnnnnnnnnnnnnnnnnnnnnnnnnnnnnnnnnnnnnnnnnnnnnnnnnnnnnnnnnnnnnnnnnnnnnnnnnnnnnnnnnnnnnnnnnnnnnnnnnnnnnnnnnnnnnnnnnnnnnnnnnnnnnnnnnnnnnnnnnnnnnnnnnnnnnnnnnnnnnnnnnnnnnnnnnnnnnnnnnnnnnnnnnnnnnnnnnnnnnnnnnnnnnnnnnnnnnnnnnnnnnnnnnnnnnnnnnnnnnnnnnnnnnnnnnnnnnnnnnnnnnnnnnnnnnnnnnnnnnnnnnnnnnnnnnnnnnnnnnnnnnnnnnnnnnnnnnnnnnnnnnnnnnnnnnnnnnnnnnnnnnnnnnnnnnnnnnnnnnnnnnnnnnnnnnnnnnnnnnnnnnnnnnnnnnnnnnnnnnnnnnnnnnnnnnnnnnnnnnnnnnnnnnnnnnnnnnnnnnnnnnnnnnnnnnnnnnnnnnnnnnnnnnnnnnnnnnnnnnnnnnnnnnnnnnnnnnnnnnnnnnnnnnnnnnnnnnnnnnnnnnnnnnnnnnnnnnnnnnnnnnnnnnnnnnnnnnnnnnnnnnnnnnnnnnnnnnnnnnnnnnnnnnnnnnnnnnnnnnnnnnnnnnnnnnnnnnnnnnnnnnnnnnnnnnnnnnnnnnnnnnnnnnnnnnnnnnnnnnnnnnnnnnnnnnnnnnnnnnnnnnnnnnnnnnnnnnnnnnnnnnnnnnnnnnnnnnnnnnnnnnnnnnnnnnnnnnnnnnnnnnnnnnnnnnnnnnnnnnnnnnnnnnnnnnnnnnnnnnnnnnnnnnnnnnnnnnnnnnnnnnnnnnnnnnnnnnnnnnnnnnnnnnnnnnnnnnnnnnnnnnnnnnnnnnnnnnnnnnnnnnnnnnnnnnnnnnnnnnnnnnnnnnnnnnnnnnnnnnnnnnnnnnnnnnnnnnnnnnnnnnnnnnnnnnnnnnnnnnnnnnnnnnnnnnnnnnnnnnnnnnnnnnnnnnnnnnnnnnnnnnnnnnnnnnnnnnnnnnnnnnnnnnnnnnnnnnnnnnnnnnnnnnnnnnnnnnnnnnnnnnnnnnnnnnnnnnnnnnnnnnnnnnnnnnnnnnnnnnnnnnnnnnnnnnnnnnnnnnnnnnnnnnnnnnnnnnnnnnnnnnnnnnnnnnnnnnnnnnnnnnnnnnnnnnnnnnnnnnnnnnnnnnnnnnnnnnnnnnnnnnnnnnnnnnnnnnnnnnnnnnnnnnnnnnnnnnnnnnnnnnnnnnnnnnnnnnnnnnnnnnnnnnnnnnnnnnnnnnnnnnnnnnnnnnnnnnnnnnnnnnnnnnnnnnnnnnnnnnnnnnnnnnnnnnnnnnnnnnnnnnnnnnnnnnnnnnnnnnnnnnnnnnnnnnnnnnnnnnnnnnnnnnnnnnnnnnnnnnnnnnnnnnnnnnnnnnnnnnnnnnnnnnnnnnnnnnnnnnnnnnnnnnnnnnnnnnnnnnnnnnnnnnnnnnnnnnnnnnnnnnnnnnnnnnnnnnnnnnnnnnnnnnnnnnnnnnnnnnnnnnnnnnnnnnnnnnnnnnnnnnnnnnnnnnnnnnnnnnnnnnnnnnnnnnnnnnnnnnnnnnnnnnnnnnnnnnnnnnnnnnnnnnnnnnnnnnnnnnnnnnnnnnnnnnnnnnnnnnnnnnnnnnnnnnnnnnnnnnnnnnnnnnnnnnnnnnnnnnnnnnnnnnnnnnnnnnnnnnnnnnnnnnnnnnnnnnnnnnnnnnnnnnnnnnnnnnnnnnnnnnnnnnnnnnnnnnnnnnnnnnnnnnnnnnnnnnnnnnnnnnnnnnnnnnnnnnnnnnnnnnnnnnnnnnnnnnnnnnnnnnnnnnnnnnnnnnnnnnnnnnnnnnnnnnnnnnnnnnnnnnnnnnnnnnnnnnnnnnnnnnnnnnnnnnnnnnnnnnnnnnnnnnnnnnnnnnnnnnnnnnnnnnnnnnnnnnnnnnnnnnnnnnnnnnnnnnnnnnnnnnnnnnnnnnnnnnnnnnnnnnnnnnnnnnnnnnnnnnnnnnnnnnnnnnnnnnnnnnnnnnnnnnnnnnnnnnnnnnnnnnnnnnnnnnnnnnnnnnnnnnnnnnnnnnnnnnnnnnnnnnnnnnnnnnnnnnnnnnnnnnnnnnnnnnnnnnnnnnnnnnnnnnnnnnnnnnnnnnnnnnnnnnnnnnnnnnnnnnnnnnnnnnnnnnnnnnnnnnnnnnnnnnnnnnnnnnnnnnnnnnnnnnnnnnnnnnnnnnnnnnnnnnnnnnnnnnnnnnnnnnnnnnnnnnnnnnnnnnnnnnnnnnnnnnnnnnnnnnnnnnnnnnnnnnnnnnnnnnnnnnnnnnnnnnnnnnnnnnnnnnnnnnnnnnnnnnnnnnnnnnnnnnnnnnnnnnnnnnnnnnnnnnnnnnnnnnnnnnnnnnnnnnnnnnnnnnnnnnnnnnnnnnnnnnnnnnnnnnnnnnnnnnnnnnnnnnnnnnnnnnnnnnnnnnnnnnnnnnnnnnnnnnnnnnnnnnnnnnnnnnnnnnnnnnnnnnnnnnnnnnnnnnnnnnnnnnnnnnnnnnnnnnnnnnnnnnnnnnnnnnnnnnnnnnnnnnnnnnnnnnnnnnnnnnnnnnnnnnnnnnnnnnnnnnnnnnnnnnnnnnnnnnnnnnnnnnnnnnnnnnnnnnnnnnnnnnnnnnnnnnnnnnnnnnnnnnnnnnnnnnnnnnnnnnnnnnnnnnnnnnnnnnnnnnnnnnnnnnnnnnnnnnnnnnnnnnnnnnnnnnnnnnnnnnnnnnnnnnnnnnnnnnnnnnnnnnnnnnnnnnnnnnnnnnnnnnnnnnnnnnnnnnnnnnnnnnnnnnnnnnnnnnnnnnnnnnnnnnnnnnnnnnnnnnnnnnnnnnnnnnnnnnnnnnnnnnnnnnnnnnnnnnnnnnnnnnnnnnnnnnnnnnnnnnnnnnnnnnnnnnnnnnnnnnnnnnnnnnnnnnnnnnnnnnnnnnnnnnnnnnnnnnnnnnnnnnnnnnnnnnnnnnnnnnnnnnnnnnnnnnnnnnnnnnnnnnnnnnnnnnnnnnnnnnnnnnnnnnnnnnnnnnnnnnnnnnnnnnnnnnnnnnnnnnnnnnnnnnnnnnnnnnnnnnnnnnnnnnnnnnnnnnnnnnnnnnnnnnnnnnnnnnnnnnnnnnnnnnnnnnnnnnnnnnnnnnnnnnnnnnnnnnnnnnnnnnnnnnnnnnnnnnnnnnnnnnnnnnnnnnnnnnnnnnnnnnnnnnnnnnnnnnnnnnnnnnnnnnnnnnnnnnnnnnnnnnnnnnnnnnnnnnnnnnnnnnnnnnnnnnnnnnnnnnnnnnnnnnnnnnnnnnnnnnnnnnnnnnnnnnnnnnnnnnnnnnnnnnnnnnnnnnnnnnnnnnnnnnnnnnnnnnnnnnnnnnnnnnnnnnnnnnnnnnnnnnnnnnnnnnnnnnnnnnnnnnnnnnnnnnnnnnnnnnnnnnnnnnnnnnnnnnnnnnnnnnnnnnnnnnnnnnnnnnnnnnnnnnnnnnnnnnnnnnnnnnnnnnnnnnnnnnnnnnnnnnnnnnnnnnnnnnnnnnnnnnnnnnnnnnnnnnnnnnnnnnnnnnnnnnnnnnnnnnnnnnnnnnnnnnnnnnnnnnnnnnnnnnnnnnnnnnnnnnnnnnnnnnnnnnnnnnnnnnnnnnnnnnnnnnnnnnnnnnnnnnnnnnnnnnnnnnnnnnnnnnnnnnnnnnnnnnnnnnnnnnnnnnnnnnnnnnnnnnnnnnnnnnnnnnnnnnnnnnnnnnnnnnnnnnnnnnnnnnnnnnnnnnnnnnnnnnnnnnnnnnnnnnnnnnnnnnnnnnnnnnnnnnnnnnnnnnnnnnnnnnnnnnnnnnnnnnnnnnnnnnnnnnnnnnnnnnnnnnnnnnnnnnnnnnnnnnnnnnnnnnnnnnnnnnnnnnnnnnnnnnnnnnnnnnnnnnnnnnnnnnnnnnnnnnnnnnnnnnnnnnnnnnnnnnnnnnnnnnnnnnnnnnnnnnnnnnnnnnnnnnnnnnnnnnnnnnnnnnnnnnnnnnnnnnnnnnnnnnnnnnnnnnnnnnnnnnnnnnnnnnnnnnnnnnnnnnnnnnnnnnnnnnnnnnnnnnnnnnnnnnnnnnnnnnnnnnnnnnnnnnnnnnnnnnnnnnnnnnnnnnnnnnnnnnnnnnnnnnnnnnnnnnnnnnnnnnnnnnnnnnnnnnnnnnnnnnnnnnnnnnnnnnnnnnnnnnnnnnnnnnnnnnnnnnnnnnnnnnnnnnnnnnnnnnnnnnnnnnnnnnnnnnnnnnnnnnnnnnnnnnnnnnnnnnnnnnnnnnnnnnnnnnnnnnnnnnnnnnnnnnnnnnnnnnnnnnnnnnnnnnnnnnnnnnnnnnnnnnnnnnnnnnnnnnnnnnnnnnnnnnnnnnnnnnnnnnnnnnnnnnnnnnnnnnnnnnnnnnnnnnnnnnnnnnnnnnnnnnnnnnnnnnnnnnnnnnnnnnnnnnnnnnnnnnnnnnnnnnnnnnnnnnnnnnnnnnnnnnnnnnnnnnnnnnnnnnnnnnnnnnnnnnnnnnnnnnnnnnnnnnnnnnnnnnnnnnnnnnnnnnnnnnnnnnnnnnnnnnnnnnnnnnnnnnnnnnnnnnnnnnnnnnnnnnnnnnnnnnnnnnnnnnnnnnnnnnnnnnnnnnnnnnnnnnnnnnnnnnnnnnnnnnnnnnnnnnnnnnnnnnnnnnnnnnnnnnnnnnnnnnnnnnnnnnnnnnnnnnnnnnnnnnnnnnnnnnnnnnnnnnnnnnnnnnnnnnnnnnnnnnnnnnnnnnnnnnnnnnnnnnnnnnnnnnnnnnnnnnnnnnnnnnnnnnnnnnnnnnnnnnnnnnnnnnnnnnnnnnnnnnnnnnnnnnnnnnnnnnnnnnnnnnnnnnnnnnnnnnnnnnnnnnnnnnnnnnnnnnnnnnnnnnnnnnnnnnnnnnnnnnnnnnnnnnnnnnnnnnnnnnnnnnnnnnnnnnnnnnnnnnnnnnnnnnnnnnnnnnnnnnnnnnnnnnnnnnnnnnnnnnnnnnnnnnnnnnnnnnnnnnnnnnnnnnnnnnnnnnnnnnnnnnnnnnnnnnnnnnnnnnnnnnnnnnnnnnnnnnnnnnnnnnnnnnnnnnnnnnnnnnnnnnnnnnnnnnnnnnnnnnnnnnnnnnnnnnnnnnnnnnnnnnnnnnnnnnnnnnnnnnnnnnnnnnnnnnnnnnnnnnnnnnnnnnnnnnnnnnnnnnnnnnnnnnnnnnnnnnnnnnnnnnnnnnnnnnnnnnnnnnnnnnnnnnnnnnnnnnnnnnnnnnnnnnnnnnnnnnnnnnnnnnnnnnnnnnnnnnnnnnnnnnnnnnnnnnnnnnnnnnnnnnnnnnnnnnnnnnnnnnnnnnnnnnnnnnnnnnnnnnnnnnnnnnnnnnnnnnnnnnnnnnnnnnnnnnnnnnnnnnnnnnnnnnnnnnnnnnnnnnnnnnnnnnnnnnnnnnnnnnnnnnnnnnnnnnnnnnnnnnnnnnnnnnnnnnnnnnnnnnnnnnnnnnnnnnnnnnnnnnnnnnnnnnnnnnnnnnnnnnnnnnnnnnnnnnnnnnnnnnnnnnnnnnnnnnnnnnnnnnnnnnnnnnnnnnnnnnnnnnnnnnnnnnnnnnnnnnnnnnnnnnnnnnnnnnnnnnnnnnnnnnnnnnnnnnnnnnnnnnnnnnnnnnnnnnnnnnnnnnnnnnnnnnnnnnnnnnnnnnnnnnnnnnnnnnnnnnnnnnnnnnnnnnnnnnnnnnnnnnnnnnnnnnnnnnnnnnnnnnnnnnnnnnnnnnnnnnnnnnnnnnnnnnnnnnnnnnnnnnnnnnnnnnnnnnnnnnnnnnnnnnnnnnnnnnnnnnnnnnnnnnnnnnnnnnnnnnnnnnnnnnnnnnnnnnnnnnnnnnnnnnnnnnnnnnnnnnnnnnnnnnnnnnnnnnnnnnnnnnnnnnnnnnnnnnnnnnnnnnnnnnnnnnnnnnnnnnnnnnnnnnnnnnnnnnnnnnnnnnnnnnnnnnnnnnnnnnnnnnnnnnnnnnnnnnnnnnnnnnnnnnnnnnnnnnnnnnnnnnnnnnnnnnnnnnnnnnnnnnnnnnnnnnnnnnnnnnnnnnnnnnnnnnnnnnnnnnnnnnnnnnnnnnnnnnnnnnnnnnnnnnnnnnnnnnnnnnnnnnnnnnnnnnnnnnnnnnnnnnnnnnnnnnnnnnnnnnnnnnnnnnnnnnnnnnnnnnnnnnnnnnnnnnnnnnnnnnnnnnnnnnnnnnnnnnnnnnnnnnnnnnnnnnnnnnnnnnnnnnnnnnnnnnnnnnnnnnnnnnnnnnnnnnnnnnnnnnnnnnnnnnnnnnnnnnnnnnnnnnnnnnnnnnnnnnnnnnnnnnnnnnnnnnnnnnnnnnnnnnnnnnnnnnnnnnnnnnnnnnnnnnnnnnnnnnnnnnnnnnnnnnnnnnnnnnnnnnnnnnnnnnnnnnnnnnnnnnnnnnnnnnnnnnnnnnnnnnnnnnnnnnnnnnnnnnnnnnnnnnnnnnnnnnnnnnnnnnnnnnnnnnnnnnnnnnnnnnnnnnnnnnnnnnnnnnnnnnnnnnnnnnnnnnnnnnnnnnnnnnnnnnnnnnnnnnnnnnnnnnnnnnnnnnnnnnnnnnnnnnnnnnnnnnnnnnnnnnnnnnnnnnnnnnnnnnnnnnnnnnnnnnnnnnnnnnnnnnnnnnnnnnnnnnnnnnnnnnnnnnnnnnnnnnnnnnnnnnnnnnnnnnnnnnnnnnnnnnnnnnnnnnnnnnnnnnnnnnnnnnnnnnnnnnnnnnnnnnnnnnnnnnnnnnnnnnnnnnnnnnnnnnnnnnnnnnnnnnnnnnnnnnnnnnnnnnnnnnnnnnnnnnnnnnnnnnnnnnnnnnnnnnnnnnnnnnnnnnnnnnnnnnnnnnnnnnnnnnnnnnnnnnnnnnnnnnnnnnnnnnnnnnnnnnnnnnnnnnnnnnnnnnnnnnnnnnnnnnnnnnnnnnnnnnnnnnnnnnnnnnnnnnnnnnnnnnnnnnnnnnnnnnnnnnnnnnnnnnnnnnnnnnnnnnnnnnnnnnnnnnnnnnnnnnnnnnnnnnnnnnnnnnnnnnnnnnnnnnnnnnnnnnnnnnnnnnnnnnnnnnnnnnnnnnnnnnnnnnnnnnnnnnnnnnnnnnnnnnnnnnnnnnnnnnnnnnnnnnnnnnnnnnnnnnnnnnnnnnnnnnnnnnnnnnnnnnnnnnnnnnnnnnnnnnnnnnnnnnnnnnnnnnnnnnnnnnnnnnnnnnnnnnnnnnnnnnnnnnnnnnnnnnnnnnnnnnnnnnnnnnnnnnnnnnnnnnnnnnnnnnnnnnnnnnnnnnnnnnnnnnnnnnnnnnnnnnnnnnnnnnnnnnnnnnnnnnnnnnnnnnnnnnnnnnnnnnnnnnnnnnnnnnnnnnnnnnnnnnnnnnnnnnnnnnnnnnnnnnnnnnnnnnnnnnnnnnnnnnnnnnnnnnnnnnnnnnnnnnnnnnnnnnnnnnnnnnnnnnnnnnnnnnnnnnnnnnnnnnnnnnnnnnnnnnnnnnnnnnnnnnnnnnnnnnnnnnnnnnnnnnnnnnnnnnnnnnnnnnnnnnnnnnnnnnnnnnnnnnnnnnnnnnnnnnnnnnnnnnnnnnnnnnnnnnnnnnnnnnnnnnnnnnnnnnnnnnnnnnnnnnnnnnnnnnnnnnnnnnnnnnnnnnnnnnnnnnnnnnnnnnnnnnnnnnnnnnnnnnnnnnnnnnnnnnnnnnnnnnnnnnnnnnnnnnnnnnnnnnnnnnnnnnnnnnnnnnnnnnnnnnnnnnnnnnnnnnnnnnnnnnnnnnnnnnnnnnnnnnnnnnnnnnnnnnnnnnnnnnnnnnnnnnnnnnnnnnnnnnnnnnnnnnnnnnnnnnnnnnnnnnnnnnnnnnnnnnnnnnnnnnnnnnnnnnnnnnnnnnnnnnnnnnnnnnnnnnnnnnnnnnnnnnnnnnnnnnnnnnnnnnnnnnnnnnnnnnnnnnnnnnnnnnnnnnnnnnnnnnnnnnnnnnnnnnnnnnnnnnnnnnnnnnnnnnnnnnnnnnnnnnnnnnnnnnnnnnnnnnnnnnnnnnnnnnnnnnnnnnnnnnnnnnnnnnnnnnnnnnnnnnnnnnnnnnnnnnnnnnnnnnnnnnnnnnnnnnnnnnnnnnnnnnnnnnnnnnnnnnnnnnnnnnnnnnnnnnnnnnnnnnnnnnnnnnnnnnnnnnnnnnnnnnnnnnnnnnnnnnnnnnnnnnnnnnnnnnnnnnnnnnnnnnnnnnnnnnnnnnnnnnnnnnnnnnnnnnnnnnnnnnnnnnnnnnnnnnnnnnnnnnnnnnnnnnnnnnnnnnnnnnnnnnnnnnnnnnnnnnnnnnnnnnnnnnnnnnnnnnnnnnnnnnnnnnnnnnnnnnnnnnnnnnnnnnnnnnnnnnnnnnnnnnnnnnnnnnnnnnnnnnnnnnnnnnnnnnnnnnnnnnnnnnnnnnnnnnnnnnnnnnnnnnnnnnnnnnnnnnnnnnnnnnnnnnnnnnnnnnnnnnnnnnnnnnnnnnnnnnnnnnnnnnnnnnnnnnnnnnnnnnnnnnnnnnnnnnnnnnnnnnnnnnnnnnnnnnnnnnnnnnnnnnnnnnnnnnnnnnnnnnnnnnnnnnnnnnnnnnnnnnnnnnnnnnnnnnnnnnnnnnnnnnnnnnnnnnnnnnnnnnnnnnnnnnnnnnnnnnnnnnnnnnnnnnnnnnnnnnnnnnnnnnnnnnnnnnnnnnnnnnnnnnnnnnnnnnnnnnnnnnnnnnnnnnnnnnnnnnnnnnnnnnnnnnnnnnnnnnnnnnnnnnnnnnnnnnnnnnnnnnnnnnnnnnnnnnnnnnnnnnnnnnnnnnnnnnnnnnnnnnnnnnnnnnnnnnnnnnnnnnnnnnnnnnnnnnnnnnnnnnnnnnnnnnnnnnnnnnnnnnnnnnnnnnnnnnnnnnnnnnnnnnnnnnnnnnnnnnnnnnnnnnnnnnnnnnnnnnnnnnnnnnnnnnnnnnnnnnnnnnnnnnnnnnnnnnnnnnnnnnnnnnnnnnnnnnnnnnnnnnnnnnnnnnnnnnnnnnnnnnnnnnnnnnnnnnnnnnnnnnnnnnnnnnnnnnnnnnnnnnnnnnnnnnnnnnnnnnnnnnnnnnnnnnnnnnnnnnnnnnnnnnnnnnnnnnnnnnnnnnnnnnnnnnnnnnnnnnnnnnnnnnnnnnnnnnnnnnnnnnnnnnnnnnnnnnnnnnnnnnnnnnnnnnnnnnnnnnnnnnnnnnnnnnnnnnnnnnnnnnnnnnnnnnnnnnnnnnnnnnnnnnnnnnnnnnnnnnnnnnnnnnnnnnnnnnnnnnnnnnnnnnnnnnnnnnnnnnnnnnnnnnnnnnnnnnnnnnnnnnnnnnnnnnnnnnnnnnnnnnnnnnnnnnnnnnnnnnnnnnnnnnnnnnnnnnnnnnnnnnnnnnnnnnnnnnnnnnnnnnnnnnnnnnnnnnnnnnnnnnnnnnnnnnnnnnnnnnnnnnnnnnnnnnnnnnnnnnnnnnnnnnnnnnnnnnnnnnnnnnnnnnnnnnnnnnnnnnnnnnnnnnnnnnnnnnnnnnnnnnnnnnnnnnnnnnnnnnnnnnnnnnnnnnnnnnnnnnnnnnnnnnnnnnnnnnnnnnnnnnnnnnnnnnnnnnnnnnnnnnnnnnnnnnnnnnnnnnnnnnnnnnnnnnnnnnnnnnnnnnnnnnnnnnnnnnnnnnnnnnnnnnnnnnnnnnnnnnnnnnnnnnnnnnnnnnnnnnnnnnnnnnnnnnnnnnnnnnnnnnnnnnnnnnnnnnnnnnnnnnnnnnnnnnnnnnnnnnnnnnnnnnnnnnnnnnnnnnnnnnnnnnnnnnnnnnnnnnnnnnnnnnnnnnnnnnnnnnnnnnnnnnnnnnnnnnnnnnnnnnnnnnnnnnnnnnnnnnnnnnnnnnnnnnnnnnnnnnnnnnnnnnnnnnnnnnnnnnnnnnnnnnnnnnnnnnnnnnnnnnnnnnnnnnnnnnnnnnnnnnnnnnnnnnnnnnnnnnnnnnnnnnnnnnnnnnnnnnnnnnnnnnnnnnnnnnnnnnnnnnnnnnnnnnnnnnnnnnnnnnnnnnnnnnnnnnnnnnnnnnnnnnnnnnnnnnnnnnnnnnnnnnnnnnnnnnnnnnnnnnnnnnnnnnnnnnnnnnnnnnnnnnnnnnnnnnnnnnnnnnnnnnnnnnnnnnnnnnnnnnnnnnnnnnnnnnnnnnnnnnnnnnnnnnnnnnnnnnnnnnnnnnnnnnnnnnnnnnnnnnnnnnnnnnnnnnnnnnnnnnnnnnnnnnnnnnnnnnnnnnnnnnnnnnnnnnnnnnnnnnnnnnnnnnnnnnnnnnnnnnnnnnnnnnnnnnnnnnnnnnnnnnnnnnnnnnnnnnnnnnnnnnnnnnnnnnnnnnnnnnnnnnnnnnnnnnnnnnnnnnnnnnnnnnnnnnnnnnnnnnnnnnnnnnnnnnnnnnnnnnnnnnnnnnnnnnnnnnnnnnnnnnnnnnnnnnnnnnnnnnnnnnnnnnnnnnnnnnnnnnnnnnnnnnnnnnnnnnnnnnnnnnnnnnnnnnnnnnnnnnnnnnnnnnnnnnnnnnnnnnnnnnnnnnnnnnnnnnnnnnnnnnnnnnnnnnnnnnnnnnnnnnnnnnnnnnnnnnnnnnnnnnnnnnnnnnnnnnnnnnnnnnnnnnnnnnnnnnnnnnnnnnnnnnnnnnnnnnnnnnnnnnnnnnnnnnnnnnnnnnnnnnnnnnnnnnnnnnnnnnnnnnnnnnnnnnnnnnnnnnnnnnnnnnnnnnnnnnnnnnnnnnnnnnnnnnnnnnnnnnnnnnnnnnnnnnnnnnnnnnnnnnnnnnnnnnnnnnnnnnnnnnnnnnnnnnnnnnnnnnnnnnnnnnnnnnnnnnnnnnnnnnnnnnnnnnnnnnnnnnnnnnnnnnnnnnnnnnnnnnnnnnnnnnnnnnnnnnnnnnnnnnnnnnnnnnnnnnnnnnnnnnnnnnnnnnnnnnnnnnnnnnnnnnnnnnnnnnnnnnnnnnnnnnnnnnnnnnnnnnnnnnnnnnnnnnnnnnnnnnnnnnnnnnnnnnnnnnnnnnnnnnnnnnnnnnnnnnnnnnnnnnnnnnnnnnnnnnnnnnnnnnnnnnnnnnnnnnnnnnnnnnnnnnnnnnnnnnnnnnnnnnnnnnnnnnnnnnnnnnnnnnnnnnnnnnnnnnnnnnnnnnnnnnnnnnnnnnnnnnnnnnnnnnnnnnnnnnnnnnnnnnnnnnnnnnnnnnnnnnnnnnnnnnnnnnnnnnnnnnnnnnnnnnnnnnnnnnnnnnnnnnnnnnnnnnnnnnnnnnnnnnnnnnnnnnnnnnnnnnnnnnnnnnnnnnnnnnnnnnnnnnnnnnnnnnnnnnnnnnnnnnnnnnnnnnnnnnnnnnnnnnnnnnnnnnnnnnnnnnnnnnnnnnnnnnnnnnnnnnnnnnnnnnnnnnnnnnnnnnnnnnnnnnnnnnnnnnnnnnnnnnnnnnnnnnnnnnnnnnnnnnnnnnnnnnnnnnnnnnnnnnnnnnnnnnnnnnnnnnnnnnnnnnnnnnnnnnnnnnnnnnnnnnnnnnnnnnnnnnnnnnnnnnnnnnnnnnnnnnnnnnnnnnnnnnnnnnnnnnnnnnnnnnnnnnnnnnnnnnnnnnnnnnnnnnnnnnnnnnnnnnnnnnnnnnnnnnnnnnnnnnnnnnnnnnnnnnnnnnnnnnnnnnnnnnnnnnnnnnnnnnnnnnnnnnnnnnnnnnnnnnnnnnnnnnnnnnnnnnnnnnnnnnnnnnnnnnnnnnnnnnnnnnnnnnnnnnnnnnnnnnnnnnnnnnnnnnnnnnnnnnnnnnnnnnnnnnnnnnnnnnnnnnnnnnnnnnnnnnnnnnnnnnnnnnnnnnnnnnnnnnnnnnnnnnnnnnnnnnnnnnnnnnnnnnnnnnnnnnnnnnnnnnnnnnnnnnnnnnnnnnnnnnnnnnnnnnnnnnnnnnnnnnnnnnnnnnnnnnnnnnnnnnnnnnnnnnnnnnnnnnnnnnnnnnnnnnnnnnnnnnnnnnnnnnnnnnnnnnnnnnnnnnnnnnnnnnnnnnnnnnnnnnnnnnnnnnnnnnnnnnnnnnnnnnnnnnnnnnnnnnnnnnnnnnnnnnnnnnnnnnnnnnnnnnnnnnnnnnnnnnnnnnnnnnnnnnnnnnnnnnnnnnnnnnnnnnnnnnnnnnnnnnnnnnnnnnnnnnnnnnnnnnnnnnnnnnnnnnnnnnnnnnnnnnnnnnnnnnnnnnnnnnnnnnnnnnnnnnnnnnnnnnnnnnnnnnnnnnnnnnnnnnnnnnnnnnnnnnnnnnnnnnnnnnnnnnnnnnnnnnnnnnnnnnnnnnnnnnnnnnnnnnnnnnnnnnnnnnnnnnnnnnnnnnnnnnnnnnnnnnnnnnnnnnnnnnnnnnnnnnnnnnnnnnnnnnnnnnnnnnnnnnnnnnnnnnnnnnnnnnnnnnnnnnnnnnnnnnnnnnnnnnnnnnnnnnnnnnnnnnnnnnnnnnnnnnnnnnnnnnnnnnnnnnnnnnnnnnnnnnnnnnnnnnnnnnnnnnnnnnnnnnnnnnnnnnnnnnnnnnnnnnnnnnnnnnnnnnnnnnnnnnnnnnnnnnnnnnnnnnnnnnnnnnnnnnnnnnnnnnnnnnnnnnnnnnnnnnnnnnnnnnnnnnnnnnnnnnnnnnnnnnnnnnnnnnnnnnnnnnnnnnnnnnnnnnnnnnnnnnnnnnnnnnnnnnnnnnnnnnnnnnnnnnnnnnnnnnnnnnnnnnnnnnnnnnnnnnnnnnnnnnnnnnnnnnnnnnnnnnnnnnnnnnnnnnnnnnnnnnnnnnnnnnnnnnnnnnnnnnnnnnnnnnnnnnnnnnnnnnnnnnnnnnnnnnnnnnnnnnnnnnnnnnnnnnnnnnnnnnnnnnnnnnnnnnnnnnnnnnnnnnnnnnnnnnnnnnnnnnnnnnnnnnnnnnnnnnnnnnnnnnnnnnnnnnnnnnnnnnnnnnnnnnnnnnnnnnnnnnnnnnnnnnnnnnnnnnnnnnnnnnnnnnnnnnnnnnnnnnnnnnnnnnnnnnnnnnnnnnnnnnnnnnnnnnnnnnnnnnnnnnnnnnnnnnnnnnnnnnnnnnnnnnnnnnnnnnnnnnnnnnnnnnnnnnnnnnnnnnnnnnnnnnnnnnnnnnnnnnnnnnnnnnnnnnnnnnnnnnnnnnnnnnnnnnnnnnnnnnnnnnnnnnnnnnnnnnnnnnnnnnnnnnnnnnnnnnnnnnnnnnnnnnnnnnnnnnnnnnnnnnnnnnnnnnnnnnnnnnnnnnnnnnnnnnnnnnnnnnnnnnnnnnnnnnnnnnnnnnnnnnnnnnnnnnnnnnnnnnnnnnnnnnnnnnnnnnnnnnnnnnnnnnnnnnnnnnnnnnnnnnnnnnnnnnnnnnnnnnnnnnnnnnnnnnnnnnnnnnnnnnnnnnnnnnnnnnnnnnnnnnnnnnnnnnnnnnnnnnnnnnnnnnnnnnnnnnnnnnnnnnnnnnnnnnnnnnnnnnnnnnnnnnnnnnnnnnnnnnnnnnnnnnnnnnnnnnnnnnnnnnnnnnnnnnnnnnnnnnnnnnnnnnnnnnnnnnnnnnnnnnnnnnnnnnnnnnnnnnnnnnnnnnnnnnnnnnnnnnnnnnnnnnnnnnnnnnnnnnnnnnnnnnnnnnnnnnnnnnnnnnnnnnnnnnnnnnnnnnnnnnnnnnnnnnnnnnnnnnnnnnnnnnnnnnnnnnnnnnnnnnnnnnnnnnnnnnnnnnnnnnnnnnnnnnnnnnnnnnnnnnnnnnnnnnnnnnnnnnnnnnnnnnnnnnnnnnnnnnnnnnnnnnnnnnnnnnnnnnnnnnnnnnnnnnnnnnnnnnnnnnnnnnnnnnnnnnnnnnnnnnnnnnnnnnnnnnnnnnnnnnnnnnnnnnnnnnnnnnnnnnnnnnnnnnnnnnnnnnnnnnnnnnnnnnnnnnnnnnnnnnnnnnnnnnnnnnnnnnnnnnnnnnnnnnnnnnnnnnnnnnnnnnnnnnnnnnnnnnnnnnnnnnnnnnnnnnnnnnnnnnnnnnnnnnnnnnnnnnnnnnnnnnnnnnnnnnnnnnnnnnnnnnnnnnnnnnnnnnnnnnnnnnnnnnnnnnnnnnnnnnnnnnnnnnnnnnnnnnnnnnnnnnnnnnnnnnnnnnnnnnnnnnnnnnnnnnnnnnnnnnnnnnnnnnnnnnnnnnnnnnnnnnnnnnnnnnnnnnnnnnnnnnnnnnnnnnnnnnnnnnnnnnnnnnnnnnnnnnnnnnnnnnnnnnnnnnnnnnnnnnnnnnnnnnnnnnnnnnnnnnnnnnnnnnnnnnnnnnnnnnnnnnnnnnnnnnnnnnnnnnnnnnnnnnnnnnnnnnnnnnnnnnnnnnnnnnnnnnnnnnnnnnnnnnnnnnnnnnnnnnnnnnnnnnnnnnnnnnnnnnnnnnnnnnnnnnnnnnnnnnnnnnnnnnnnnnnnnnnnnnnnnnnnnnnnnnnnnnnnnnnnnnnnnnnnnnnnnnnnnnnnnnnnnnnnnnnnnnnnnnnnnnnnnnnnnnnnnnnnnnnnnnnnnnnnnnnnnnnnnnnnnnnnnnnnnnnnnnnnnnnnnnnnnnnnnnnnnnnnnnnnnnnnnnnnnnnnnnnnnnnnnnnnnnnnnnnnnnnnnnnnnnnnnnnnnnnnnnnnnnnnnnnnnnnnnnnnnnnnnnnnnnnnnnnnnnnnnnnnnnnnnnnnnnnnnnnnnnnnnnnnnnnnnnnnnnnnnnnnnnnnnnnnnnnnnnnnnnnnnnnnnnnnnnnnnnnnnnnnnnnnnnnnnnnnnnnnnnnnnnnnnnnnnnnnnnnnnnnnnnnnnnnnnnnnnnnnnnnnnnnnnnnnnnnnnnnnnnnnnnnnnnnnnnnnnnnnnnnnnnnnnnnnnnnnnnnnnnnnnnnnnnnnnnnnnnnnnnnnnnnnnnnnnnnnnnnnnnnnnnnnnnnnnnnnnnnnnnnnnnnnnnnnnnnnnnnnnnnnnnnnnnnnnnnnnnnnnnnnnnnnnnnnnnnnnnnnnnnnnnnnnnnnnnnnnnnnnnnnnnnnnnnnnnnnnnnnnnnnnnnnnnnnnnnnnnnnnnnnnnnnnnnnnnnnnnnnnnnnnnnnnnnnnnnnnnnnnnnnnnnnnnnnnnnnnnnnnnnnnnnnnnnnnnnnnnnnnnnnnnnnnnnnnnnnnnnnnnnnnnnnnnnnnnnnnnnnnnnnnnnnnnnnnnnnnnnnnnnnnnnnnnnnnnnnnnnnnnnnnnnnnnnnnnnnnnnnnnnnnnnnnnnnnnnnnnnnnnnnnnnnnnnnnnnnnnnnnnnnnnnnnnnnnnnnnnnnnnnnnnnnnnnnnnnnnnnnnnnnnnnnnnnnnnnnnnnnnnnnnnnnnnnnnnnnnnnnnnnnnnnnnnnnnnnnnnnnnnnnnnnnnnnnnnnnnnnnnnnnnnnnnnnnnnnnnnnnnnnnnnnnnnnnnnnnnnnnnnnnnnnnnnnnnnnnnnnnnnnnnnnnnnnnnnnnnnnnnnnnnnnnnnnnnnnnnnnnnnnnnnnnnnnnnnnnnnnnnnnnnnnnnnnnnnnnnnnnnnnnnnnnnnnnnnnnnnnnnnnnnnnnnnnnnnnnnnnnnnnnnnnnnnnnnnnnnnnnnnnnnnnnnnnnnnnnnnnnnnnnnnnnnnnnnnnnnnnnnnnnnnnnnnnnnnnnnnnnnnnnnnnnnnnnnnnnnnnnnnnnnnnnnnnnnnnnnnnnnnnnnnnnnnnnnnnnnnnnnnnnnnnnnnnnnnnnnnnnnnnnnnnnnnnnnnnnnnnnnnnnnnnnnnnnnnnnnnnnnnnnnnnnnnnnnnnnnnnnnnnnnnnnnnnnnnnnnnnnnnnnnnnnnnnnnnnnnnnnnnnnnnnnnnnnnnnnnnnnnnnnnnnnnnnnnnnnnnnnnnnnnnnnnnnnnnnnnnnnnnnnnnnnnnnnnnnnnnnnnnnnnnnnnnnnnnnnnnnnnnnnnnnnnnnnnnnnnnnnnnnnnnnnnnnnnnnnnnnnnnnnnnnnnnnnnnnnnnnnnnnnnnnnnnnnnnnnnnnnnnnnnnnnnnnnnnnnnnnnnnnnnnnnnnnnnnnnnnnnnnnnnnnnnnnnnnnnnnnnnnnnnnnnnnnnnnnnnnnnnnnnnnnnnnnnnnnnnnnnnnnnnnnnnnnnnnnnnnnnnnnnnnnnnnnnnnnnnnnnnnnnnnnnnnnnnnnnnnnnnnnnnnnnnnnnnnnnnnnnnnnnnnnnnnnnnnnnnnnnnnnnnnnnnnnnnnnnnnnnnnnnnnnnnnnnnnnnnnnnnnnnnnnnnnnnnnnnnnnnnnnnnnnnnnnnnnnnnnnnnnnnnnnnnnnnnnnnnnnnnnnnnnnnnnnnnnnnnnnnnnnnnnnnnnnnnnnnnnnnnnnnnnnnnnnnnnnnnnnnnnnnnnnnnnnnnnnnnnnnnnnnnnnnnnnnnnnnnnnnnnnnnnnnnnnnnnnnnnnnnnnnnnnnnnnnnnnnnnnnnnnnnnnnnnnnnnnnnnnnnnnnnnnnnnnnnnnnnnnnnnnnnnnnnnnnnnnnnnnnnnnnnnnnnnnnnnnnnnnnnnnnnnnnnnnnnnnnnnnnnnnnnnnnnnnnnnnnnnnnnnnnnnnnnnnnnnnnnnnnnnnnnnnnnnnnnnnnnnnnnnnnnnnnnnnnnnnnnnnnnnnnnnnnnnnnnnnnnnnnnnnnnnnnnnnnnnnnnnnnnnnnnnnnnnnnnnnnnnnnnnnnnnnnnnnnnnnnnnnnnnnnnnnnnnnnnnnnnnnnnnnnnnnnnnnnnnnnnnnnnnnnnnnnnnnnnnnnnnnnnnnnnnnnnnnnnnnnnnnnnnnnnnnnnnnnnnnnnnnnnnnnnnnnnnnnnnnnnnnnnnnnnnnnnnnnnnnnnnnnnnnnnnnnnnnnnnnnnnnnnnnnnnnnnnnnnnnnnnnnnnnnnnnnnnnnnnnnnnnnnnnnnnnnnnnnnnnnnnnnnnnnnnnnnnnnnnnnnnnnnnnnnnnnnnnnnnnnnnnnnnnnnnnnnnnnnnnnnnnnnnnnnnnnnnnnnnnnnnnnnnnnnnnnnnnnnnnnnnnnnnnnnnnnnnnnnnnnnnnnnnnnnnnnnnnnnnnnnnnnnnnnnnnnnnnnnnnnnnnnnnnnnnnnnnnnnnnnnnnnnnnnnnnnnnnnnnnnnnnnnnnnnnnnnnnnnnnnnnnnnnnnnnnnnnnnnnnnnnnnnnnnnnnnnnnnnnnnnnnnnnnnnnnnnnnnnnnnnnnnnnnnnnnnnnnnnnnnnnnnnnnnnnnnnnnnnnnnnnnnnnnnnnnnnnnnnnnnnnnnnnnnnnnnnnnnnnnnnnnnnnnnnnnnnnnnnnnnnnnnnnnnnnnnnnnnnnnnnnnnnnnnnnnnnnnnnnnnnnnnnnnnnnnnnnnnnnnnnnnnnnnnnnnnnnnnnnnnnnnnnnnnnnnnnnnnnnnnnnnnnnnnnnnnnnnnnnnnnnnnnnnnnnnnnnnnnnnnnnnnnnnnnnnnnnnnnnnnnnnnnnnnnnnnnnnnnnnnnnnnnnnnnnnnnnnnnnnnnnnnnnnnnnnnnnnnnnnnnnnnnnnnnnnnnnnnnnnnnnnnnnnnnnnnnnnnnnnnnnnnnnnnnnnnnnnnnnnnnnnnnnnnnnnnnnnnnnnnnnnnnnnnnnnnnnnnnnnnnnnnnnnnnnnnnnnnnnnnnnnnnnnnnnnnnnnnnnnnnnnnnnnnnnnnnnnnnnnnnnnnnnnnnnnnnnnnnnnnnnnnnnnnnnnnnnnnnnnnnnnnnnnnnnnnnnnnnnnnnnnnnnnnnnnnnnnnnnnnnnnnnnnnnnnnnnnnnnnnnnnnnnnnnnnnnnnnnnnnnnnnnnnnnnnnnnnnnnnnnnnnnnnnnnnnnnnnnnnnnnnnnnnnnnnnnnnnnnnnnnnnnnnnnnnnnnnnnnnnnnnnnnnnnnnnnnnnnnnnnnnnnnnnnnnnnnnnnnnnnnnnnnnnnnnnnnnnnnnnnnnnnnnnnnnnnnnnnnnnnnnnnnnnnnnnnnnnnnnnnnnnnnnnnnnnnnnnnnnnnnnnnnnnnnnnnnnnnnnnnnnnnnnnnnnnnnnnnnnnnnnnnnnnnnnnnnnnnnnnnnnnnnnnnnnnnnnnnnnnnnnnnnnnnnnnnnnnnnnnnnnnnnnnnnnnnnnnnnnnnnnnnnnnnnnnnnnnnnnnnnnnnnnnnnnnnnnnnnnnnnnnnnnnnnnnnnnnnnnnnnnnnnnnnnnnnnnnnnnnnnnnnnnnnnnnnnnnnnnnnnnnnnnnnnnnnnnnnnnnnnnnnnnnnnnnnnnnnnnnnnnnnnnnnnnnnnnnnnnnnnnnnnnnnnnnnnnnnnnnnnnnnnnnnnnnnnnnnnnnnnnnnnnnnnnnnnnnnnnnnnnnnnnnnnnnnnnnnnnnnnnnnnnnnnnnnnnnnnnnnnnnnnnnnnnnnnnnnnnnnnnnnnnnnnnnnnnnnnnnnnnnnnnnnnnnnnnnnnnnnnnnnnnnnnnnnnnnnnnnnnnnnnnnnnnnnnnnnnnnnnnnnnnnnnnnnnnnnnnnnnnnnnnnnnnnnnnnnnnnnnnnnnnnnnnnnnnnnnnnnnnnnnnnnnnnnnnnnnnnnnnnnnnnnnnnnnnnnnnnnnnnnnnnnnnnnnnnnnnnnnnnnnnnnnnnnnnnnnnnnnnnnnnnnnnnnnnnnnnnnnnnnnnnnnnnnnnnnnnnnnnnnnnnnnnnnnnnnnnnnnnnnnnnnnnnnnnnnnnnnnnnnnnnnnnnnnnnnnnnnnnnnnnnnnnnnnnnnnnnnnnnnnnnnnnnnnnnnnnnnnnnnnnnnnnnnnnnnnnnnnnnnnnnnnnnnnnnnnnnnnnnnnnnnnnnnnnnnnnnnnnnnnnnnnnnnnnnnnnnnnnnnnnnnnnnnnnnnnnnnnnnnnnnnnnnnnnnnnnnnnnnnnnnnnnnnnnnnnnnnnnnnnnnnnnnnnnnnnnnnnnnnnnnnnnnnnnnnnnnnnnnnnnnnnnnnnnnnnnnnnnnnnnnnnnnnnnnnnnnnnnnnnnnnnnnnnnnnnnnnnnnnnnnnnnnnnnnnnnnnnnnnnnnnnnnnnnnnnnnnnnnnnnnnnnnnnnnnnnnnnnnnnnnnnnnnnnnnnnnnnnnnnnnnnnnnnnnnnnnnnnnnnnnnnnnnnnnnnnnnnnnnnnnnnnnnnnnnnnnnnnnnnnnnnnnnnnnnnnnnnnnnnnnnnnnnnnnnnnnnnnnnnnnnnnnnnnnnnnnnnnnnnnnnnnnnnnnnnnnnnnnnnnnnnnnnnnnnnnnnnnnnnnnnnnnnnnnnnnnnnnnnnnnnnnnnnnnnnnnnnnnnnnnnnnnnnnnnnnnnnnnnnnnnnnnnnnnnnnnnnnnnnnnnnnnnnnnnnnnnnnnnnnnnnnnnnnnnnnnnnnnnnnnnnnnnnnnnnnnnnnnnnnnnnnnnnnnnnnnnnnnnnnnnnnnnnnnnnnnnnnnnnnnnnnnnnnnnnnnnnnnnnnnnnnnnnnnnnnnnnnnnnnnnnnnnnnnnnnnnnnnnnnnnnnnnnnnnnnnnnnnnnnnnnnnnnnnnnnnnnnnnnnnnnnnnnnnnnnnnnnnnnnnnnnnnnnnnnnnnnnnnnnnnnnnnnnnnnnnnnnnnnnnnnnnnnnnnnnnnnnnnnnnnnnnnnnnnnnnnnnnnnnnnnnnnnnnnnnnnnnnnnnnnnnnnnnnnnnnnnnnnnnnnnnnnnnnnnnnnnnnnnnnnnnnnnnnnnnnnnnnnnnnnnnnnnnnnnnnnnnnnnnnnnnnnnnnnnnnnnnnnnnnnnnnnnnnnnnnnnnnnnnnnnnnnnnnnnnnnnnnnnnnnnnnnnnnnnnnnnnnnnnnnnnnnnnnnnnnnnnnnnnnnnnnnnnnnnnnnnnnnnnnnnnnnnnnnnnnnnnnnnnnnnnnnnnnnnnnnnnnnnnnnnnnnnnnnnnnnnnnnnnnnnnnnnnnnnnnnnnnnnnnnnnnnnnnnnnnnnnnnnnnnnnnnnnnnnnnnnnnnnnnnnnnnnnnnnnnnnnnnnnnnnnnnnnnnnnnnnnnnnnnnnnnnnnnnnnnnnnnnnnnnnnnnnnnnnnnnnnnnnnnnnnnnnnnnnnnnnnnnnnnnnnnnnnnnnnnnnnnnnnnnnnnnnnnnnnnnnnnnnnnnnnnnnnnnnnnnnnnnnnnnnnnnnnnnnnnnnnnnnnnnnnnnnnnnnnnnnnnnnnnnnnnnnnnnnnnnnnnnnnnnnnnnnnnnnnnnnnnnnnnnnnnnnnnnnnnnnnnnnnnnnnnnnnnnnnnnnnnnnnnnnnnnnnnnnnnnnnnnnnnnnnnnnnnnnnnnnnnnnnnnnnnnnnnnnnnnnnnnnnnnnnnnnnnnnnnnnnnnnnnnnnnnnnnnnnnnnnnnnnnnnnnnnnnnnnnnnnnnnnnnnnnnnnnnnnnnnnnnnnnnnnnnnnnnnnnnnnnnnnnnnnnnnnnnnnnnnnnnnnnnnnnnnnnnnnnnnnnnnnnnnnnnnnnnnnnnnnnnnnnnnnnnnnnnnnnnnnnnnnnnnnnnnnnnnnnnnnnnnnnnnnnnnnnnnnnnnnnnnnnnnnnnnnnnnnnnnnnnnnnnnnnnnnnnnnnnnnnnnnnnnnnnnnnnnnnnnnnnnnnnnnnnnnnnnnnnnnnnnnnnnnnnnnnnnnnnnnnnnnnnnnnnnnnnnnnnnnnnnnnnnnnnnnnnnnnnnnnnnnnnnnnnnnnnnnnnnnnnnnnnnnnnnnnnnnnnnnnnnnnnnnnnnnnnnnnnnnnnnnnnnnnnnnnnnnnnnnnnnnnnnnnnnnnnnnnnnnnnnnnnnnnnnnnnnnnnnnnnnnnnnnnnnnnnnnnnnnnnnnnnnnnnnnnnnnnnnnnnnnnnnnnnnnnnnnnnnnnnnnnnnnnnnnnnnnnnnnnnnnnnnnnnnnnnnnnnnnnnnnnnnnnnnnnnnnnnnnnnnnnnnnnnnnnnnnnnnnnnnnnnnnnnnnnnnnnnnnnnnnnnnnnnnnnnnnnnnnnnnnnnnnnnnnnnnnnnnnnnnnnnnnnnnnnnnnnnnnnnnnnnnnnnnnnnnnnnnnnnnnnnnnnnnnnnnnnnnnnnnnnnnnnnnnnnnnnnnnnnnnnnnnnnnnnnnnnnnnnnnnnnnnnnnnnnnnnnnnnnnnnnnnnnnnnnnnnnnnnnnnnnnnnnnnnnnnnnnnnnnnnnnnnnnnnnnnnnnnnnnnnnnnnnnnnnnnnnnnnnnnnnnnnnnnnnnnnnnnnnnnnnnnnnnnnnnnnnnnnnnnnnnnnnnnnnnnnnnnnnnnnnnnnnnnnnnnnnnnnnnnnnnnnnnnnnnnnnnnnnnnnnnnnnnnnnnnnnnnnnnnnnnnnnnnnnnnnnnnnnnnnnnnnnnnnnnnnnnnnnnnnnnnnnnnnnnnnnnnnnnnnnnnnnnnnnnnnnnnnnnnnnnnnnnnnnnnnnnnnnnnnnnnnnnnnnnnnnnnnnnnnnnnnnnnnnnnnnnnnnnnnnnnnnnnnnnnnnnnnnnnnnnnnnnnnnnnnnnnnnnnnnnnnnnnnnnnnnnnnnnnnnnnnnnnnnnnnnnnnnnnnnnnnnnnnnnnnnnnnnnnnnnnnnnnnnnnnnnnnnnnnnnnnnnnnnnnnnnnnnnnnnnnnnnnnnnnnnnnnnnnnnnnnnnnnnnnnnnnnnnnnnnnnnnnnnnnnnnnnnnnnnnnnnnnnnnnnnnnnnnnnnnnnnnnnnnnnnnnnnnnnnnnnnnnnnnnnnnnnnnnnnnnnnnnnnnnnnnnnnnnnnnnnnnnnnnnnnnnnnnnnnnnnnnnnnnnnnnnnnnnnnnnnnnnnnnnnnnnnnnnnnnnnnnnnnnnnnnnnnnnnnnnnnnnnnnnnnnnnnnnnnnnnnnnnnnnnnnnnnnnnnnnnnnnnnnnnnnnnnnnnnnnnnnnnnnnnnnnnnnnnnnnnnnnnnnnnnnnnnnnnnnnnnnnnnnnnnnnnnnnnnnnnnnnnnnnnnnnnnnnnnnnnnnnnnnnnnnnnnnnnnnnnnnnnnnnnnnnnnnnnnnnnnnnnnnnnnnnnnnnnnnnnnnnnnnnnnnnnnnnnnnnnnnnnnnnnnnnnnnnnnnnnnnnnnnnnnnnnnnnnnnnnnnnnnnnnnnnnnnnnnnnnnnnnnnnnnnnnnnnnnnnnnnnnnnnnnnnnnnnnnnnnnnnnnnnnnnnnnnnnnnnnnnnnnnnnnnnnnnnnnnnnnnnnnnnnnnnnnnnnnnnnnnnnnnnnnnnnnnnnnnnnnnnnnnnnnnnnnnnnnnnnnnnnnnnnnnnnnnnnnnnnnnnnnnnnnnnnnnnnnnnnnnnnnnnnnnnnnnnnnnnnnnnnnnnnnnnnnnnnnnnnnnnnnnnnnnnnnnnnnnnnnnnnnnnnnnnnnnnnnnnnnnnnnnnnnnnnnnnnnnnnnnnnnnnnnnnnnnnnnnnnnnnnnnnnnnnnnnnnnnnnnnnnnnnnnnnnnnnnnnnnnnnnnnnnnnnnnnnnnnnnnnnnnnnnnnnnnnnnnnnnnnnnnnnnnnnnnnnnnnnnnnnnnnnnnnnnnnnnnnnnnnnnnnnnnnnnnnnnnnnnnnnnnnnnnnnnnnnnnnnnnnnnnnnnnnnnnnnnnnnnnnnnnnnnnnnnnnnnnnnnnnnnnnnnnnnnnnnnnnnnnnnnnnnnnnnnnnnnnnnnnnnnnnnnnnnnnnnnnnnnnnnnnnnnnnnnnnnnnnnnnnnnnnnnnnnnnnnnnnnnnnnnnnnnnnnnnnnnnnnnnnnnnnnnnnnnnnnnnnnnnnnnnnnnnnnnnnnnnnnnnnnnnnnnnnnnnnnnnnnnnnnnnnnnnnnnnnnnnnnnnnnnnnnnnnnnnnnnnnnnnnnnnnnnnnnnnnnnnnnnnnnnnnnnnnnnnnnnnnnnnnnnnnnnnnnnnnnnnnnnnnnnnnnnnnnnnnnnnnnnnnnnnnnnnnnnnnnnnnnnnnnnnnnnnnnnnnnnnnnnnnnnnnnnnnnnnnnnnnnnnnnnnnnnnnnnnnnnnnnnnnnnnnnnnnnnnnnnnnnnnnnnnnnnnnnnnnnnnnnnnnnnnnnnnnnnnnnnnnnnnnnnnnnnnnnnnnnnnnnnnnnnnnnnnnnnnnnnnnnnnnnnnnnnnnnnnnnnnnnnnnnnnnnnnnnnnnnnnnnnnnnnnnnnnnnnnnnnnnnnnnnnnnnnnnnnnnnnnnnnnnnnnnnnnnnnnnnnnnnnnnnnnnnnnnnnnnnnnnnnnnnnnnnnnnnnnnnnnnnnnnnnnnnnnnnnnnnnnnnnnnnnnnnnnnnnnnnnnnnnnnnnnnnnnnnnnnnnnnnnnnnnnnnnnnnnnnnnnnnnnnnnnnnnnnnnnnnnnnnnnnnnnnnnnnnnnnnnnnnnnnnnnnnnnnnnnnnnnnnnnnnnnnnnnnnnnnnnnnnnnnnnnnnnnnnnnnnnnnnnnnnnnnnnnnnnnnnnnnnnnnnnnnnnnnnnnnnnnnnnnnnnnnnnnnnnnnnnnnnnnnnnnnnnnnnnnnnnnnnnnnnnnnnnnnnnnnnnnnnnnnnnnnnnnnnnnnnnnnnnnnnnnnnnnnnnnnnnnnnnnnnnnnnnnnnnnnnnnnnnnnnnnnnnnnnnnnnnnnnnnnnnnnnnnnnnnnnnnnnnnnnnnnnnnnnnnnnnnnnnnnnnnnnnnnnnnnnnnnnnnnnnnnnnnnnnnnnnnnnnnnnnnnnnnnnnnnnnnnnnnnnnnnnnnnnnnnnnnnnnnnnnnnnnnnnnnnnnnnnnnnnnnnnnnnnnnnnnnnnnnnnnnnnnnnnnnnnnnnnnnnnnnnnnnnnnnnnnnnnnnnnnnnnnnnnnnnnnnnnnnnnnnnnnnnnnnnnnnnnnnnnnnnnnnnnnnnnnnnnnnnnnnnnnnnnnnnnnnnnnnnnnnnnnnnnnnnnnnnnnnnnnnnnnnnnnnnnnnnnnnnnnnnnnnnnnnnnnnnnnnnnnnnnnnnnnnnnnnnnnnnnnnnnnnnnnnnnnnnnnnnnnnnnnnnnnnnnnnnnnnnnnnnnnnnnnnnnnnnnnnnnnnnnnnnnnnnnnnnnnnnnnnnnnnnnnnnnnnnnnnnnnnnnnnnnnnnnnnnnnnnnnnnnnnnnnnnnnnnnnnnnnnnnnnnnnnnnnnnnnnnnnnnnnnnnnnnnnnnnnnnnnnnnnnnnnnnnnnnnnnnnnnnnnnnnnnnnnnnnnnnnnnnnnnnnnnnnnnnnnnnnnnnnnnnnnnnnnnnnnnnnnnnnnnnnnnnnnnnnnnnnnnnnnnnnnnnnnnnnnnnnnnnnnnnnnnnnnnnnnnnnnnnnnnnnnnnnnnnnnnnnnnnnnnnnnnnnnnnnnnnnnnnnnnnnnnnnnnnnnnnnnnnnnnnnnnnnnnnnnnnnnnnnnnnnnnnnnnnnnnnnnnnnnnnnnnnnnnnnnnnnnnnnnnnnnnnnnnnnnnnnnnnnnnnnnnnnnnnnnnnnnnnnnnnnnnnnnnnnnnnnnnnnnnnnnnnnnnnnnnnnnnnnnnnnnnnnnnnnnnnnnnnnnnnnnnnnnnnnnnnnnnnnnnnnnnnnnnnnnnnnnnnnnnnnnnnnnnnnnnnnnnnnnnnnnnnnnnnnnnnnnnnnnnnnnnnnnnnnnnnnnnnnnnnnnnnnnnnnnnnnnnnnnnnnnnnnnnnnnnnnnnnnnnnnnnnnnnnnnnnnnnnnnnnnnnnnnnnnnnnnnnnnnnnnnnnnnnnnnnnnnnnnnnnnnnnnnnnnnnnnnnnnnnnnnnnnnnnnnnnnnnnnnnnnnnnnnnnnnnnnnnnnnnnnnnnnnnnnnnnnnnnnnnnnnnnnnnnnnnnnnnnnnnnnnnnnnnnnnnnnnnnnnnnnnnnnnnnnnnnnnnnnnnnnnnnnnnnnnnnnnnnnnnnnnnnnnnnnnnnnnnnnnnnnnnnnnnnnnnnnnnnnnnnnnnnnnnnnnnnnnnnnnnnnnnnnnnnnnnnnnnnnnnnnnnnnnnnnnnnnnnnnnnnnnnnnnnnnnnnnnnnnnnnnnnnnnnnnnnnnnnnnnnnnnnnnnnnnnnnnnnnnnnnnnnnnnnnnnnnnnnnnnnnnnnnnnnnnnnnnnnnnnnnnnnnnnnnnnnnnnnnnnnnnnnnnnnnnnnnnnnnnnnnnnnnnnnnnnnnnnnnnnnnnnnnnnnnnnnnnnnnnnnnnnnnnnnnnnnnnnnnnnnnnnnnnnnnnnnnnnnnnnnnnnnnnnnnnnnnnnnnnnnnnnnnnnnnnnnnnnnnnnnnnnnnnnnnnnnnnnnnnnnnnnnnnnnnnnnnnnnnnnnnnnnnnnnnnnnnnnnnnnnnnnnnnnnnnnnnnnnnnnnnnnnnnnnnnnnnnnnnnnnnnnnnnnnnnnnnnnnnnnnnnnnnnnnnnnnnnnnnnnnnnnnnnnnnnnnnnnnnnnnnnnnnnnnnnnnnnnnnnnnnnnnnnnnnnnnnnnnnnnnnnnnnnnnnnnnnnnnnnnnnnnnnnnnnnnnnnnnnnnnnnnnnnnnnnnnnnnnnnnnnnnnnnnnnnnnnnnnnnnnnnnnnnnnnnnnnnnnnnnnnnnnnnnnnnnnnnnnnnnnnnnnnnnnnnnnnnnnnnnnnnnnnnnnnnnnnnnnnnnnnnnnnnnnnnnnnnnnnnnnnnnnnnnnnnnnnnnnnnnnnnnnnnnnnnnnnnnnnnnnnnnnnnnnnnnnnnnnnnnnnnnnnnnnnnnnnnnnnnnnnnnnnnnnnnnnnnnnnnnnnnnnnnnnnnnnnnnnnnnnnnnnnnnnnnnnnnnnnnnnnnnnnnnnnnnnnnnnnnnnnnnnnnnnnnnnnnnnnnnnnnnnnnnnnnnnnnnnnnnnnnnnnnnnnnnnnnnnnnnnnnnnnnnnnnnnnnnnnnnnnnnnnnnnnnnnnnnnnnnnnnnnnnnnnnnnnnnnnnnnnnnnnnnnnnnnnnnnnnnnnnnnnnnnnnnnnnnnnnnnnnnnnnnnnnnnnnnnnnnnnnnnnnnnnnnnnnnnnnnnnnnnnnnnnnnnnnnnnnnnnnnnnnnnnnnnnnnnnnnnnnnnnnnnnnnnnnnnnnnnnnnnnnnnnnnnnnnnnnnnnnnnnnnnnnnnnnnnnnnnnnnnnnnnnnnnnnnnnnnnnnnnnnnnnnnnnnnnnnnnnnnnnnnnnnnnnnnnnnnnnnnnnnnnnnnnnnnnnnnnnnnnnnnnnnnnnnnnnnnnnnnnnnnnnnnnnnnnnnnnnnnnnnnnnnnnnnnnnnnnnnnnnnnnnnnnnnnnnnnnnnnnnnnnnnnnnnnnnnnnnnnnnnnnnnnnnnnnnnnnnnnnnnnnnnnnnnnnnnnnnnnnnnnnnnnnnnnnnnnnnnnnnnnnnnnnnnnnnnnnnnnnnnnnnnnnnnnnnnnnnnnnnnnnnnnnnnnnnnnnnnnnnnnnnnnnnnnnnnnnnnnnnnnnnnnnnnnnnnnnnnnnnnnnnnnnnnnnnnnnnnnnnnnnnnnnnnnnnnnnnnnnnnnnnnnnnnnnnnnnnnnnnnnnnnnnnnnnnnnnnnnnnnnnnnnnnnnnnnnnnnnnnnnnnnnnnnnnnnnnnnnnnnnnnnnnnnnnnnnnnnnnnnnnnnnnnnnnnnnnnnnnnnnnnnnnnnnnnnnnnnnnnnnnnnnnnnnnnnnnnnnnnnnnnnnnnnnnnnnnnnnnnnnnnnnnnnnnnnnnnnnnnnnnnnnnnnnnnnnnnnnnnnnnnnnnnnnnnnnnnnnnnnnnnnnnnnnnnnnnnnnnnnnnnnnnnnnnnnnnnnnnnnnnnnnnnnnnnnnnnnnnnnnnnnnnnnnnnnnnnnnnnnnnnnnnnnnnnnnnnnnnnnnnnnnnnnnnnnnnnnnnnnnnnnnnnnnnnnnnnnnnnnnnnnnnnnnnnnnnnnnnnnnnnnnnnnnnnnnnnnnnnnnnnnnnnnnnnnnnnnnnnnnnnnnnnnnnnnnnnnnnnnnnnnnnnnnnnnnnnnnnnnnnnnnnnnnnnnnnnnnnnnnnnnnnnnnnnnnnnnnnnnnnnnnnnnnnnnnnnnnnnnnnnnnnnnnnnnnnnnnnnnnnnnnnnnnnnnnnnnnnnnnnnnnnnnnnnnnnnnnnnnnnnnnnnnnnnnnnnnnnnnnnnnnnnnnnnnnnnnnnnnnnnnnnnnnnnnnnnnnnnnnnnnnnnnnnnnnnnnnnnnnnnnnnnnnnnnnnnnnnnnnnnnnnnnnnnnnnnnnnnnnnnnnnnnnnnnnnnnnnnnnnnnnnnnnnnnnnnnnnnnnnnnnnnnnnnnnnnnnnnnnnnnnnnnnnnnnnnnnnnnnnnnnnnnnnnnnnnnnnnnnnnnnnnnnnnnnnnnnnnnnnnnnnnnnnnnnnnnnnnnnnnnnnnnnnnnnnnnnnnnnnnnnnnnnnnnnnnnnnnnnnnnnnnnnnnnnnnnnnnnnnnnnnnnnnnnnnnnnnnnnnnnnnnnnnnnnnnnnnnnnnnnnnnnnnnnnnnnnnnnnnnnnnnnnnnnnnnnnnnnnnnnnnnnnnnnnnnnnnnnnnnnnnnnnnnnnnnnnnnnnnnnnnnnnnnnnnnnnnnnnnnnnnnnnnnnnnnnnnnnnnnnnnnnnnnnnnnnnnnnnnnnnnnnnnnnnnnnnnnnnnnnnnnnnnnnnnnnnnnnnnnnnnnnnnnnnnnnnnnnnnnnnnnnnnnnnnnnnnnnnnnnnnnnnnnnnnnnnnnnnnnnnnnnnnnnnnnnnnnnnnnnnnnnnnnnnnnnnnnnnnnnnnnnnnnnnnnnnnnnnnnnnnnnnnnnnnnnnnnnnnnnnnnnnnnnnnnnnnnnnnnnnnnnnnnnnnnnnnnnnnnnnnnnnnnnnnnnnnnnnnnnnnnnnnnnnnnnnnnnnnnnnnnnnnnnnnnnnnnnnnnnnnnnnnnnnnnnnnnnnnnnnnnnnnnnnnnnnnnnnnnnnnnnnnnnnnnnnnnnnnnnnnnnnnnnnnnnnnnnnnnnnnnnnnnnnnnnnnnnnnnnnnnnnnnnnnnnnnnnnnnnnnnnnnnnnnnnnnnnnnnnnnnnnnnnnnnnnnnnnnnnnnnnnnnnnnnnnnnnnnnnnnnnnnnnnnnnnnnnnnnnnnnnnnnnnnnnnnnnnnnnnnnnnnnnnnnnnnnnnnnnnnnnnnnnnnnnnnnnnnnnnnnnnnnnnnnnnnnnnnnnnnnnnnnnnnnnnnnnnnnnnnnnnnnnnnnnnnnnnnnnnnnnnnnnnnnnnnnnnnnnnnnnnnnnnnnnnnnnnnnnnnnnnnnnnnnnnnnnnnnnnnnnnnnnnnnnnnnnnnnnnnnnnnnnnnnnnnnnnnnnnnnnnnnnnnnnnnnnnnnnnnnnnnnnnnnnnnnnnnnnnnnnnnnnnnnnnnnnnnnnnnnnnnnnnnnnnnnnnnnnnnnnnnnnnnnnnnnnnnnnnnnnnnnnnnnnnnnnnnnnnnnnnnnnnnnnnnnnnnnnnnnnnnnnnnnnnnnnnnnnnnnnnnnnnnnnnnnnnnnnnnnnnnnnnnnnnnnnnnnnnnnnnnnnnnnnnnnnnnnnnnnnnnnnnnnnnnnnnnnnnnnnnnnnnnnnnnnnnnnnnnnnnnnnnnnnnnnnnnnnnnnnnnnnnnnnnnnnnnnnnnnnnnnnnnnnnnnnnnnnnnnnnnnnnnnnnnnnnnnnnnnnnnnnnnnnnnnnnnnnnnnnnnnnnnnnnnnnnnnnnnnnnnnnnnnnnnnnnnnnnnnnnnnnnnnnnnnnnnnnnnnnnnnnnnnnnnnnnnnnnnnnnnnnnnnnnnnnnnnnnnnnnnnnnnnnnnnnnnnnnnnnnnnnnnnnnnnnnnnnnnnnnnnnnnnnnnnnnnnnnnnnnnnnnnnnnnnnnnnnnnnnnnnnnnnnnnnnnnnnnnnnnnnnnnnnnnnnnnnnnnnnnnnnnnnnnnnnnnnnnnnnnnnnnnnnnnnnnnnnnnnnnnnnnnnnnnnnnnnnnnnnnnnnnnnnnnnnnnnnnnnnnnnnnnnnnnnnnnnnnnnnnnnnnnnnnnnnnnnnnnnnnnnnnnnnnnnnnnnnnnnnnnnnnnnnnnnnnnnnnnnnnnnnnnnnnnnnnnnnnnnnnnnnnnnnnnnnnnnnnnnnnnnnnnnnnnnnnnnnnnnnnnnnnnnnnnnnnnnnnnnnnnnnnnnnnnnnnnnnnnnnnnnnnnnnnnnnnnnnnnnnnnnnnnnnnnnnnnnnnnnnnnnnnnnnnnnnnnnnnnnnnnnnnnnnnnnnnnnnnnnnnnnnnnnnnnnnnnnnnnnnnnnnnnnnnnnnnnnnnnnnnnnnnnnnnnnnnnnnnnnnnnnnnnnnnnnnnnnnnnnnnnnnnnnnnnnnnnnnnnnnnnnnnnnnnnnnnnnnnnnnnnnnnnnnnnnnnnnnnnnnnnnnnnnnnnnnnnnnnnnnnnnnnnnnnnnnnnnnnnnnnnnnnnnnnnnnnnnnnnnnnnnnnnnnnnnnnnnnnnnnnnnnnnnnnnnnnnnnnnnnnnnnnnnnnnnnnnnnnnnnnnnnnnnnnnnnnnnnnnnnnnnnnnnnnnnnnnnnnnnnnnnnnnnnnnnnnnnnnnnnnnnnnnnnnnnnnnnnnnnnnnnnnnnnnnnnnnnnnnnnnnnnnnnnnnnnnnnnnnnnnnnnnnnnnnnnnnnnnnnnnnnnnnnnnnnnnnnnnnnnnnnnnnnnnnnnnnnnnnnnnnnnnnnnnnnnnnnnnnnnnnnnnnnnnnnnnnnnnnnnnnnnnnnnnnnnnnnnnnnnnnnnnnnnnnnnnnnnnnnnnnnnnnnnnnnnnnnnnnnnnnnnnnnnnnnnnnnnnnnnnnnnnnnnnnnnnnnnnnnnnnnnnnnnnnnnnnnnnnnnnnnnnnnnnnnnnnnnnnnnnnnnnnnnnnnnnnnnnnnnnnnnnnnnnnnnnnnnnnnnnnnnnnnnnnnnnnnnnnnnnnnnnnnnnnnnnnnnnnnnnnnnnnnnnnnnnnnnnnnnnnnnnnnnnnnnnnnnnnnnnnnnnnnnnnnnnnnnnnnnnnnnnnnnnnnnnnnnnnnnnnnnnnnnnnnnnnnnnnnnnnnnnnnnnnnnnnnnnnnnnnnnnnnnnnnnnnnnnnnnnnnnnnnnnnnnnnnnnnnnnnnnnnnnnnnnnnnnnnnnnnnnnnnnnnnnnnnnnnnnnnnnnnnnnnnnnnnnnnnnnnnnnnnnnnnnnnnnnnnnnnnnnnnnnnnnnnnnnnnnnnnnnnnnnnnnnnnnnnnnnnnnnnnnnnnnnnnnnnnnnnnnnnnnnnnnnnnnnnnnnnnnnnnnnnnnnnnnnnnnnnnnnnnnnnnnnnnnnnnnnnnnnnnnnnnnnnnnnnnnnnnnnnnnnnnnnnnnnnnnnnnnnnnnnnnnnnnnnnnnnnnnnnnnnnnnnnnnnnnnnnnnnnnnnnnnnnnnnnnnnnnnnnnnnnnnnnnnnnnnnnnnnnnnnnnnnnnnnnnnnnnnnnnnnnnnnnnnnnnnnnnnnnnnnnnnnnnnnnnnnnnnnnnnnnnnnnnnnnnnnnnnnnnnnnnnnnnnnnnnnnnnnnnnnnnnnnnnnnnnnnnnnnnnnnnnnnnnnnnnnnnnnnnnnnnnnnnnnnnnnnnnnnnnnnnnnnnnnnnnnnnnnnnnnnnnnnnnnnnnnnnnnnnnnnnnnnnnnnnnnnnnnnnnnnnnnnnnnnnnnnnnnnnnnnnnnnnnnnnnnnnnnnnnnnnnnnnnnnnnnnnnnnnnnnnnnnnnnnnnnnnnnnnnnnnnnnnnnnnnnnnnnnnnnnnnnnnnnnnnnnnnnnnnnnnnnnnnnnnnnnnnnnnnnnnnnnnnnnnnnnnnnnnnnnnnnnnnnnnnnnnnnnnnnnnnnnnnnnnnnnnnnnnnnnnnnnnnnnnnnnnnnnnnnnnnnnnnnnnnnnnnnnnnnnnnnnnnnnnnnnnnnnnnnnnnnnnnnnnnnnnnnnnnnnnnnnnnnnnnnnnnnnnnnnnnnnnnnnnnnnnnnnnnnnnnnnnnnnnnnnnnnnnnnnnnnnnnnnnnnnnnnnnnnnnnnnnnnnnnnnnnnnnnnnnnnnnnnnnnnnnnnnnnnnnnnnnnnnnnnnnnnnnnnnnnnnnnnnnnnnnnnnnnnnnnnnnnnnnnnnnnnnnnnnnnnnnnnnnnnnnnnnnnnnnnnnnnnnnnnnnnnnnnnnnnnnnnnnnnnnnnnnnnnnnnnnnnnnnnnnnnnnnnnnnnnnnnnnnnnnnnnnnnnnnnnnnnnnnnnnnnnnnnnnnnnnnnnnnnnnnnnnnnnnnnnnnnnnnnnnnnnnnnnnnnnnnnnnnnnnnnnnnnnnnnnnnnnnnnnnnnnnnnnnnnnnnnnnnnnnnnnnnnnnnnnnnnnnnnnnnnnnnnnnnnnnnnnnnnnnnnnnnnnnnnnnnnnnnnnnnnnnnnnnnnnnnnnnnnnnnnnnnnnnnnnnnnnnnnnnnnnnnnnnnnnnnnnnnnnnnnnnnnnnnnnnnnnnnnnnnnnnnnnnnnnnnnnnnnnnnnnnnnnnnnnnnnnnnnnnnnnnnnnnnnnnnnnnnnnnnnnnnnnnnnnnnnnnnnnnnnnnnnnnnnnnnnnnnnnnnnnnnnnnnnnnnnnnnnnnnnnnnnnnnnnnnnnnnnnnnnnnnnnnnnnnnnnnnnnnnnnnnnnnnnnnnnnnnnnnnnnnnnnnnnnnnnnnnnnnnnnnnnnnnnnnnnnnnnnnnnnnnnnnnnnnnnnnnnnnnnnnnnnnnnnnnnnnnnnnnnnnnnnnnnnnnnnnnnnnnnnnnnnnnnnnnnnnnnnnnnnnnnnnnnnnnnnnnnnnnnnnnnnnnnnnnnnnnnnnnnnnnnnnnnnnnnnnnnnnnnnnnnnnnnnnnnnnnnnnnnnnnnnnnnnnnnnnnnnnnnnnnnnnnnnnnnnnnnnnnnnnnnnnnnnnnnnnnnnnnnnnnnnnnnnnnnnnnnnnnnnnnnnnnnnnnnnnnnnnnnnnnnnnnnnnnnnnnnnnnnnnnnnnnnnnnnnnnnnnnnnnnnnnnnnnnnnnnnnnnnnnnnnnnnnnnnnnnnnnnnnnnnnnnnnnnnnnnnnnnnnnnnnnnnnnnnnnnnnnnnnnnnnnnnnnnnnnnnnnnnnnnnnnnnnnnnnnnnnnnnnnnnnnnnnnnnnnnnnnnnnnnnnnnnnnnnnnnnnnnnnnnnnnnnnnnnnnnnnnnnnnnnnnnnnnnnnnnnnnnnnnnnnnnnnnnnnnnnnnnnnnnnnnnnnnnnnnnnnnnnnnnnnnnnnnnnnnnnnnnnnnnnnnnnnnnnnnnnnnnnnnnnnnnnnnnnnnnnnnnnnnnnnnnnnnnnnnnnnnnnnnnnnnnnnnnnnnnnnnnnnnnnnnnnnnnnnnnnnnnnnnnnnnnnnnnnnnnnnnnnnnnnnnnnnnnnnnnnnnnnnnnnnnnnnnnnnnnnnnnnnnnnnnnnnnnnnnnnnnnnnnnnnnnnnnnnnnnnnnnnnnnnnnnnnnnnnnnnnnnnnnnnnnnnnnnnnnnnnnnnnnnnnnnnnnnnnnnnnnnnnnnnnnnnnnnnnnnnnnnnnnnnnnnnnnnnnnnnnnnnnnnnnnnnnnnnnnnnnnnnnnnnnnnnnnnnnnnnnnnnnnnnnnnnnnnnnnnnnnnnnnnnnnnnnnnnnnnnnnnnnnnnnnnnnnnnnnnnnnnnnnnnnnnnnnnnnnnnnnnnnnnnnnnnnnnnnnnnnnnnnnnnnnnnnnnnnnnnnnnnnnnnnnnnnnnnnnnnnnnnnnnnnnnnnnnnnnnnnnnnnnnnnnnnnnnnnnnnnnnnnnnnnnnnnnnnnnnnnnnnnnnnnnnnnnnnnnnnnnnnnnnnnnnnnnnnnnnnnnnnnnnnnnnnnnnnnnnnnnnnnnnnnnnnnnnnnnnnnnnnnnnnnnnnnnnnnnnnnnnnnnnnnnnnnnnnnnnnnnnnnnnnnnnnnnnnnnnnnnnnnnnnnnnnnnnnnnnnnnnnnnnnnnnnnnnnnnnnnnnnnnnnnnnnnnnnnnnnnnnnnnnnnnnnnnnnnnnnnnnnnnnnnnnnnnnnnnnnnnnnnnnnnnnnnnnnnnnnnnnnnnnnnnnnnnnnnnnnnnnnnnnnnnnnnnnnnnnnnnnnnnnnnnnnnnnnnnnnnnnnnnnnnnnnnnnnnnnnnnnnnnnnnnnnnnnnnnnnnnnnnnnnnnnnnnnnnnnnnnnnnnnnnnnnnnnnnnnnnnnnnnnnnnnnnnnnnnnnnnnnnnnnnnnnnnnnnnnnnnnnnnnnnnnnnnnnnnnnnnnnnnnnnnnnnnnnnnnnnnnnnnnnnnnnnnnnnnnnnnnnnnnnnnnnnnnnnnnnnnnnnnnnnnnnnnnnnnnnnnnnnnnnnnnnnnnnnnnnnnnnnnnnnnnnnnnnnnnnnnnnnnnnnnnnnnnnnnnnnnnnnnnnnnnnnnnnnnnnnnnnnnnnnnnnnnnnnnnnnnnnnnnnnnnnnnnnnnnnnnnnnnnnnnnnnnnnnnnnnnnnnnnnnnnnnnnnnnnnnnnnnnnnnnnnnnnnnnnnnnnnnnnnnnnnnnnnnnnnnnnnnnnnnnnnnnnnnnnnnnnnnnnnnnnnnnnnnnnnnnnnnnnnnnnnnnnnnnnnnnnnnnnnnnnnnnnnnnnnnnnnnnnnnnnnnnnnnnnnnnnnnnnnnnnnnnnnnnnnnnnnnnnnnnnnnnnnnnnnnnnnnnnnnnnnnnnnnnnnnnnnnnnnnnnnnnnnnnnnnnnnnnnnnnnnnnnnnnnnnnnnnnnnnnnnnnnnnnnnnnnnnnnnnnnnnnnnnnnnnnnnnnnnnnnnnnnnnnnnnnnnnnnnnnnnnnnnnnnnnnnnnnnnnnnnnnnnnnnnnnnnnnnnnnnnnnnnnnnnnnnnnnnnnnnnnnnnnnnnnnnnnnnnnnnnnnnnnnnnnnnnnnnnnnnnnnnnnnnnnnnnnnnnnnnnnnnnnnnnnnnnnnnnnnnnnnnnnnnnnnnnnnnnnnnnnnnnnnnnnnnnnnnnnnnnnnnnnnnnnnnnnnnnnnnnnnnnnnnnnnnnnnnnnnnnnnnnnnnnnnnnnnnnnnnnnnnnnnnnnnnnnnnnnnnnnnnnnnnnnnnnnnnnnnnnnnnnnnnnnnnnnnnnnnnnnnnnnnnnnnnnnnnnnnnnnnnnnnnnnnnnnnnnnnnnnnnnnnnnnnnnnnnnnnnnnnnnnnnnnnnnnnnnnnnnnnnnnnnnnnnnnnnnnnnnnnnnnnnnnnnnnnnnnnnnnnnnnnnnnnnnnnnnnnnnnnnnnnnnnnnnnnnnnnnnnnnnnnnnnnnnnnnnnnnnnnnnnnnnnnnnnnnnnnnnnnnnnnnnnnnnnnnnnnnnnnnnnnnnnnnnnnnnnnnnnnnnnnnnnnnnnnnnnnnnnnnnnnnnnnnnnnnnnnnnnnnnnnnnnnnnnnnnnnnnnnnnnnnnnnnnnnnnnnnnnnnnnnnnnnnnnnnnnnnnnnnnnnnnnnnnnnnnnnnnnnnnnnnnnnnnnnnnnnnnnnnnnnnnnnnnnnnnnnnnnnnnnnnnnnnnnnnnnnnnnnnnnnnnnnnnnnnnnnnnnnnnnnnnnnnnnnnnnnnnnnnnnnnnnnnnnnnnnnnnnnnnnnnnnnnnnnnnnnnnnnnnnnnnnnnnnnnnnnnnnnnnnnnnnnnnnnnnnnnnnnnnnnnnnnnnnnnnnnnnnnnnnnnnnnnnnnnnnnnnnnnnnnnnnnnnnnnnnnnnnnnnnnnnnnnnnnnnnnnnnnnnnnnnnnnnnnnnnnnnnnnnnnnnnnnnnnnnnnnnnnnnnnnnnnnnnnnnnnnnnnnnnnnnnnnnnnnnnnnnnnnnnnnnnnnnnnnnnnnnnnnnnnnnnnnnnnnnnnnnnnnnnnnnnnnnnnnnnnnnnnnnnnnnnnnnnnnnnnnnnnnnnnnnnnnnnnnnnnnnnnnnnnnnnnnnnnnnnnnnnnnnnnnnnnnnnnnnnnnnnnnnnnnnnnnnnnnnnnnnnnnnnnnnnnnnnnnnnnnnnnnnnnnnnnnnnnnnnnnnnnnnnnnnnnnnnnnnnnnnnnnnnnnnnnnnnnnnnnnnnnnnnnnnnnnnnnnnnnnnnnnnnnnnnnnnnnnnnnnnnnnnnnnnnnnnnnnnnnnnnnnnnnnnnnnnnnnnnnnnnnnnnnnnnnnnnnnnnnnnnnnnnnnnnnnnnnnnnnnnnnnnnnnnnnnnnnnnnnnnnnnnnnnnnnnnnnnnnnnnnnnnnnnnnnnnnnnnnnnnnnnnnnnnnnnnnnnnnnnnnnnnnnnnnnnnnnnnnnnnnnnnnnnnnnnnnnnnnnnnnnnnnnnnnnnnnnnnnnnnnnnnnnnnnnnnnnnnnnnnnnnnnnnnnnnnnnnnnnnnnnnnnnnnnnnnnnnnnnnnnnnnnnnnnnnnnnnnnnnnnnnnnnnnnnnnnnnnnnnnnnnnnnnnnnnnnnnnnnnnnnnnnnnnnnnnnnnnnnnnnnnnnnnnnnnnnnnnnnnnnnnnnnnnnnnnnnnnnnnnnnnnnnnnnnnnnnnnnnnnnnnnnnnnnnnnnnnnnnnnnnnnnnnnnnnnnnnnnnnnnnnnnnnnnnnnnnnnnnnnnnnnnnnnnnnnnnnnnnnnnnnnnnnnnnnnnnnnnnnnnnnnnnnnnnnnnnnnnnnnnnnnnnnnnnnnnnnnnnnnnnnnnnnnnnnnnnnnnnnnnnnnnnnnnnnnnnnnnnnnnnnnnnnnnnnnnnnnnnnnnnnnnnnnnnnnnnnnnnnnnnnnnnnnnnnnnnnnnnnnnnnnnnnnnnnnnnnnnnnnnnnnnnnnnnnnnnnnnnnnnnnnnnnnnnnnnnnnnnnnnnnnnnnnnnnnnnnnnnnnnnnnnnnnnnnnnnnnnnnnnnnnnnnnnnnnnnnnnnnnnnnnnnnnnnnnnnnnnnnnnnnnnnnnnnnnnnnnnnnnnnnnnnnnnnnnnnnnnnnnnnnnnnnnnnnnnnnnnnnnnnnnnnnnnnnnnnnnnnnnnnnnnnnnnnnnnnnnnnnnnnnnnnnnnnnnnnnnnnnnnnnnnnnnnnnnnnnnnnnnnnnnnnnnnnnnnnnnnnnnnnnnnnnnnnnnnnnnnnnnnnnnnnnnnnnnnnnnnnnnnnnnnnnnnnnnnnnnnnnnnnnnnnnnnnnnnnnnnnnnnnnnnnnnnnnnnnnnnnnnnnnnnnnnnnnnnnnnnnnnnnnnnnnnnnnnnnnnnnnnnnnnnnnnnnnnnnnnnnnnnnnnnnnnnnnnnnnnnnnnnnnnnnnnnnnnnnnnnnnnnnnnnnnnnnnnnnnnnnnnnnnnnnnnnnnnnnnnnnnnnnnnnnnnnnnnnnnnnnnnnnnnnnnnnnnnnnnnnnnnnnnnnnnnnnnnnnnnnnnnnnnnnnnnnnnnnnnnnnnnnnnnnnnnnnnnnnnnnnnnnnnnnnnnnnnnnnnnnnnnnnnnnnnnnnnnnnnnnnnnnnnnnnnnnnnnnnnnnnnnnnnnnnnnnnnnnnnnnnnnnnnnnnnnnnnnnnnnnnnnnnnnnnnnnnnnnnnnnnnnnnnnnnnnnnnnnnnnnnnnnnnnnnnnnnnnnnnnnnnnnnnnnnnnnnnnnnnnnnnnnnnnnnnnnnnnnnnnnnnnnnnnnnnnnnnnnnnnnnnnnnnnnnnnnnnnnnnnnnnnnnnnnnnnnnnnnnnnnnnnnnnnnnnnnnnnnnnnnnnnnnnnnnnnnnnnnnnnnnnnnnnnnnnnnnnnnnnnnnnnnnnnnnnnnnnnnnnnnnnnnnnnnnnnnnnnnnnnnnnnnnnnnnnnnnnnnnnnnnnnnnnnnnnnnnnnnnnnnnnnnnnnnnnnnnnnnnnnnnnnnnnnnnnnnnnnnnnnnnnnnnnnnnnnnnnnnnnnnnnnnnnnnnnnnnnnnnnnnnnnnnnnnnnnnnnnnnnnnnnnnnnnnnnnnnnnnnnnnnnnnnnnnnnnnnnnnnnnnnnnnnnnnnnnnnnnnnnnnnnnnnnnnnnnnnnnnnnnnnnnnnnnnnnnnnnnnnnnnnnnnnnnnnnnnnnnnnnnnnnnnnnnnnnnnnnnnnnnnnnnnnnnnnnnnnnnnnnnnnnnnnnnnnnnnnnnnnnnnnnnnnnnnnnnnnnnnnnnnnnnnnnnnnnnnnnnnnnnnnnnnnnnnnnnnnnnnnnnnnnnnnnnnnnnnnnnnnnnnnnnnnnnnnnnnnnnnnnnnnnnnnnnnnnnnnnnnnnnnnnnnnnnnnnnnnnnnnnnnnnnnnnnnnnnnnnnnnnnnnnnnnnnnnnnnnnnnnnnnnnnnnnnnnnnnnnnnnnnnnnnnnnnnnnnnnnnnnnnnnnnnnnnnnnnnnnnnnnnnnnnnnnnnnnnnnnnnnnnnnnnnnnnnnnnnnnnnnnnnnnnnnnnnnnnnnnnnnnnnnnnnnnnnnnnnnnnnnnnnnnnnnnnnnnnnnnnnnnnnnnnnnnnnnnnnnnnnnnnnnnnnnnnnnnnnnnnnnnnnnnnnnnnnnnnnnnnnnnnnnnnnnnnnnnnnnnnnnnnnnnnnnnnnnnnnnnnnnnnnnnnnnnnnnnnnnnnnnnnnnnnnnnnnnnnnnnnnnnnnnnnnnnnnnnnnnnnnnnnnnnnnnnnnnnnnnnnnnnnnnnnnnnnnnnnnnnnnnnnnnnnnnnnnnnnnnnnnnnnnnnnnnnnnnnnnnnnnnnnnnnnnnnnnnnnnnnnnnnnnnnnnnnnnnnnnnnnnnnnnnnnnnnnnnnnnnnnnnnnnnnnnnnnnnnnnnnnnnnnnnnnnnnnnnnnnnnnnnnnnnnnnnnnnnnnnnnnnnnnnnnnnnnnnnnnnnnnnnnnnnnnnnnnnnnnnnnnnnnnnnnnnnnnnnnnnnnnnnnnnnnnnnnnnnnnnnnnnnnnnnnnnnnnnnnnnnnnnnnnnnnnnnnnnnnnnnnnnnnnnnnnnnnnnnnnnnnnnnnnnnnnnnnnnnnnnnnnnnnnnnnnnnnnnnnnnnnnnnnnnnnnnnnnnnnnnnnnnnnnnnnnnnnnnnnnnnnnnnnnnnnnnnnnnnnnnnnnnnnnnnnnnnnnnnnnnnnnnnnnnnnnnnnnnnnnnnnnnnnnnnnnnnnnnnnnnnnnnnnnnnnnnnnnnnnnnnnnnnnnnnnnnnnnnnnnnnnnnnnnnnnnnnnnnnnnnnnnnnnnnnnnnnnnnnnnnnnnnnnnnnnnnnnnnnnnnnnnnnnnnnnnnnnnnnnnnnnnnnnnnnnnnnnnnnnnnnnnnnnnnnnnnnnnnnnnnnnnnnnnnnnnnnnnnnnnnnnnnnnnnnnnnnnnnnnnnnnnnnnnnnnnnnnnnnnnnnnnnnnnnnnnnnnnnnnnnnnnnnnnnnnnnnnnnnnnnnnnnnnnnnnnnnnnnnnnnnnnnnnnnnnnnnnnnnnnnnnnnnnnnnnnnnnnnnnnnnnnnnnnnnnnnnnnnnnnnnnnnnnnnnnnnnnnnnnnnnnnnnnnnnnnnnnnnnnnnnnnnnnnnnnnnnnnnnnnnnnnnnnnnnnnnnnnnnnnnnnnnnnnnnnnnnnnnnnnnnnnnnnnnnnnnnnnnnnnnnnnnnnnnnnnnnnnnnnnnnnnnnnnnnnnnnnnnnnnnnnnnnnnnnnnnnnnnnnnnnnnnnnnnnnnnnnnnnnnnnnnnnnnnnnnnnnnnnnnnnnnnnnnnnnnnnnnnnnnnnnnnnnnnnnnnnnnnnnnnnnnnnnnnnnnnnnnnnnnnnnnnnnnnnnnnnnnnnnnnnnnnnnnnnnnnnnnnnnnnnnnnnnnnnnnnnnnnnnnnnnnnnnnnnnnnnnnnnnnnnnnnnnnnnnnnnnnnnnnnnnnnnnnnnnnnnnnnnnnnnnnnnnnnnnnnnnnnnnnnnnnnnnnnnnnnnnnnnnnnnnnnnnnnnnnnnnnnnnnnnnnnnnnnnnnnnnnnnnnnnnnnnnnnnnnnnnnnnnnnnnnnnnnnnnnnnnnnnnnnnnnnnnnnnnnnnnnnnnnnnnnnnnnnnnnnnnnnnnnnnnnnnnnnnnnnnnnnnnnnnnnnnnnnnnnnnnnnnnnnnnnnnnnnnnnnnnnnnnnnnnnnnnnnnnnnnnnnnnnnnnnnnnnnnnnnnnnnnnnnnnnnnnnnnnnnnnnnnnnnnnnnnnnnnnnnnnnnnnnnnnnnnnnnnnnnnnnnnnnnnnnnnnnnnnnnnnnnnnnnnnnnnnnnnnnnnnnnnnnnnnnnnnnnnnnnnnnnnnnnnnnnnnnnnnnnnnnnnnnnnnnnnnnnnnnnnnnnnnnnnnnnnnnnnnnnnnnnnnnnnnnnnnnnnnnnnnnnnnnnnnnnnnnnnnnnnnnnnnnnnnnnnnnnnnnnnnnnnnnnnnnnnnnnnnnnnnnnnnnnnnnnnnnnnnnnnnnnnnnnnnnnnnnnnnnnnnnnnnnnnnnnnnnnnnnnnnnnnnnnnnnnnnnnnnnnnnnnnnnnnnnnnnnnnnnnnnnnnnnnnnnnnnnnnnnnnnnnnnnnnnnnnnnnnnnnnnnnnnnnnnnnnnnnnnnnnnnnnnnnnnnnnnnnnnnnnnnnnnnnnnnnnnnnnnnnnnnnnnnnnnnnnnnnnnnnnnnnnnnnnnnnnnnnnnnnnnnnnnnnnnnnnnnnnnnnnnnnnnnnnnnnnnnnnnnnnnnnnnnnnnnnnnnnnnnnnnnnnnnnnnnnnnnnnnnnnnnnnnnnnnnnnnnnnnnnnnnnnnnnnnnnnnnnnnnnnnnnnnnnnnnnnnnnnnnnnnnnnnnnnnnnnnnnnnnnnnnnnnnnnnnnnnnnnnnnnnnnnnnnnnnnnnnnnnnnnnnnnnnnnnnnnnnnnnnnnnnnnnnnnnnnnnnnnnnnnnnnnnnnnnnnnnnnnnnnnnnnnnnnnnnnnnnnnnnnnnnnnnnnnnnnnnnnnnnnnnnnnnnnnnnnnnnnnnnnnnnnnnnnnnnnnnnnnnnnnnnnnnnnnnnnnnnnnnnnnnnnnnnnnnnnnnnnnnnnnnnnnnnnnnnnnnnnnnnnnnnnnnnnnnnnnnnnnnnnnnnnnnnnnnnnnnnnnnnnnnnnnnnnnnnnnnnnnnnnnnnnnnnnnnnnnnnnnnnnnnnnnnnnnnnnnnnnnnnnnnnnnnnnnnnnnnnnnnnnnnnnnnnnnnnnnnnnnnnnnnnnnnnnnnnnnnnnnnnnnnnnnnnnnnnnnnnnnnnnnnnnnnnnnnnnnnnnnnnnnnnnnnnnnnnnnnnnnnnnnnnnnnnnnnnnnnnnnnnnnnnnnnnnnnnnnnnnnnnnnnnnnnnnnnnnnnnnnnnnnnnnnnnnnnnnnnnnnnnnnnnnnnnnnnnnnnnnnnnnnnnnnnnnnnnnnnnnnnnnnnnnnnnnnnnnnnnnnnnnnnnnnnnnnnnnnnnnnnnnnnnnnnnnnnnnnnnnnnnnnnnnnnnnnnnnnnnnnnnnnnnnnnnnnnnnnnnnnnnnnnnnnnnnnnnnnnnnnnnnnnnnnnnnnnnnnnnnnnnnnnnnnnnnnnnnnnnnnnnnnnnnnnnnnnnnnnnnnnnnnnnnnnnnnnnnnnnnnnnnnnnnnnnnnnnnnnnnnnnnnnnnnnnnnnnnnnnnnnnnnnnnnnnnnnnnnnnnnnnnnnnnnnnnnnnnnnnnnnnnnnnnnnnnnnnnnnnnnnnnnnnnnnnnnnnnnnnnnnnnnnnnnnnnnnnnnnnnnnnnnnnnnnnnnnnnnnnnnnnnnnnnnnnnnnnnnnnnnnnnnnnnnnnnnnnnnnnnnnnnnnnnnnnnnnnnnnnnnnnnnnnnnnnnnnnnnnnnnnnnnnnnnnnnnnnnnnnnnnnnnnnnnnnnnnnnnnnnnnnnnnnnnnnnnnnnnnnnnnnnnnnnnnnnnnnnnnnnnnnnnnnnnnnnnnnnnnnnnnnnnnnnnnnnnnnnnnnnnnnnnnnnnnnnnnnnnnnnnnnnnnnnnnnnnnnnnnnnnnnnnnnnnnnnnnnnnnnnnnnnnnnnnnnnnnnnnnnnnnnnnnnnnnnnnnnnnnnnnnnnnnnnnnnnnnnnnnnnnnnnnnnnnnnnnnnnnnnnnnnnnnnnnnnnnnnnnnnnnnnnnnnnnnnnnnnnnnnnnnnnnnnnnnnnnnnnnnnnnnnnnnnnnnnnnnnnnnnnnnnnnnnnnnnnnnnnnnnnnnnnnnnnnnnnnnnnnnnnnnnnnnnnnnnnnnnnnnnnnnnnnnnnnnnnnnnnnnnnnnnnnnnnnnnnnnnnnnnnnnnnnnnnnnnnnnnnnnnnnnnnnnnnnnnnnnnnnnnnnnnnnnnnnnnnnnnnnnnnnnnnnnnnnnnnnnnnnnnnnnnnnnnnnnnnnnnnnnnnnnnnnnnnnnnnnnnnnnnnnnnnnnnnnnnnnnnnnnnnnnnnnnnnnnnnnnnnnnnnnnnnnnnnnnnnnnnnnnnnnnnnnnnnnnnnnnnnnnnnnnnnnnnnnnnnnnnnnnnnnnnnnnnnnnnnnnnnnnnnnnnnnnnnnnnnnnnnnnnnnnnnnnnnnnnnnnnnnnnnnnnnnnnnnnnnnnnnnnnnnnnnnnnnnnnnnnnnnnnnnnnnnnnnnnnnnnnnnnnnnnnnnnnnnnnnnnnnnnnnnnnnnnnnnnnnnnnnnnnnnnnnnnnnnnnnnnnnnnnnnnnnnnnnnnnnnnnnnnnnnnnnnnnnnnnnnnnnnnnnnnnnnnnnnnnnnnnnnnnnnnnnnnnnnnnnnnnnnnnnnnnnnnnnnnnnnnnnnnnnnnnnnnnnnnnnnnnnnnnnnnnnnnnnnnnnnnnnnnnnnnnnnnnnnnnnnnnnnnnnnnnnnnnnnnnnnnnnnnnnnnnnnnnnnnnnnnnnnnnnnnnnnnnnnnnnnnnnnnnnnnnnnnnnnnnnnnnnnnnnnnnnnnnnnnnnnnnnnnnnnnnnnnnnnnnnnnnnnnnnnnnnnnnnnnnnnnnnnnnnnnnnnnnnnnnnnnnnnnnnnnnnnnnnnnnnnnnnnnnnnnnnnnnnnnnnnnnnnnnnnnnnnnnnnnnnnnnnnnnnnnnnnnnnnnnnnnnnnnnnnnnnnnnnnnnnnnnnnnnnnnnnnnnnnnnnnnnnnnnnnnnnnnnnnnnnnnnnnnnnnnnnnnnnnnnnnnnnnnnnnnnnnnnnnnnnnnnnnnnnnnnnnnnnnnnnnnnnnnnnnnnnnnnnnnnnnnnnnnnnnnnnnnnnnnnnnnnnnnnnnnnnnnnnnnnnnnnnnnnnnnnnnnnnnnnnnnnnnnnnnnnnnnnnnnnnnnnnnnnnnnnnnnnnnnnnnnnnnnnnnnnnnnnnnnnnnnnnnnnnnnnnnnnnnnnnnnnnnnnnnnnnnnnnnnnnnnnnnnnnnnnnnnnnnnnnnnnnnnnnnnnnnnnnnnnnnnnnnnnnnnnnnnnnnnnnnnnnnnnnnnnnnnnnnnnnnnnnnnnnnnnnnnnnnnnnnnnnnnnnnnnnnnnnnnnnnnnnnnnnnnnnnnnnnnnnnnnnnnnnnnnnnnnnnnnnnnnnnnnnnnnnnnnnnnnnnnnnnnnnnnnnnnnnnnnnnnnnnnnnnnnnnnnnnnnnnnnnnnnnnnnnnnnnnnnnnnnnnnnnnnnnnnnnnnnnnnnnnnnnnnnnnnnnnnnnnnnnnnnnnnnnnnnnnnnnnnnnnnnnnnnnnnnnnnnnnnnnnnnnnnnnnnnnnnnnnnnnnnnnnnnnnnnnnnnnnnnnnnnnnnnnnnnnnnnnnnnnnnnnnnnnnnnnnnnnnnnnnnnnnnnnnnnnnnnnnnnnnnnnnnnnnnnnnnnnnnnnnnnnnnnnnnnnnnnnnnnnnnnnnnnnnnnnnnnnnnnnnnnnnnnnnnnnnnnnnnnnnnnnnnnnnnnnnnnnnnnnnnnnnnnnnnnnnnnnnnnnnnnnnnnnnnnnnnnnnnnnnnnnnnnnnnnnnnnnnnnnnnnnnnnnnnnnnnnnnnnnnnnnnnnnnnnnnnnnnnnnnnnnnnnnnnnnnnnnnnnnnnnnnnnnnnnnnnnnnnnnnnnnnnnnnnnnnnnnnnnnnnnnnnnnnnnnnnnnnnnnnnnnnnnnnnnnnnnnnnnnnnnnnnnnnnnnnnnnnnnnnnnnnnnnnnnnnnnnnnnnnnnnnnnnnnnnnnnnnnnnnnnnnnnnnnnnnnnnnnnnnnnnnnnnnnnnnnnnnnnnnnnnnnnnnnnnnnnnnnnnnnnnnnnnnnnnnnnnnnnnnnnnnnnnnnnnnnnnnnnnnnnnnnnnnnnnnnnnnnnnnnnnnnnnnnnnnnnnnnnnnnnnnnnnnnnnnnnnnnnnnnnnnnnnnnnnnnnnnnnnnnnnnnnnnnnnnnnnnnnnnnnnnnnnnnnnnnnnnnnnnnnnnnnnnnnnnnnnnnnnnnnnnnnnnnnnnnnnnnnnnnnnnnnnnnnnnnnnnnnnnnnnnnnnnnnnnnnnnnnnnnnnnnnnnnnnnnnnnnnnnnnnnnnnnnnnnnnnnnnnnnnnnnnnnnnnnnnnnnnnnnnnnnnnnnnnnnnnnnnnnnnnnnnnnnnnnnnnnnnnnnnnnnnnnnnnnnnnnnnnnnnnnnnnnnnnnnnnnnnnnnnnnnnnnnnnnnnnnnnnnnnnnnnnnnnnnnnnnnnnnnnnnnnnnnnnnnnnnnnnnnnnnnnnnnnnnnnnnnnnnnnnnnnnnnnnnnnnnnnnnnnnnnnnnnnnnnnnnnnnnnnnnnnnnnnnnnnnnnnnnnnnnnnnnnnnnnnnnnnnnnnnnnnnnnnnnnnnnnnnnnnnnnnnnnnnnnnnnnnnnnnnnnnnnnnnnnnnnnnnnnnnnnnnnnnnnnnnnnnnnnnnnnnnnnnnnnnnnnnnnnnnnnnnnnnnnnnnnnnnnnnnnnnnnnnnnnnnnnnnnnnnnnnnnnnnnnnnnnnnnnnnnnnnnnnnnnnnnnnnnnnnnnnnnnnnnnnnnnnnnnnnnnnnnnnnnnnnnnnnnnnnnnnnnnnnnnnnnnnnnnnnnnnnnnnnnnnnnnnnnnnnnnnnnnnnnnnnnnnnnnnnnnnnnnnnnnnnnnnnnnnnnnnnnnnnnnnnnnnnnnnnnnnnnnnnnnnnnnnnnnnnnnnnnnnnnnnnnnnnnnnnnnnnnnnnnnnnnnnnnnnnnnnnnnnnnnnnnnnnnnnnnnnnnnnnnnnnnnnnnnnnnnnnnnnnnnnnnnnnnnnnnnnnnnnnnnnnnnnnnnnnnnnnnnnnnnnnnnnnnnnnnnnnnnnnnnnnnnnnnnnnnnnnnnnnnnnnnnnnnnnnnnnnnnnnnnnnnnnnnnnnnnnnnnnnnnnnnnnnnnnnnnnnnnnnnnnnnnnnnnnnnnnnnnnnnnnnnnnnnnnnnnnnnnnnnnnnnnnnnnnnnnnnnnnnnnnnnnnnnnnnnnnnnnnnnnnnnnnnnnnnnnnnnnnnnnnnnnnnnnnnnnnnnnnnnnnnnnnnnnnnnnnnnnnnnnnnnnnnnnnnnnnnnnnnnnnnnnnnnnnnnnnnnnnnnnnnnnnnnnnnnnnnnnnnnnnnnnnnnnnnnnnnnnnnnnnnnnnnnnnnnnnnnnnnnnnnnnnnnnnnnnnnnnnnnnnnnnnnnnnnnnnnnnnnnnnnnnnnnnnnnnnnnnnnnnnnnnnnnnnnnnnnnnnnnnnnnnnnnnnnnnnnnnnnnnnnnnnnnnnnnnnnnnnnnnnnnnnnnnnnnnnnnnnnnnnnnnnnnnnnnnnnnnnnnnnnnnnnnnnnnnnnnnnnnnnnnnnnnnnnnnnnnnnnnnnnnnnnnnnnnnnnnnnnnnnnnnnnnnnnnnnnnnnnnnnnnnnnnnnnnnnnnnnnnnnnnnnnnnnnnnnnnnnnnnnnnnnnnnnnnnnnnnnnnnnnnnnnnnnnnnnnnnnnnnnnnnnnnnnnnnnnnnnnnnnnnnnnnnnnnnnnnnnnnnnnnnnnnnnnnnnnnnnnnnnnnnnnnnnnnnnnnnnnnnnnnnnnnnnnnnnnnnnnnnnnnnnnnnnnnnnnnnnnnnnnnnnnnnnnnnnnnnnnnnnnnnnnnnnnnnnnnnnnnnnnnnnnnnnnnnnnnnnnnnnnnnnnnnnnnnnnnnnnnnnnnnnnnnnnnnnnnnnnnnnnnnnnnnnnnnnnnnnnnnnnnnnnnnnnnnnnnnnnnnnnnnnnnnnnnnnnnnnnnnnnnnnnnnnnnnnnnnnnnnnnnnnnnnnnnnnnnnnnnnnnnnnnnnnnnnnnnnnnnnnnnnnnnnnnnnnnnnnnnnnnnnnnnnnnnnnnnnnnnnnnnnnnnnnnnnnnnnnnnnnnnnnnnnnnnnnnnnnnnnnnnnnnnnnnnnnnnnnnnnnnnnnnnnnnnnnnnnnnnnnnnnnnnnnnnnnnnnnnnnnnnnnnnnnnnnnnnnnnnnnnnnnnnnnnnnnnnnnnnnnnnnnnnnnnnnnnnnnnnnnnnnnnnnnnnnnnnnnnnnnnnnnnnnnnnnnnnnnnnnnnnnnnnnnnnnnnnnnnnnnnnnnnnnnnnnnnnnnnnnnnnnnnnnnnnnnnnnnnnnnnnnnnnnnnnnnnnnnnnnnnnnnnnnnnnnnnnnnnnnnnnnnnnnnnnnnnnnnnnnnnnnnnnnnnnnnnnnnnnnnnnnnnnnnnnnnnnnnnnnnnnnnnnnnnnnnnnnnnnnnnnnnnnnnnnnnnnnnnnnnnnnnnnnnnnnnnnnnnnnnnnnnnnnnnnnnnnnnnnnnnnnnnnnnnnnnnnnnnnnnnnnnnnnnnnnnnnnnnnnnnnnnnnnnnnnnnnnnnnnnnnnnnnnnnnnnnnnnnnnnnnnnnnnnnnnnnnnnnnnnnnnnnnnnnnnnnnnnnnnnnnnnnnnnnnnnnnnnnnnnnnnnnnnnnnnnnnnnnnnnnnnnnnnnnnnnnnnnnnnnnnnnnnnnnnnnnnnnnnnnnnnnnnnnnnnnnnnnnnnnnnnnnnnnnnnnnnnnnnnnnnnnnnnnnnnnnnnnnnnnnnnnnnnnnnnnnnnnnnnnnnnnnnnnnnnnnnnnnnnnnnnnnnnnnnnnnnnnnnnnnnnnnnnnnnnnnnnnnnnnnnnnnnnnnnnnnnnnnnnnnnnnnnnnnnnnnnnnnnnnnnnnnnnnnnnnnnnnnnnnnnnnnnnnnnnnnnnnnnnnnnnnnnnnnnnnnnnnnnnnnnnnnnnnnnnnnnnnnnnnnnnnnnnnnnnnnnnnnnnnnnnnnnnnnnnnnnnnnnnnnnnnnnnnnnnnnnnnnnnnnnnnnnnnnnnnnnnnnnnnnnnnnnnnnnnnnnnnnnnnnnnnnnnnnnnnnnnnnnnnnnnnnnnnnnnnnnnnnnnnnnnnnnnnnnnnnnnnnnnnnnnnnnnnnnnnnnnnnnnnnnnnnnnnnnnnnnnnnnnnnnnnnnnnnnnnnnnnnnnnnnnnnnnnnnnnnnnnnnnnnnnnnnnnnnnnnnnnnnnnnnnnnnnnnnnnnnnnnnnnnnnnnnnnnnnnnnnnnnnnnnnnnnnnnnnnnnnnnnnnnnnnnnnnnnnnnnnnnnnnnnnnnnnnnnnnnnnnnnnnnnnnnnnnnnnnnnnnnnnnnnnnnnnnnnnnnnnnnnnnnnnnnnnnnnnnnnnnnnnnnnnnnnnnnnnnnnnnnnnnnnnnnnnnnnnnnnnnnnnnnnnnnnnnnnnnnnnnnnnnnnnnnnnnnnnnnnnnnnnnnnnnnnnnnnnnnnnnnnnnnnnnnnnnnnnnnnnnnnnnnnnnnnnnnnnnnnnnnnnnnnnnnnnnnnnnnnnnnnnnnnnnnnnnnnnnnnnnnnnnnnnnnnnnnnnnnnnnnnnnnnnnnnnnnnnnnnnnnnnnnnnnnnnnnnnnnnnnnnnnnnnnnnnnnnnnnnnnnnnnnnnnnnnnnnnnnnnnnnnnnnnnnnnnnnnnnnnnnnnnnnnnnnnnnnnnnnnnnnnnnnnnnnnnnnnnnnnnnnnnnnnnnnnnnnnnnnnnnnnnnnnnnnnnnnnnnnnnnnnnnnnnnnnnnnnnnnnnnnnnnnnnnnnnnnnnnnnnnnnnnnnnnnnnnnnnnnnnnnnnnnnnnnnnnnnnnnnnnnnnnnnnnnnnnnnnnnnnnnnnnnnnnnnnnnnnnnnnnnnnnnnnnnnnnnnnnnnnnnnnnnnnnnnnnnnnnnnnnnnnnnnnnnnnnnnnnnnnnnnnnnnnnnnnnnnnnnnnnnnnnnnnnnnnnnnnnnnnnnnnnnnnnnnnnnnnnnnnnnnnnnnnnnnnnnnnnnnnnnnnnnnnnnnnnnnnnnnnnnnnnnnnnnnnnnnnnnnnnnnnnnnnnnnnnnnnnnnnnnnnnnnnnnnnnnnnnnnnnnnnnnnnnnnnnnnnnnnnnnnnnnnnnnnnnnnnnnnnnnnnnnnnnnnnnnnnnnnnnnnnnnnnnnnnnnnnnnnnnnnnnnnnnnnnnnnnnnnnnnnnnnnnnnnnnnnnnnnnnnnnnnnnnnnnnnnnnnnnnnnnnnnnnnnnnnnnnnnnnnnnnnnnnnnnnnnnnnnnnnnnnnnnnnnnnnnnnnnnnnnnnnnnnnnnnnnnnnnnnnnnnnnnnnnnnnnnnnnnnnnnnnnnnnnnnnnnnnnnnnnnnnnnnnnnnnnnnnnnnnnnnnnnnnnnnnnnnnnnnnnnnnnnnnnnnnnnnnnnnnnnnnnnnnnnnnnnnnnnnnnnnnnnnnnnnnnnnnnnnnnnnnnnnnnnnnnnnnnnnnnnnnnnnnnnnnnnnnnnnnnnnnnnnnnnnnnnnnnnnnnnnnnnnnnnnnnnnnnnnnnnnnnnnnnnnnnnnnnnnnnnnnnnnnnnnnnnnnnnnnnnnnnnnnnnnnnnnnnnnnnnnnnnnnnnnnnnnnnnnnnnnnnnnnnnnnnnnnnnnnnnnnnnnnnnnnnnnnnnnnnnnnnnnnnnnnnnnnnnnnnnnnnnnnnnnnnnnnnnnnnnnnnnnnnnnnnnnnnnnnnnnnnnnnnnnnnnnnnnnnnnnnnnnnnnnnnnnnnnnnnnnnnnnnnnnnnnnnnnnnnnnnnnnnnnnnnnnnnnnnnnnnnnnnnnnnnnnnnnnnnnnnnnnnnnnnnnnnnnnnnnnnnnnnnnnnnnnnnnnnnnnnnnnnnnnnnnnnnnnnnnnnnnnnnnnnnnnnnnnnnnnnnnnnnnnnnnnnnnnnnnnnnnnnnnnnnnnnnnnnnnnnnnnnnnnnnnnnnnnnnnnnnnnnnnnnnnnnnnnnnnnnnnnnnnnnnnnnnnnnnnnnnnnnnnnnnnnnnnnnnnnnnnnnnnnnnnnnnnnnnnnnnnnnnnnnnnnnnnnnnnnnnnnnnnnnnnnnnnnnnnnnnnnnnnnnnnnnnnnnnnnnnnnnnnnnnnnnnnnnnnnnnnnnnnnnnnnnnnnnnnnnnnnnnnnnnnnnnnnnnnnnnnnnnnnnnnnnnnnnnnnnnnnnnnnnnnnnnnnnnnnnnnnnnnnnnnnnnnnnnnnnnnnnnnnnnnnnnnnnnnnnnnnnnnnnnnnnnnnnnnnnnnnnnnnnnnnnnnnnnnnnnnnnnnnnnnnnnnnnnnnnnnnnnnnnnnnnnnnnnnnnnnnnnnnnnnnnnnnnnnnnnnnnnnnnnnnnnnnnnnnnnnnnnnnnnnnnnnnnnnnnnnnnnnnnnnnnnnnnnnnnnnnnnnnnnnnnnnnnnnnnnnnnnnnnnnnnnnnnnnnnnnnnnnnnnnnnnnnnnnnnnnnnnnnnnnnnnnnnnnnnnnnnnnnnnnnnnnnnnnnnnnnnnnnnnnnnnnnnnnnnnnnnnnnnnnnnnnnnnnnnnnnnnnnnnnnnnnnnnnnnnnnnnnnnnnnnnnnnnnnnnnnnnnnnnnnnnnnnnnnnnnnnnnnnnnnnnnnnnnnnnnnnnnnnnnnnnnnnnnnnnnnnnnnnnnnnnnnnnnnnnnnnnnnnnnnnnnnnnnnnnnnnnnnnnnnnnnnnnnnnnnnnnnnnnnnnnnnnnnnnnnnnnnnnnnnnnnnnnnnnnnnnnnnnnnnnnnnnnnnnnnnnnnnnnnnnnnnnnnnnnnnnnnnnnnnnnnnnnnnnnnnnnnnnnnnnnnnnnnnnnnnnnnnnnnnnnnnnnnnnnnnnnnnnnnnnnnnnnnnnnnnnnnnnnnnnnnnnnnnnnnnnnnnnnnnnnnnnnnnnnnnnnnnnnnnnnnnnnnnnnnnnnnnnnnnnnnnnnnnnnnnnnnnnnnnnnnnnnnnnnnnnnnnnnnnnnnnnnnnnnnnnnnnnnnnnnnnnnnnnnnnnnnnnnnnnnnnnnnnnnnnnnnnnnnnnnnnnnnnnnnnnnnnnnnnnnnnnnnnnnnnnnnnnnnnnnnnnnnnnnnnnnnnnnnnnnnnnnnnnnnnnnnnnnnnnnnnnnnnnnnnnnnnnnnnnnnnnnnnnnnnnnnnnnnnnnnnnnnnnnnnnnnnnnnnnnnnnnnnnnnnnnnnnnnnnnnnnnnnnnnnnnnnnnnnnnnnnnnnnnnnnnnnnnnnnnnnnnnnnnnnnnnnnnnnnnnnnnnnnnnnnnnnnnnnnnnnnnnnnnnnnnnnnnnnnnnnnnnnnnnnnnnnnnnnnnnnnnnnnnnnnnnnnnnnnnnnnnnnnnnnnnnnnnnnnnnnnnnnnnnnnnnnnnnnnnnnnnnnnnnnnnnnnnnnnnnnnnnnnnnnnnnnnnnnnnnnnnnnnnnnnnnnnnnnnnnnnnnnnnnnnnnnnnnnnnnnnnnnnnnnnnnnnnnnnnnnnnnnnnnnnnnnnnnnnnnnnnnnnnnnnnnnnnnnnnnnnnnnnnnnnnnnnnnnnnnnnnnnnnnnnnnnnnnnnnnnnnnnnnnnnnnnnnnnnnnnnnnnnnnnnnnnnnnnnnnnnnnnnnnnnnnnnnnnnnnnnnnnnnnnnnnnnnnnnnnnnnnnnnnnnnnnnnnnnnnnnnnnnnnnnnnnnnnnnnnnnnnnnnnnnnnnnnnnnnnnnnnnnnnnnnnnnnnnnnnnnnnnnnnnnnnnnnnnnnnnnnnnnnnnnnnnnnnnnnnnnnnnnnnnnnnnnnnnnnnnnnnnnnnnnnnnnnnnnnnnnnnnnnnnnnnnnnnnnnnnnnnnnnnnnnnnnnnnnnnnnnnnnnnnnnnnnnnnnnnnnnnnnnnnnnnnnnnnnnnnnnnnnnnnnnnnnnnnnnnnnnnnnnnnnnnnnnnnnnnnnnnnnnnnnnnnnnnnnnnnnnnnnnnnnnnnnnnnnnnnnnnnnnnnnnnnnnnnnnnnnnnnnnnnnnnnnnnnnnnnnnnnnnnnnnnnnnnnnnnnnnnnnnnnnnnnnnnnnnnnnnnnnnnnnnnnnnnnnnnnnnnnnnnnnnnnnnnnnnnnnnnnnnnnnnnnnnnnnnnnnnnnnnnnnnnnnnnnnnnnnnnnnnnnnnnnnnnnnnnnnnnnnnnnnnnnnnnnnnnnnnnnnnnnnnnnnnnnnnnnnnnnnnnnnnnnnnnnnnnnnnnnnnnnnnnnnnnnnnnnnnnnnnnnnnnnnnnnnnnnnnnnnnnnnnnnnnnnnnnnnnnnnnnnnnnnnnnnnnnnnnnnnnnnnnnnnnnnnnnnnnnnnnnnnnnnnnnnnnnnnnnnnnnnnnnnnnnnnnnnnnnnnnnnnnnnnnnnnnnnnnnnnnnnnnnnnnnnnnnnnnnnnnnnnnnnnnnnnnnnnnnnnnnnnnnnnnnnnnnnnnnnnnnnnnnnnnnnnnnnnnnnnnnnnnnnnnnnnnnnnnnnnnnnnnnnnnnnnnnnnnnnnnnnnnnnnnnnnnnnnnnnnnnnnnnnnnnnnnnnnnnnnnnnnnnnnnnnnnnnnnnnnnnnnnnnnnnnnnnnnnnnnnnnnnnnnnnnnnnnnnnnnnnnnnnnnnnnnnnnnnnnnnnnnnnnnnnnnnnnnnnnnnnnnnnnnnnnnnnnnnnnnnnnnnnnnnnnnnnnnnnnnnnnnnnnnnnnnnnnnnnnnnnnnnnnnnnnnnnnnnnnnnnnnnnnnnnnnnnnnnnnnnnnnnnnnnnnnnnnnnnnnnnnnnnnnnnnnnnnnnnnnnnnnnnnnnnnnnnnnnnnnnnnnnnnnnnnnnnnnnnnnnnnnnnnnnnnnnnnnnnnnnnnnnnnnnnnnnnnnnnnnnnnnnnnnnnnnnnnnnnnnnnnnnnnnnnnnnnnnnnnnnnnnnnnnnnnnnnnnnnnnnnnnnnnnnnnnnnnnnnnnnnnnnnnnnnnnnnnnnnnnnnnnnnnnnnnnnnnnnnnnnnnnnnnnnnnnnnnnnnnnnnnnnnnnnnnnnnnnnnnnnnnnnnnnnnnnnnnnnnnnnnnnnnnnnnnnnnnnnnnnnnnnnnnnnnnnnnnnnnnnnnnnnnnnnnnnnnnnnnnnnnnnnnnnnnnnnnnnnnnnnnnnnnnnnnnnnnnnnnnnnnnnnnnnnnnnnnnnnnnnnnnnnnnnnnnnnnnnnnnnnnnnnnnnnnnnnnnnnnnnnnnnnnnnnnnnnnnnnnnnnnnnnnnnnnnnnnnnnnnnnnnnnnnnnnnnnnnnnnnnnnnnnnnnnnnnnnnnnnnnnnnnnnnnnnnnnnnnnnnnnnnnnnnnnnnnnnnnnnnnnnnnnnnnnnnnnnnnnnnnnnnnnnnnnnnnnnnnnnnnnnnnnnnnnnnnnnnnnnnnnnnnnnnnnnnnnnnnnnnnnnnnnnnnnnnnnnnnnnnnnnnnnnnnnnnnnnnnnnnnnnnnnnnnnnnnnnnnnnnnnnnnnnnnnnnnnnnnnnnnnnnnnnnnnnnnnnnnnnnnnnnnnnnnnnnnnnnnnnnnnnnnnnnnnnnnnnnnnnnnnnnnnnnnnnnnnnnnnnnnnnnnnnnnnnnnnnnnnnnnnnnnnnnnnnnnnnnnnnnnnnnnnnnnnnnnnnnnnnnnnnnnnnnnnnnnnnnnnnnnnnnnnnnnnnnnnnnnnnnnnnnnnnnnnnnnnnnnnnnnnnnnnnnnnnnnnnnnnnnnnnnnnnnnnnnnnnnnnnnnnnnnnnnnnnnnnnnnnnnnnnnnnnnnnnnnnnnnnnnnnnnnnnnnnnnnnnnnnnnnnnnnnnnnnnnnnnnnnnnnnnnnnnnnnnnnnnnnnnnnnnnnnnnnnnnnnnnnnnnnnnnnnnnnnnnnnnnnnnnnnnnnnnnnnnnnnnnnnnnnnnnnnnnnnnnnnnnnnnnnnnnnnnnnnnnnnnnnnnnnnnnnnnnnnnnnnnnnnnnnnnnnnnnnnnnnnnnnnnnnnnnnnnnnnnnnnnnnnnnnnnnnnnnnnnnnnnnnnnnnnnnnnnnnnnnnnnnnnnnnnnnnnnnnnnnnnnnnnnnnnnnnnnnnnnnnnnnnnnnnnnnnnnnnnnnnnnnnnnnnnnnnnnnnnnnnnnnnnnnnnnnnnnnnnnnnnnnnnnnnnnnnnnnnnnnnnnnnnnnnnnnnnnnnnnnnnnnnnnnnnnnnnnnnnnnnnnnnnnnnnnnnnnnnnnnnnnnnnnnnnnnnnnnnnnnnnnnnnnnnnnnnnnnnnnnnnnnnnnnnnnnnnnnnnnnnnnnnnnnnnnnnnnnnnnnnnnnnnnnnnnnnnnnnnnnnnnnnnnnnnnnnnnnnnnnnnnnnnnnnnnnnnnnnnnnnnnnnnnnnnnnnnnnnnnnnnnnnnnnnnnnnnnnnnnnnnnnnnnnnnnnnnnnnnnnnnnnnnnnnnnnnnnnnnnnnnnnnnnnnnnnnnnnnnnnnnnnnnnnnnnnnnnnnnnnnnnnnnnnnnnnnnnnnnnnnnnnnnnnnnnnnnnnnnnnnnnnnnnnnnnnnnnnnnnnnnnnnnnnnnnnnnnnnnnnnnnnnnnnnnnnnnnnnnnnnnnnnnnnnnnnnnnnnnnnnnnnnnnnnnnnnnnnnnnnnnnnnnnnnnnnnnnnnnnnnnnnnnnnnnnnnnnnnnnnnnnnnnnnnnnnnnnnnnnnnnnnnnnnnnnnnnnnnnnnnnnnnnnnnnnnnnnnnnnnnnnnnnnnnnnnnnnnnnnnnnnnnnnnnnnnnnnnnnnnnnnnnnnnnnnnnnnnnnnnnnnnnnnnnnnnnnnnnnnnnnnnnnnnnnnnnnnnnnnnnnnnnnnnnnnnnnnnnnnnnnnnnnnnnnnnnnnnnnnnnnnnnnnnnnnnnnnnnnnnnnnnnnnnnnnnnnnnnnnnnnnnnnnnnnnnnnnnnnnnnnnnnnnnnnnnnnnnnnnnnnnnnnnnnnnnnnnnnnnnnnnnnnnnnnnnnnnnnnnnnnnnnnnnnnnnnnnnnnnnnnnnnnnnnnnnnnnnnnnnnnnnnnnnnnnnnnnnnnnnnnnnnnnnnnnnnnnnnnnnnnnnnnnnnnnnnnnnnnnnnnnnnnnnnnnnnnnnnnnnnnnnnnnnnnnnnnnnnnnnnnnnnnnnnnnnnnnnnnnnnnnnnnnnnnnnnnnnnnnnnnnnnnnnnnnnnnnnnnnnnnnnnnnnnnnnnnnnnnnnnnnnnnnnnnnnnnnnnnnnnnnnnnnnnnnnnnnnnnnnnnnnnnnnnnnnnnnnnnnnnnnnnnnnnnnnnnnnnnnnnnnnnnnnnnnnnnnnnnnnnnnnnnnnnnnnnnnnnnnnnnnnnnnnnnnnnnnnnnnnnnnnnnnnnnnnnnnnnnnnnnnnnnnnnnnnnnnnnnnnnnnnnnnnnnnnnnnnnnnnnnnnnnnnnnnnnnnnnnnnnnnnnnnnnnnnnnnnnnnnnnnnnnnnnnnnnnnnnnnnnnnnnnnnnnnnnnnnnnnnnnnnnnnnnnnnnnnnnnnnnnnnnnnnnnnnnnnnnnnnnnnnnnnnnnnnnnnnnnnnnnnnnnnnnnnnnnnnnnnnnnnnnnnnnnnnnnnnnnnnnnnnnnnnnnnnnnnnnnnnnnnnnnnnnnnnnnnnnnnnnnnnnnnnnnnnnnnnnnnnnnnnnnnnnnnnnnnnnnnnnnnnnnnnnnnnnnnnnnnnnnnnnnnnnnnnnnnnnnnnnnnnnnnnnnnnnnnnnnnnnnnnnnnnnnnnnnnnnnnnnnnnnnnnnnnnnnnnnnnnnnnnnnnnnnnnnnnnnnnnnnnnnnnnnnnnnnnnnnnnnnnnnnnnnnnnnnnnnnnnnnnnnnnnnnnnnnnnnnnnnnnnnnnnnnnnnnnnnnnnnnnnnnnnnnnnnnnnnnnnnnnnnnnnnnnnnnnnnnnnnnnnnnnnnnnnnnnnnnnnnnnnnnnnnnnnnnnnnnnnnnnnnnnnnnnnnnnnnnnnnnnnnnnnnnnnnnnnnnnnnnnnnnnnnnnnnnnnnnnnnnnnnnnnnnnnnnnnnnnnnnnnnnnnnnnnnnnnnnnnnnnnnnnnnnnnnnnnnnnnnnnnnnnnnnnnnnnnnnnnnnnnnnnnnnnnnnnnnnnnnnnnnnnnnnnnnnnnnnnnnnnnnnnnnnnnnnnnnnnnnnnnnnnnnnnnnnnnnnnnnnnnnnnnnnnnnnnnnnnnnnnnnnnnnnnnnnnnnnnnnnnnnnnnnnnnnnnnnnnnnnnnnnnnnnnnnnnnnnnnnnnnnnnnnnnnnnnnnnnnnnnnnnnnnnnnnnnnnnnnnnnnnnnnnnnnnnnnnnnnnnnnnnnnnnnnnnnnnnnnnnnnnnnnnnnnnnnnnnnnnnnnnnnnnnnnnnnnnnnnnnnnnnnnnnnnnnnnnnnnnnnnnnnnnnnnnnnnnnnnnnnnnnnnnnnnnnnnnnnnnnnnnnnnnnnnnnnnnnnnnnnnnnnnnnnnnnnnnnnnnnnnnnnnnnnnnnnnnnnnnnnnnnnnnnnnnnnnnnnnnnnnnnnnnnnnnnnnnnnnnnnnnnnnnnnnnnnnnnnnnnnnnnnnnnnnnnnnnnnnnnnnnnnnnnnnnnnnnnnnnnnnnnnnnnnnnnnnnnnnnnnnnnnnnnnnnnnnnnnnnnnnnnnnnnnnnnnnnnnnnnnnnnnnnnnnnnnnnnnnnnnnnnnnnnnnnnnnnnnnnnnnnnnnnnnnnnnnnnnnnnnnnnnnnnnnnnnnnnnnnnnnnnnnnnnnnnnnnnnnnnnnnnnnnnnnnnnnnnnnnnnnnnnnnnnnnnnnnnnnnnnnnnnnnnnnnnnnnnnnnnnnnnnnnnnnnnnnnnnnnnnnnnnnnnnnnnnnnnnnnnnnnnnnnnnnnnnnnnnnnnnnnnnnnnnnnnnnnnnnnnnnnnnnnnnnnnnnnnnnnnnnnnnnnnnnnnnnnnnnnnnnnnnnnnnnnnnnnnnnnnnnnnnnnnnnnnnnnnnnnnnnnnnnnnnnnnnnnnnnnnnnnnnnnnnnnnnnnnnnnnnnnnnnnnnnnnnnnnnnnnnnnnnnnnnnnnnnnnnnnnnnnnnnnnnnnnnnnnnnnnnnnnnnnnnnnnnnnnnnnnnnnnnnnnnnnnnnnnnnnnnnnnnnnnnnnnnnnnnnnnnnnnnnnnnnnnnnnnnnnnnnnnnnnnnnnnnnnnnnnnnnnnnnnnnnnnnnnnnnnnnnnnnnnnnnnnnnnnnnnnnnnnnnnnnnnnnnnnnnnnnnnnnnnnnnnnnnnnnnnnnnnnnnnnnnnnnnnnnnnnnnnnnnnnnnnnnnnnnnnnnnnnnnnnnnnnnnnnnnnnnnnnnnnnnnnnnnnnnnnnnnnnnnnnnnnnnnnnnnnnnnnnnnnnnnnnnnnnnnnnnnnnnnnnnnnnnnnnnnnnnnnnnnnnnnnnnnnnnnnnnnnnnnnnnnnnnnnnnnnnnnnnnnnnnnnnnnnnnnnnnnnnnnnnnnnnnnnnnnnnnnnnnnnnnnnnnnnnnnnnnnnnnnnnnnnnnnnnnnnnnnnnnnnnnnnnnnnnnnnnnnnnnnnnnnnnnnnnnnnnnnnnnnnnnnnnnnnnnnnnnnnnnnnnnnnnnnnnnnnnnnnnnnnnnnnnnnnnnnnnnnnnnnnnnnnnnnnnnnnnnnnnnnnnnnnnnnnnnnnnnnnnnnnnnnnnnnnnnnnnnnnnnnnnnnnnnnnnnnnnnnnnnnnnnnnnnnnnnnnnnnnnnnnnnnnnnnnnnnnnnnnnnnnnnnnnnnnnnnnnnnnnnnnnnnnnnnnnnnnnnnnnnnnnnnnnnnnnnnnnnnnnnnnnnnnnnnnnnnnnnnnnnnnnnnnnnnnnnnnnnnnnnnnnnnnnnnnnnnnnnnnnnnnnnnnnnnnnnnnnnnnnnnnnnnnnnnnnnnnnnnnnnnnnnnnnnnnnnnnnnnnnnnnnnnnnnnnnnnnnnnnnnnnnnnnnnnnnnnnnnnnnnnnnnnnnnnnnnnnnnnnnnnnnnnnnnnnnnnnnnnnnnnnnnnnnnnnnnnnnnnnnnnnnnnnnnnnnnnnnnnnnnnnnnnnnnnnnnnnnnnnnnnnnnnnnnnnnnnnnnnnnnnnnnnnnnnnnnnnnnnnnnnnnnnnnnnnnnnnnnnnnnnnnnnnnnnnnnnnnnnnnnnnnnnnnnnnnnnnnnnnnnnnnnnnnnnnnnnnnnnnnnnnnnnnnnnnnnnnnnnnnnnnnnnnnnnnnnnnnnnnnnnnnnnnnnnnnnnnnnnnnnnnnnnnnnnnnnnnnnnnnnnnnnnnnnnnnnnnnnnnnnnnnnnnnnnnnnnnnnnnnnnnnnnnnnnnnnnnnnnnnnnnnnnnnnnnnnnnnnnnnnnnnnnnnnnnnnnnnnnnnnnnnnnnnnnnnnnnnnnnnnnnnnnnnnnnnnnnnnnnnnnnnnnnnnnnnnnnnnnnnnnnnnnnnnnnnnnnnnnnnnnnnnnnnnnnnnnnnnnnnnnnnnnnnnnnnnnnnnnnnnnnnnnnnnnnnnnnnnnnnnnnnnnnnnnnnnnnnnnnnnnnnnnnnnnnnnnnnnnnnnnnnnnnnnnnnnnnnnnnnnnnnnnnnnnnnnnnnnnnnnnnnnnnnnnnnnnnnnnnnnnnnnnnnnnnnnnnnnnnnnnnnnnnnnnnnnnnnnnnnnnnnnnnnnnnnnnnnnnnnnnnnnnnnnnnnnnnnnnnnnnnnnnnnnnnnnnnnnnnnnnnnnnnnnnnnnnnnnnnnnnnnnnnnnnnnnnnnnnnnnnnnnnnnnnnnnnnnnnnnnnnnnnnnnnnnnnnnnnnnnnnnnnnnnnnnnnnnnnnnnnnnnnnnnnnnnnnnnnnnnnnnnnnnnnnnnnnnnnnnnnnnnnnnnnnnnnnnnnnnnnnnnnnnnnnnnnnnnnnnnnnnnnnnnnnnnnnnnnnnnnnnnnnnnnnnnnnnnnnnnnnnnnnnnnnnnnnnnnnnnnnnnnnnnnnnnnnnnnnnnnnnnnnnnnnnnnnnnnnnnnnnnnnnnnnnnnnnnnnnnnnnnnnnnnnnnnnnnnnnnnnnnnnnnnnnnnnnnnnnnnnnnnnnnnnnnnnnnnnnnnnnnnnnnnnnnnnnnnnnnnnnnnnnnnnnnnnnnnnnnnnnnnnnnnnnnnnnnnnnnnnnnnnnnnnnnnnnnnnnnnnnnnnnnnnnnnnnnnnnnnnnnnnnnnnnnnnnnnnnnnnnnnnnnnnnnnnnnnnnnnnnnnnnnnnnnnnnnnnnnnnnnnnnnnnnnnnnnnnnnnnnnnnnnnnnnnnnnnnnnnnnnnnnnnnnnnnnnnnnnnnnnnnnnnnnnnnnnnnnnnnnnnnnnnnnnnnnnnnnnnnnnnnnnnnnnnnnnnnnnnnnnnnnnnnnnnnnnnnnnnnnnnnnnnnnnnnnnnnnnnnnnnnnnnnnnnnnnnnnnnnnnnnnnnnnnnnnnnnnnnnnnnnnnnnnnnnnnnnnnnnnnnnnnnnnnnnnnnnnnnnnnnnnnnnnnnnnnnnnnnnnnnnnnnnnnnnnnnnnnnnnnnnnnnnnnnnnnnnnnnnnnnnnnnnnnnnnnnnnnnnnnnnnnnnnnnnnnnnnnnnnnnnnnnnnnnnnnnnnnnnnnnnnnnnnnnnnnnnnnnnnnnnnnnnnnnnnnnnnnnnnnnnnnnnnnnnnnnnnnnnnnnnnnnnnnnnnnnnnnnnnnnnnnnnnnnnnnnnnnnnnnnnnnnnnnnnnnnnnnnnnnnnnnnnnnnnnnnnnnnnnnnnnnnnnnnnnnnnnnnnnnnnnnnnnnnnnnnnnnnnnnnnnnnnnnnnnnnnnnnnnnnnnnnnnnnnnnnnnnnnnnnnnnnnnnnnnnnnnnnnnnnnnnnnnnnnnnnnnnnnnnnnnnnnnnnnnnnnnnnnnnnnnnnnnnnnnnnnnnnnnnnnnnnnnnnnnnnnnnnnnnnnnnnnnnnnnnnnnnnnnnnnnnnnnnnnnnnnnnnnnnnnnnnnnnnnnnnnnnnnnnnnnnnnnnnnnnnnnnnnnnnnnnnnnnnnnnnnnnnnnnnnnnnnnnnnnnnnnnnnnnnnnnnnnnnnnnnnnnnnnnnnnnnnnnnnnnnnnnnnnnnnnnnnnnnnnnnnnnnnnnnnnnnnnnnnnnnnnnnnnnnnnnnnnnnnnnnnnnnnnnnnnnnnnnnnnnnnnnnnnnnnnnnnnnnnnnnnnnnnnnnnnnnnnnnnnnnnnnnnnnnnnnnnnnnnnnnnnnnnnnnnnnnnnnnnnnnnnnnnnnnnnnnnnnnnnnnnnnnnnnnnnnnnnnnnnnnnnnnnnnnnnnnnnnnnnnnnnnnnnnnnnnnnnnnnnnnnnnnnnnnnnnnnnnnnnnnnnnnnnnnnnnnnnnnnnnnnnnnnnnnnnnnnnnnnnnnnnnnnnnnnnnnnnnnnnnnnnnnnnnnnnnnnnnnnnnnnnnnnnnnnnnnnnnnnnnnnnnnnnnnnnnnnnnnnnnnnnnnnnnnnnnnnnnnnnnnnnnnnnnnnnnnnnnnnnnnnnnnnnnnnnnnnnnnnnnnnnnnnnnnnnnnnnnnnnnnnnnnnnnnnnnnnnnnnnnnnnnnnnnnnnnnnnnnnnnnnnnnnnnnnnnnnnnnnnnnnnnnnnnnnnnnnnnnnnnnnnnnnnnnnnnnnnnnnnnnnnnnnnnnnnnnnnnnnnnnnnnnnnnnnnnnnnnnnnnnnnnnnnnnnnnnnnnnnnnnnnnnnnnnnnnnnnnnnnnnnnnnnnnnnnnnnnnnnnnnnnnnnnnnnnnnnnnnnnnnnnnnnnnnnnnnnnnnnnnnnnnnnnnnnnnnnnnnnnnnnnnnnnnnnnnnnnnnnnnnnnnnnnnnnnnnnnnnnnnnnnnnnnnnnnnnnnnnnnnnnnnnnnnnnnnnnnnnnnnnnnnnnnnnnnnnnnnnnnnnnnnnnnnnnnnnnnnnnnnnnnnnnnnnnnnnnnnnnnnnnnnnnnnnnnnnnnnnnnnnnnnnnnnnnnnnnnnnnnnnnnnnnnnnnnnnnnnnnnnnnnnnnnnnnnnnnnnnnnnnnnnnnnnnnnnnnnnnnnnnnnnnnnnnnnnnnnnnnnnnnnnnnnnnnnnnnnnnnnnnnnnnnnnnnnnnnnnnnnnnnnnnnnnnnnnnnnnnnnnnnnnnnnnnnnnnnnnnnnnnnnnnnnnnnnnnnnnnnnnnnnnnnnnnnnnnnnnnnnnnnnnnnnnnnnnnnnnnnnnnnnnnnnnnnnnnnnnnnnnnnnnnnnnnnnnnnnnnnnnnnnnnnnnnnnnnnnnnnnnnnnnnnnnnnnnnnnnnnnnnnnnnnnnnnnnnnnnnnnnnnnnnnnnnnnnnnnnnnnnnnnnnnnnnnnnnnnnnnnnnnnnnnnnnnnnnnnnnnnnnnnnnnnnnnnnnnnnnnnnnnnnnnnnnnnnnnnnnnnnnnnnnnnnnnnnnnnnnnnnnnnnnnnnnnnnnnnnnnnnnnnnnnnnnnnnnnnnnnnnnnnnnnnnnnnnnnnnnnnnnnnnnnnnnnnnnnnnnnnnnnnnnnnnnnnnnnnnnnnnnnnnnnnnnnnnnnnnnnnnnnnnnnnnnnnnnnnnnnnnnnnnnnnnnnnnnnnnnnnnnnnnnnnnnnnnnnnnnnnnnnnnnnnnnnnnnnnnnnnnnnnnnnnnnnnnnnnnnnnnnnnnnnnnnnnnnnnnnnnnnnnnnnnnnnnnnnnnnnnnnnnnnnnnnnnnnnnnnnnnnnnnnnnnnnnnnnnnnnnnnnnnnnnnnnnnnnnnnnnnnnnnnnnnnnnnnnnnnnnnnnnnnnnnnnnnnnnnnnnnnnnnnnnnnnnnnnnnnnnnnnnnnnnnnnnnnnnnnnnnnnnnnnnnnnnnnnnnnnnnnnnnnnnnnnnnnnnnnnnnnnnnnnnnnnnnnnnnnnnnnnnnnnnnnnnnnnnnnnnnnnnnnnnnnnnnnnnnnnnnnnnnnnnnnnnnnnnnnnnnnnnnnnnnnnnnnnnnnnnnnnnnnnnnnnnnnnnnnnnnnnnnnnnnnnnnnnnnnnnnnnnnnnnnnnnnnnnnnnnnnnnnnnnnnnnnnnnnnnnnnnnnnnnnnnnnnnnnnnnnnnnnnnnnnnnnnnnnnnnnnnnnnnnnnnnnnnnnnnnnnnnnnnnnnnnnnnnnnnnnnnnnnnnnnnnnnnnnnnnnnnnnnnnnnnnnnnnnnnnnnnnnnnnnnnnnnnnnnnnnnnnnnnnnnnnnnnnnnnnnnnnnnnnnnnnnnnnnnnnnnnnnnnnnnnnnnnnnnnnnnnnnnnnnnnnnnnnnnnnnnnnnnnnnnnnnnnnnnnnnnnnnnnnnnnnnnnnnnnnnnnnnnnnnnnnnnnnnnnnnnnnnnnnnnnnnnnnnnnnnnnnnnnnnnnnnnnnnnnnnnnnnnnnnnnnnnnnnnnnnnnnnnnnnnnnnnnnnnnnnnnnnnnnnnnnnnnnnnnnnnnnnnnnnnnnnnnnnnnnnnnnnnnnnnnnnnnnnnnnnnnnnnnnnnnnnnnnnnnnnnnnnnnnnnnnnnnnnnnnnnnnnnnnnnnnnnnnnnnnnnnnnnnnnnnnnnnnnnnnnnnnnnnnnnnnnnnnnnnnnnnnnnnnnnnnnnnnnnnnnnnnnnnnnnnnnnnnnnnnnnnnnnnnnnnnnnnnnnnnnnnnnnnnnnnnnnnnnnnnnnnnnnnnnnnnnnnnnnnnnnnnnnnnnnnnnnnnnnnnnnnnnnnnnnnnnnnnnnnnnnnnnnnnnnnnnnnnnnnnnnnnnnnnnnnnnnnnnnnnnnnnnnnnnnnnnnnnnnnnnnnnnnnnnnnnnnnnnnnnnnnnnnnnnnnnnnnnnnnnnnnnnnnnnnnnnnnnnnnnnnnnnnnnnnnnnnnnnnnnnnnnnnnnnnnnnnnnnnnnnnnnnnnnnnnnnnnnnnnnnnnnnnnnnnnnnnnnnnnnnnnnnnnnnnnnnnnnnnnnnnnnnnnnnnnnnnnnnnnnnnnnnnnnnnnnnnnnnnnnnnnnnnnnnnnnnnnnnnnnnnnnnnnnnnnnnnnnnnnnnnnnnnnnnnnnnnnnnnnnnnnnnnnnnnnnnnnnnnnnnnnnnnnnnnnnnnnnnnnnnnnnnnnnnnnnnnnnnnnnnnnnnnnnnnnnnnnnnnnnnnnnnnnnnnnnnnnnnnnnnnnnnnnnnnnnnnnnnnnnnnnnnnnnnnnnnnnnnnnnnnnnnnnnnnnnnnnnnnnnnnnnnnnnnnnnnnnnnnnnnnnnnnnnnnnnnnnnnnnnnnnnnnnnnnnnnnnnnnnnnnnnnnnnnnnnnnnnnnnnnnnnnnnnnnnnnnnnnnnnnnnnnnnnnnnnnnnnnnnnnnnnnnnnnnnnnnnnnnnnnnnnnnnnnnnnnnnnnnnnnnnnnnnnnnnnnnnnnnnnnnnnnnnnnnnnnnnnnnnnnnnnnnnnnnnnnnnnnnnnnnnnnnnnnnnnnnnnnnnnnnnnnnnnnnnnnnnnnnnnnnnnnnnnnnnnnnnnnnnnnnnnnnnnnnnnnnnnnnnnnnnnnnnnnnnnnnnnnnnnnnnnnnnnnnnnnnnnnnnnnnnnnnnnnnnnnnnnnnnnnnnnnnnnnnnnnnnnnnnnnnnnnnnnnnnnnnnnnnnnnnnnnnnnnnnnnnnnnnnnnnnnnnnnnnnnnnnnnnnnnnnnnnnnnnnnnnnnnnnnnnnnnnnnnnnnnnnnnnnnnnnnnnnnnnnnnnnnnnnnnnnnnnnnnnnnnnnnnnnnnnnnnnnnnnnnnnnnnnnnnnnnnnnnnnnnnnnnnnnnnnnnnnnnnnnnnnnnnnnnnnnnnnnnnnnnnnnnnnnnnnnnnnnnnnnnnnnnnnnnnnnnnnnnnnnnnnnnnnnnnnnnnnnnnnnnnnnnnnnnnnnnnnnnnnnnnnnnnnnnnnnnnnnnnnnnnnnnnnnnnnnnnnnnnnnnnnnnnnnnnnnnnnnnnnnnnnnnnnnnnnnnnnnnnnnnnnnnnnnnnnnnnnnnnnnnnnnnnnnnnnnnnnnnnnnnnnnnnnnnnnnnnnnnnnnnnnnnnnnnnnnnnnnnnnnnnnnnnnnnnnnnnnnnnnnnnnnnnnnnnnnnnnnnnnnnnnnnnnnnnnnnnnnnnnnnnnnnnnnnnnnnnnnnnnnnnnnnnnnnnnnnnnnnnnnnnnnnnnnnnnnnnnnnnnnnnnnnnnnnnnnnnnnnnnnnnnnnnnnnnnnnnnnnnnnnnnnnnnnnnnnnnnnnnnnnnnnnnnnnnnnnnnnnnnnnnnnnnnnnnnnnnnnnnnnnnnnnnnnnnnnnnnnnnnnnnnnnnnnnnnnnnnnnnnnnnnnnnnnnnnnnnnnnnnnnnnnnnnnnnnnnnnnnnnnnnnnnnnnnnnnnnnnnnnnnnnnnnnnnnnnnnnnnnnnnnnnnnnnnnnnnnnnnnnnnnnnnnnnnnnnnnnnnnnnnnnnnnnnnnnnnnnnnnnnnnnnnnnnnnnnnnnnnnnnnnnnnnnnnnnnnnnnnnnnnnnnnnnnnnnnnnnnnnnnnnnnnnnnnnnnnnnnnnnnnnnnnnnnnnnnnnnnnnnnnnnnnnnnnnnnnnnnnnnnnnnnnnnnnnnnnnnnnnnnnnnnnnnnnnnnnnnnnnnnnnnnnnnnnnnnnnnnnnnnnnnnnnnnnnnnnnnnnnnnnnnnnnnnnnnnnnnnnnnnnnnnnnnnnnnnnnnnnnnnnnnnnnnnnnnnnnnnnnnnnnnnnnnnnnnnnnnnnnnnnnnnnnnnnnnnnnnnnnnnnnnnnnnnnnnnnnnnnnnnnnnnnnnnnnnnnnnnnnnnnnnnnnnnnnnnnnnnnnnnnnnnnnnnnnnnnnnnnnnnnnnnnnnnnnnnnnnnnnnnnnnnnnnnnnnnnnnnnnnnnnnnnnnnnnnnnnnnnnnnnnnnnnnnnnnnnnnnnnnnnnnnnnnnnnnnnnnnnnnnnnnnnnnnnnnnnnnnnnnnnnnnnnnnnnnnnnnnnnnnnnnnnnnnnnnnnnnnnnnnnnnnnnnnnnnnnnnnnnnnnnnnnnnnnnnnnnnnnnnnnnnnnnnnnnnnnnnnnnnnnnnnnnnnnnnnnnnnnnnnnnnnnnnnnnnnnnnnnnnnnnnnnnnnnnnnnnnnnnnnnnnnnnnnnnnnnnnnnnnnnnnnnnnnnnnnnnnnnnnnnnnnnnnnnnnnnnnnnnnnnnnnnnnnnnnnnnnnnnnnnnnnnnnnnnnnnnnnnnnnnnnnnnnnnnnnnnnnnnnnnnnnnnnnnnnnnnnnnnnnnnnnnnnnnnnnnnnnnnnnnnnnnnnnnnnnnnnnnnnnnnnnnnnnnnnnnnnnnnnnnnnnnnnnnnnnnnnnnnnnnnnnnnnnnnnnnnnnnnnnnnnnnnnnnnnnnnnnnnnnnnnnnnnnnnnnnnnnnnnnnnnnnnnnnnnnnnnnnnnnnnnnnnnnnnnnnnnnnnnnnnnnnnnnnnnnnnnnnnnnnnnnnnnnnnnnnnnnnnnnnnnnnnnnnnnnnnnnnnnnnnnnnnnnnnnnnnnnnnnnnnnnnnnnnnnnnnnnnnnnnnnnnnnnnnnnnnnnnnnnnnnnnnnnnnnnnnnnnnnnnnnnnnnnnnnnnnnnnnnnnnnnnnnnnnnnnnnnnnnnnnnnnnnnnnnnnnnnnnnnnnnnnnnnnnnnnnnnnnnnnnnnnnnnnnnnnnnnnnnnnnnnnnnnnnnnnnnnnnnnnnnnnnnnnnnnnnnnnnnnnnnnnnnnnnnnnnnnnnnnnnnnnnnnnnnnnnnnnnnnnnnnnnnnnnnnnnnnnnnnnnnnnnnnnnnnnnnnnnnnnnnnnnnnnnnnnnnnnnnnnnnnnnnnnnnnnnnnnnnnnnnnnnnnnnnnnnnnnnnnnnnnnnnnnnnnnnnnnnnnnnnnnnnnnnnnnnnnnnnnnnnnnnnnnnnnnnnnnnnnnnnnnnnnnnnnnnnnnnnnnnnnnnnnnnnnnnnnnnnnnnnnnnnnnnnnnnnnnnnnnnnnnnnnnnnnnnnnnnnnnnnnnnnnnnnnnnnnnnnnnnnnnnnnnnnnnnnnnnnnnnnnnnnnnnnnnnnnnnnnnnnnnnnnnnnnnnnnnnnnnnnnnnnnnnnnnnnnnnnnnnnnnnnnnnnnnnnnnnnnnnnnnnnnnnnnnnnnnnnnnnnnnnnnnnnnnnnnnnnnnnnnnnnnnnnnnnnnnnnnnnnnnnnnnnnnnnnnnnnnnnnnnnnnnnnnnnnnnnnnnnnnnnnnnnnnnnnnnnnnnnnnnnnnnnnnnnnnnnnnnnnnnnnnnnnnnnnnnnnnnnnnnnnnnnnnnnnnnnnnnnnnnnnnnnnnnnnnnnnnnnnnnnnnnnnnnnnnnnnnnnnnnnnnnnnnnnnnnnnnnnnnnnnnnnnnnnnnnnnnnnnnnnnnnnnnnnnnnnnnnnnnnnnnnnnnnnnnnnnnnnnnnnnnnnnnnnnnnnnnnnnnnnnnnnnnnnnnnnnnnnnnnnnnnnnnnnnnnnnnnnnnnnnnnnnnnnnnnnnnnnnnnnnnnnnnnnnnnnnnnnnnnnnnnnnnnnnnnnnnnnnnnnnnnnnnnnnnnnnnnnnnnnnnnnnnnnnnnnnnnnnnnnnnnnnnnnnnnnnnnnnnnnnnnnnnnnnnnnnnnnnnnnnnnnnnnnnnnnnnnnnnnnnnnnnnnnnnnnnnnnnnnnnnnnnnnnnnnnnnnnnnnnnnnnnnnnnnnnnnnnnnnnnnnnnnnnnnnnnnnnnnnnnnnnnnnnnnnnnnnnnnnnnnnnnnnnnnnnnnnnnnnnnnnnnnnnnnnnnnnnnnnnnnnnnnnnnnnnnnnnnnnnnnnnnnnnnnnnnnnnnnnnnnnnnnnnnnnnnnnnnnnnnnnnnnnnnnnnnnnnnnnnnnnnnnnnnnnnnnnnnnnnnnnnnnnnnnnnnnnnnnnnnnnnnnnnnnnnnnnnnnnnnnnnnnnnnnnnnnnnnnnnnnnnnnnnnnnnnnnnnnnnnnnnnnnnnnnnnnnnnnnnnnnnnnnnnnnnnnnnnnnnnnnnnnnnnnnnnnnnnnnnnnnnnnnnnnnnnnnnnnnnnnnnnnnnnnnnnnnnnnnnnnnnnnnnnnnnnnnnnnnnnnnnnnnnnnnnnnnnnnnnnnnnnnnnnnnnnnnnnnnnnnnnnnnnnnnnnnnnnnnnnnnnnnnnnnnnnnnnnnnnnnnnnnnnnnnnnnnnnnnnnnnnnnnnnnnnnnnnnnnnnnnnnnnnnnnnnnnnnnnnnnnnnnnnnnnnnnnnnnnnnnnnnnnnnnnnnnnnnnnnnnnnnnnnnnnnnnnnnnnnnnnnnnnnnnnnnnnnnnnnnnnnnnnnnnnnnnnnnnnnnnnnnnnnnnnnnnnnnnnnnnnnnnnnnnnnnnnnnnnnnnnnnnnnnnnnnnnnnnnnnnnnnnnnnnnnnnnnnnnnnnnnnnnnnnnnnnnnnnnnnnnnnnnnnnnnnnnnnnnnnnnnnnnnnnnnnnnnnnnnnnnnnnnnnnnnnnnnnnnnnnnnnnnnnnnnnnnnnnnnnnnnnnnnnnnnnnnnnnnnnnnnnnnnnnnnnnnnnnnnnnnnnnnnnnnnnnnnnnnnnnnnnnnnnnnnnnnnnnnnnnnnnnnnnnnnnnnnnnnnnnnnnnnnnnnnnnnnnnnnnnnnnnnnnnnnnnnnnnnnnnnnnnnnnnnnnnnnnnnnnnnnnnnnnnnnnnnnnnnnnnnnnnnnnnnnnnnnnnnnnnnnnnnnnnnnnnnnnnnnnnnnnnnnnnnnnnnnnnnnnnnnnnnnnnnnnnnnnnnnnnnnnnnnnnnnnnnnnnnnnnnnnnnnnnnnnnnnnnnnnnnnnnnnnnnnnnnnnnnnnnnnnnnnnnnnnnnnnnnnnnnnnnnnnnnnnnnnnnnnnnnnnnnnnnnnnnnnnnnnnnnnnnnnnnnnnnnnnnnnnnnnnnnnnnnnnnnnnnnnnnnnnnnnnnnnnnnnnnnnnnnnnnnnnnnnnnnnnnnnnnnnnnnnnnnnnnnnnnnnnnnnnnnnnnnnnnnnnnnnnnnnnnnnnnnnnnnnnnnnnnnnnnnnnnnnnnnnnnnnnnnnnnnnnnnnnnnnnnnnnnnnnnnnnnnnnnnnnnnnnnnnnnnnnnnnnnnnnnnnnnnnnnnnnnnnnnnnnnnnnnnnnnnnnnnnnnnnnnnnnnnnnnnnnnnnnnnnnnnnnnnnnnnnnnnnnnnnnnnnnnnnnnnnnnnnnnnnnnnnnnnnnnnnnnnnnnnnnnnnnnnnnnnnnnnnnnnnnnnnnnnnnnnnnnnnnnnnnnnnnnnnnnnnnnnnnnnnnnnnnnnnnnnnnnnnnnnnnnnnnnnnnnnnnnnnnnnnnnnnnnnnnnnnnnnnnnnnnnnnnnnnnnnnnnnnnnnnnnnnnnnnnnnnnnnnnnnnnnnnnnnnnnnnnnnnnnnnnnnnnnnnnnnnnnnnnnnnnnnnnnnnnnnnnnnnnnnnnnnnnnnnnnnnnnnnnnnnnnnnnnnnnnnnnnnnnnnnnnnnnnnnnnnnnnnnnnnnnnnnnnnnnnnnnnnnnnnnnnnnnnnnnnnnnnnnnnnnnnnnnnnnnnnnnnnnnnnnnnnnnnnnnnnnnnnnnnnnnnnnnnnnnnnnnnnnnnnnnnnnnnnnnnnnnnnnnnnnnnnnnnnnnnnnnnnnnnnnnnnnnnnnnnnnnnnnnnnnnnnnnnnnnnnnnnnnnnnnnnnnnnnnnnnnnnnnnnnnnnnnnnnnnnnnnnnnnnnnnnnnnnnnnnnnnnnnnnnnnnnnnnnnnnnnnnnnnnnnnnnnnnnnnnnnnnnnnnnnnnnnnnnnnnnnnnnnnnnnnnnnnnnnnnnnnnnnnnnnnnnnnnnnnnnnnnnnnnnnnnnnnnnnnnnnnnnnnnnnnnnnnnnnnnnnnnnnnnnnnnnnnnnnnnnnnnnnnnnnnnnnnnnnnnnnnnnnnnnnnnnnnnnnnnnnnnnnnnnnnnnnnnnnnnnnnnnnnnnnnnnnnnnnnnnnnnnnnnnnnnnnnnnnnnnnnnnnnnnnnnnnnnnnnnnnnnnnnnnnnnnnnnnnnnnnnnnnnnnnnnnnnnnnnnnnnnnnnnnnnnnnnnnnnnnnnnnnnnnnnnnnnnnnnnnnnnnnnnnnnnnnnnnnnnnnnnnnnnnnnnnnnnnnnnnnnnnnnnnnnnnnnnnnnnnnnnnnnnnnnnnnnnnnnnnnnnnnnnnnnnnnnnnnnnnnnnnnnnnnnnnnnnnnnnnnnnnnnnnnnnnnnnnnnnnnnnnnnnnnnnnnnnnnnnnnnnnnnnnnnnnnnnnnnnnnnnnnnnnnnnnnnnnnnnnnnnnnnnnnnnnnnnnnnnnnnnnnnnnnnnnnnnnnnnnnnnnnnnnnnnnnnnnnnnnnnnnnnnnnnnnnnnnnnnnnnnnnnnnnnnnnnnnnnnnnnnnnnnnnnnnnnnnnnnnnnnnnnnnnnnnnnnnnnnnnnnnnnnnnnnnnnnnnnnnnnnnnnnnnnnnnnnnnnnnnnnnnnnnnnnnnnnnnnnnnnnnnnnnnnnnnnnnnnnnnnnnnnnnnnnnnnnnnnnnnnnnnnnnnnnnnnnnnnnnnnnnnnnnnnnnnnnnnnnnnnnnnnnnnnnnnnnnnnnnnnnnnnnnnnnnnnnnnnnnnnnnnnnnnnnnnnnnnnnnnnnnnnnnnnnnnnnnnnnnnnnnnnnnnnnnnnnnnnnnnnnnnnnnnnnnnnnnnnnnnnnnnnnnnnnnnnnnnnnnnnnnnnnnnnnnnnnnnnnnnnnnnnnnnnnnnnnnnnnnnnnnnnnnnnnnnnnnnnnnnnnnnnnnnnnnnnnnnnnnnnnnnnnnnnnnnnnnnnnnnnnnnnnnnnnnnnnnnnnnnnnnnnnnnnnnnnnnnnnnnnnnnnnnnnnnnnnnnnnnnnnnnnnnnnnnnnnnnnnnnnnnnnnnnnnnnnnnnnnnnnnnnnnnnnnnnnnnnnnnnnnnnnnnnnnnnnnnnnnnnnnnnnnnnnnnnnnnnnnnnnnnnnnnnnnnnnnnnnnnnnnnnnnnnnnnnnnnnnnnnnnnnnnnnnnnnnnnnnnnnnnnnnnnnnnnnnnnnnnnnnnnnnnnnnnnnnnnnnnnnnnnnnnnnnnnnnnnnnnnnnnnnnnnnnnnnnnnnnnnnnnnnnnnnnnnnnnnnnnnnnnnnnnnnnnnnnnnnnnnnnnnnnnnnnnnnnnnnnnnnnnnnnnnnnnnnnnnnnnnnnnnnnnnnnnnnnnnnnnnnnnnnnnnnnnnnnnnnnnnnnnnnnnnnnnnnnnnnnnnnnnnnnnnnnnnnnnnnnnnnnnnnnnnnnnnnnnnnnnnnnnnnnnnnnnnnnnnnnnnnnnnnnnnnnnnnnnnnnnnnnnnnnnnnnnnnnnnnnnnnnnnnnnnnnnnnnnnnnnnnnnnnnnnnnnnnnnnnnnnnnnnnnnnnnnnnnnnnnnnnnnnnnnnnnnnnnnnnnnnnnnnnnnnnnnnnnnnnnnnnnnnnnnnnnnnnnnnnnnnnnnnnnnnnnnnnnnnnnnnnnnnnnnnnnnnnnnnnnnnnnnnnnnnnnnnnnnnnnnnnnnnnnnnnnnnnnnnnnnnnnnnnnnnnnnnnnnnnnnnnnnnnnnnnnnnnnnnnnnnnnnnnnnnnnnnnnnnnnnnnnnnnnnnnnnnnnnnnnnnnnnnnnnnnnnnnnnnnnnnnnnnnnnnnnnnnnnnnnnnnnnnnnnnnnnnnnnnnnnnnnnnnnnnnnnnnnnnnnnnnnnnnnnnnnnnnnnnnnnnnnnnnnnnnnnnnnnnnnnnnnnnnnnnnnnnnnnnnnnnnnnnnnnnnnnnnnnnnnnnnnnnnnnnnnnnnnnnnnnnnnnnnnnnnnnnnnnnnnnnnnnnnnnnnnnnnnnnnnnnnnnnnnnnnnnnnnnnnnnnnnnnnnnnnnnnnnnnnnnnnnnnnnnnnnnnnnnnnnnnnnnnnnnnnnnnnnnnnnnnnnnnnnnnnnnnnnnnnnnnnnnnnnnnnnnnnnnnnnnnnnnnnnnnnnnnnnnnnnnnnnnnnnnnnnnnnnnnnnnnnnnnnnnnnnnnnnnnnnnnnnnnnnnnnnnnnnnnnnnnnnnnnnnnnnnnnnnnnnnnnnnnnnnnnnnnnnnnnnnnnnnnnnnnnnnnnnnnnnnnnnnnnnnnnnnnnnnnnnnnnnnnnnnnnnnnnnnnnnnnnnnnnnnnnnnnnnnnnnnnnnnnnnnnnnnnnnnnnnnnnnnnnnnnnnnnnnnnnnnnnnnnnnnnnnnnnnnnnnnnnnnnnnnnnnnnnnnnnnnnnnnnnnnnnnnnnnnnnnnnnnnnnnnnnnnnnnnnnnnnnnnnnnnnnnnnnnnnnnnnnnnnnnnnnnnnnnnnnnnnnnnnnnnnnnnnnnnnnnnnnnnnnnnnnnnnnnnnnnnnnnnnnnnnnnnnnnnnnnnnnnnnnnnnnnnnnnnnnnnnnnnnnnnnnnnnnnnnnnnnnnnnnnnnnnnnnnnnnnnnnnnnnnnnnnnnnnnnnnnnnnnnnnnnnnnnnnnnnnnnnnnnnnnnnnnnnnnnnnnnnnnnnnnnnnnnnnnnnnnnnnnnnnnnnnnnnnnnnnnnnnnnnnnnnnnnnnnnnnnnnnnnnnnnnnnnnnnnnnnnnnnnnnnnnnnnnnnnnnnnnnnnnnnnnnnnnnnnnnnnnnnnnnnnnnnnnnnnnnnnnnnnnnnnnnnnnnnnnnnnnnnnnnnnnnnnnnnnnnnnnnnnnnnnnnnnnnnnnnnnnnnnnnnnnnnnnnnnnnnnnnnnnnnnnnnnnnnnnnnnnnnnnnnnnnnnnnnnnnnnnnnnnnnnnnnnnnnnnnnnnnnnnnnnnnnnnnnnnnnnnnnnnnnnnnnnnnnnnnnnnnnnnnnnnnnnnnnnnnnnnnnnnnnnnnnnnnnnnnnnnnnnnnnnnnnnnnnnnnnnnnnnnnnnnnnnnnnnnnnnnnnnnnnnnnnnnnnnnnnnnnnnnnnnnnnnnnnnnnnnnnnnnnnnnnnnnnnnnnnnnnnnnnnnnnnnnnnnnnnnnnnnnnnnnnnnnnnnnnnnnnnnnnnnnnnnnnnnnnnnnnnnnnnnnnnnnnnnnnnnnnnnnnnnnnnnnnnnnnnnnnnnnnnnnnnnnnnnnnnnnnnnnnnnnnnnnnnnnnnnnnnnnnnnnnnnnnnnnnnnnnnnnnnnnnnnnnnnnnnnnnnnnnnnnnnnnnnnnnnnnnnnnnnnnnnnnnnnnnnnnnnnnnnnnnnnnnnnnnnnnnnnnnnnnnnnnnnnnnnnnnnnnnnnnnnnnnnnnnnnnnnnnnnnnnnnnnnnnnnnnnnnnnnnnnnnnnnnnnnnnnnnnnnnnnnnnnnnnnnnnnnnnnnnnnnnnnnnnnnnnnnnnnnnnnnnnnnnnnnnnnnnnnnnnnnnnnnnnnnnnnnnnnnnnnnnnnnnnnnnnnnnnnnnnnnnnnnnnnnnnnnnnnnnnnnnnnnnnnnnnnnnnnnnnnnnnnnnnnnnnnnnnnnnnnnnnnnnnnnnnnnnnnnnnnnnnnnnnnnnnnnnnnnnnnnnnnnnnnnnnnnnnnnnnnnnnnnnnnnnnnnnnnnnnnnnnnnnnnnnnnnnnnnnnnnnnnnnnnnnnnnnnnnnnnnnnnnnnnnnnnnnnnnnnnnnnnnnnnnnnnnnnnnnnnnnnnnnnnnnnnnnnnnnnnnnnnnnnnnnnnnnnnnnnnnnnnnnnnnnnnnnnnnnnnnnnnnnnnnnnnnnnnnnnnnnnnnnnnnnnnnnnnnnnnnnnnnnnnnnnnnnnnnnnnnnnnnnnnnnnnnnnnnnnnnnnnnnnnnnnnnnnnnnnnnnnnnnnnnnnnnnnnnnnnnnnnnnnnnnnnnnnnnnnnnnnnnnnnnnnnnnnnnnnnnnnnnnnnnnnnnnnnnnnnnnnnnnnnnnnnnnnnnnnnnnnnnnnnnnnnnnnnnnnnnnnnnnnnnnnnnnnnnnnnnnnnnnnnnnnnnnnnnnnnnnnnnnnnnnnnnnnnnnnnnnnnnnnnnnnnnnnnnnnnnnnnnnnnnnnnnnnnnnnnnnnnnnnnnnnnnnnnnnnnnnnnnnnnnnnnnnnnnnnnnnnnnnnnnnnnnnnnnnnnnnnnnnnnnnnnnnnnnnnnnnnnnnnnnnnnnnnnnnnnnnnnnnnnnnnnnnnnnnnnnnnnnnnnnnnnnnnnnnnnnnnnnnnnnnnnnnnnnnnnnnnnnnnnnnnnnnnnnnnnnnnnnnnnnnnnnnnnnnnnnnnnnnnnnnnnnnnnnnnnnnnnnnnnnnnnnnnnnnnnnnnnnnnnnnnnnnnnnnnnnnnnnnnnnnnnnnnnnnnnnnnnnnnnnnnnnnnnnnnnnnnnnnnnnnnnnnnnnnnnnnnnnnnnnnnnnnnnnnnnnnnnnnnnnnnnnnnnnnnnnnnnnnnnnnnnnnnnnnnnnnnnnnnnnnnnnnnnnnnnnnnnnnnnnnnnnnnnnnnnnnnnnnnnnnnnnnnnnnnnnnnnnnnnnnnnnnnnnnnnnnnnnnnnnnnnnnnnnnnnnnnnnnnnnnnnnnnnnnnnnnnnnnnnnnnnnnnnnnnnnnnnnnnnnnnnnnnnnnnnnnnnnnnnnnnnnnnnnnnnnnnnnnnnnnnnnnnnnnnnnnnnnnnnnnnnnnnnnnnnnnnnnnnnnnnnnnnnnnnnnnnnnnnnnnnnnnnnnnnnnnnnnnnnnnnnnnnnnnnnnnnnnnnnnnnnnnnnnnnnnnnnnnnnnnnnnnnnnnnnnnnnnnnnnnnnnnnnnnnnnnnnnnnnnnnnnnnnnnnnnnnnnnnnnnnnnnnnnnnnnnnnnnnnnnnnnnnnnnnnnnnnnnnnnnnnnnnnnnnnnnnnnnnnnnnnnnnnnnnnnnnnnnnnnnnnnnnnnnnnnnnnnnnnnnnnnnnnnnnnnnnnnnnnnnnnnnnnnnnnnnnnnnnnnnnnnnnnnnnnnnnnnnnnnnnnnnnnnnnnnnnnnnnnnnnnnnnnnnnnnnnnnnnnnnnnnnnnnnnnnnnnnnnnnnnnnnnnnnnnnnnnnnnnnnnnnnnnnnnnnnnnnnnnnnnnnnnnnnnnnnnnnnnnnnnnnnnnnnnnnnnnnnnnnnnnnnnnnnnnnnnnnnnnnnnnnnnnnnnnnnnnnnnnnnnnnnnnnnnnnnnnnnnnnnnnnnnnnnnnnnnnnnnnnnnnnnnnnnnnnnnnnnnnnnnnnnnnnnnnnnnnnnnnnnnnnnnnnnnnnnnnnnnnnnnnnnnnnnnnnnnnnnnnnnnnnnnnnnnnnnnnnnnnnnnnnnnnnnnnnnnnnnnnnnnnnnnnnnnnnnnnnnnnnnnnnnnnnnnnnnnnnnnnnnnnnnnnnnnnnnnnnnnnnnnnnnnnnnnnnnnnnnnnnnnnnnnnnnnnnnnnnnnnnnnnnnnnnnnnnnnnnnnnnnnnnnnnnnnnnnnnnnnnnnnnnnnnnnnnnnnnnnnnnnnnnnnnnnnnnnnnnnnnnnnnnnnnnnnnnnnnnnnnnnnnnnnnnnnnnnnnnnnnnnnnnnnnnnnnnnnnnnnnnnnnnnnnnnnnnnnnnnnnnnnnnnnnnnnnnnnnnnnnnnnnnnnnnnnnnnnnnnnnnnnnnnnnnnnnnnnnnnnnnnnnnnnnnnnnnnnnnnnnnnnnnnnnnnnnnnnnnnnnnnnnnnnnnnnnnnnnnnnnnnnnnnnnnnnnnnnnnnnnnnnnnnnnnnnnnnnnnnnnnnnnnnnnnnnnnnnnnnnnnnnnnnnnnnnnnnnnnnnnnnnnnnnnnnnnnnnnnnnnnnnnnnnnnnnnnnnnnnnnnnnnnnnnnnnnnnnnnnnnnnnnnnnnnnnnnnnnnnnnnnnnnnnnnnnnnnnnnnnnnnnnnnnnnnnnnnnnnnnnnnnnnnnnnnnnnnnnnnnnnnnnnnnnnnnnnnnnnnnnnnnnnnnnnnnnnnnnnnnnnnnnnnnnnnnnnnnnnnnnnnnnnnnnnnnnnnnnnnnnnnnnnnnnnnnnnnnnnnnnnnnnnnnnnnnnnnnnnnnnnnnnnnnnnnnnnnnnnnnnnnnnnnnnnnnnnnnnnnnnnnnnnnnnnnnnnnnnnnnnnnnnnnnnnnnnnnnnnnnnnnnnnnnnnnnnnnnnnnnnnnnnnnnnnnnnnnnnnnnnnnnnnnnnnnnnnnnnnnnnnnnnnnnnnnnnnnnnnnnnnnnnnnnnnnnnnnnnnnnnnnnnnnnnnnnnnnnnnnnnnnnnnnnnnnnnnnnnnnnnnnnnnnnnnnnnnnnnnnnnnnnnnnnnnnnnnnnnnnnnnnnnnnnnnnnnnnnnnnnnnnnnnnnnnnnnnnnnnnnnnnnnnnnnnnnnnnnnnnnnnnnnnnnnnnnnnnnnnnnnnnnnnnnnnnnnnnnnnnnnnnnnnnnnnnnnnnnnnnnnnnnnnnnnnnnnnnnnnnnnnnnnnnnnnnnnnnnnnnnnnnnnnnnnnnnnnnnnnnnnnnnnnnnnnnnnnnnnnnnnnnnnnnnnnnnnnnnnnnnnnnnnnnnnnnnnnnnnnnnnnnnnnnnnnnnnnnnnnnnnnnnnnnnnnnnnnnnnnnnnnnnnnnnnnnnnnnnnnnnnnnnnnnnnnnnnnnnnnnnnnnnnnnnnnnnnnnnnnnnnnnnnnnnnnnnnnnnnnnnnnnnnnnnnnnnnnnnnnnnnnnnnnnnnnnnnnnnnnnnnnnnnnnnnnnnnnnnnnnnnnnnnnnnnnnnnnnnnnnnnnnnnnnnnnnnnnnnnnnnnnnnnnnnnnnnnnnnnnnnnnnnnnnnnnnnnnnnnnnnnnnnnnnnnnnnnnnnnnnnnnnnnnnnnnnnnnnnnnnnnnnnnnnnnnnnnnnnnnnnnnnnnnnnnnnnnnnnnnnnnnnnnnnnnnnnnnnnnnnnnnnnnnnnnnnnnnnnnnnnnnnnnnnnnnnnnnnnnnnnnnnnnnnnnnnnnnnnnnnnnnnnnnnnnnnnnnnnnnnnnnnnnnnnnnnnnnnnnnnnnnnnnnnnnnnnnnnnnnnnnnnnnnnnnnnnnnnnnnnnnnnnnnnnnnnnnnnnnnnnnnnnnnnnnnnnnnnnnnnnnnnnnnnnnnnnnnnnnnnnnnnnnnnnnnnnnnnnnnnnnnnnnnnnnnnnnnnnnnnnnnnnnnnnnnnnnnnnnnnnnnnnnnnnnnnnnnnnnnnnnnnnnnnnnnnnnnnnnnnnnnnnnnnnnnnnnnnnnnnnnnnnnnnnnnnnnnnnnnnnnnnnnnnnnnnnnnnnnnnnnnnnnnnnnnnnnnnnnnnnggggaagactagccgcgcccaaggccgtatggaatcattgtcggttcacccccacatgcgtggggaagaccaatacacaatgaaatacaagaaatttacaaacggttcacccccacatgcgtggggaagacttttccaatcggtgaagaaatttggcttttaccggttcacccccacatgcgtggggaagacggagcaaacatgctgacaccgtatccaacggacggttcacccccacatgcgtggggaagactcttaatttacagcagaaaacatagtaaacaagcggccacttggacaaatggtcatgccaacccaactcatgaagcttctggttgcccgcctttagcccgaagaagcgtcaccaaggctaaaccctcgcgttcgatcagcatccgccttgccgaaccatattgccggaactggaagccctggggcgtcgggcttgaccagatttgcgccacatagcccagaggcggcctttcggtcaccttcgcccaaagctcatccctcaccctccggctgcaatggcccaggaaaactcccggcttgatttccatcagccagcgagacagctttcccctcaagctcgtcgggattttctccgagatcatcagcagcatcgagcacctccgcgatatccggcaatatgcgcctcatcaacttggcctggtgaaaagccacacggcaggccaatcgtgtttcccgctcaagcccgggcccgtccttggcggccatcgtgaatgccatcggtaccgtcaattccgacttgtacaagtccgcgatgtcgtaaacgaagctcagcattttccccacatggatgaacccgaggccggcggaatatccggctccgacgatcgcggcatggcacaggccgtaaaggcacgcgttcgccgccgaaaggcaacgattgacagcgttggccttgaaccagtcatcctggtcgtaggtccgcccgtcccatggaactcccgttttcctgctccattcctcgtagcaaacgcggacccggtatccttccatgccccgcaactgttccattgtcttggcggaaacatcctgtcccgggaatcgcttggcatacatccggcgggcgacctgcatccgtgtctcctcccgactcaccagcatcgcctggttgatcagccgccgcgcgctgaatgtcgcgcccgtggaatgggcgtaaagcctcacgccctgctcgccaacccacgccaccatgcaggcgttgtcggccaggatcctcatcgcggcgtgggtgacggaggtgcccggacccagcttcaggagcgccaactggtcgatcggcaccggggtctcgccatcggcatcgcggaataccagcgccgaggcggtgcaatccagcttgccatgttcgaggtaaagatgtgaccagcggtcggaaaaccgcggcagatcgtgcaggcggcgcatcagtgtgaccctttgtcgcgggatggaacgcccatcgaatcgctcacgaggcatatcccgaacaaatgaggttttacaagtgaattcggcagtgatgtggccaaaaagacggggccttcccgtcggattcgcggaaatggcgccaaaacgaggtgttgtctttgcattttaaccagataaaaatgcaaagaatcaaggttcagggaaaggcgcataacgggcggttcgaacatgggttccgtcgtattggataattccgacccggcacgatggaacacgctgtcatcaccctggttggaagcgctggatagccgcggcgtcaacatccggatctcgccgctcgaggcgctcgccaattcggcggacttgtgccaacttgccttttccaaccctctcgaccttttcgcggcccacaggtttttgctgtcgctcctgtactggaaggcgggagccgctaacggcacccgggcgctgcgcgagcggttggtttcgggaaccatgccccagggcgttatcgaatcgattcgggaggaagcatccgcattcaacctttttgatcctgaaaggccattcctccaggatcccgcttgccgggacgacaaaaaggaatccccgccctcctatcttttcgccgaaatggcctcgggaacgaatgtcgcccacttccatcacggggaggacgattcatcccggctatgcctttgctgtgcgactcggggtttattgcgactggcgccctggatgcaatcgggcggcaaggggttgaaacccgccatccacggcgcgccgccgatcatggcgatcgccatgggggacacattgcgtcacaccctgggcctcaacctgattccgtttgacgggcatttgggaaatccgcaatggaccggaccattcaagccgacgcgcgagggggccgtcaccccgctcctcgaggcgttcacctggaacacgcgacgcgtccatttgctcgatccttctccgctggactgctgttccaattgcggatcggaaagcggtttcggtgtcggaccgatcgttttcaaggcgaacgaggcttgcaaggatgattcggatgaggggcaagcgtatgccgacaattggcgcgacccggcggccttttacaccgtgaaggatggcgatactgtcaacaagaccgtcaagtcgaccgacgagtcacaggcctccgtcgccgccgatctcacgcgcctgattcctcaaaagaggggcaaggcggaagtaccggcgccacggtgtctcctgacgcaggccaatccgggacacgcgaactggatccttgtcattccctgcaccaatcccgccaataacaagacattcgatcaccgcttggtggcgatacggggagagctgcccggcgccatcgtaccgggccgtaacgatgtggatgcgattcctgttcttgccggggacccgcgcacgctgcgcaagccctggtcggcgaaccccagccggggcgcgagggtattcgtgaacgccgccagccgcctgcaaaagggtgactgggcggtgttggcggggtccgccggcaagcccttgggacacgacgccgcggccttcgacatcttctcttccctttattggccaatcaggagccgggtttcctcggcgccttcgcgggaagccgcctggatgaccctcaaactgatggcggtttccaacctcggtggtaatgccgccatgggtgatattcgcccgtggaatcatttgaaaaacagtatgcggaaacagaaaagccggaacggcatcaacattgcctacccgaggcggattcccaagggcgttcaccttgaaaccgagcttggggggatcatcaggcgtttttccggcaagggactcgactgggcgggcctttgccaattcctcaacgaccatctttcctgaccacacctgaagggagcgcatcgatgtttgtccagatccacatgcttcaaagtgttccgcccggcaatctcaaccgggatgattccgggttgcccaagaaatgcgtttttggcggcgtcacccgcgggcgcatcagcagccagtgtctcaagcgcaacatcaggctttcacctctgttcaaggaagctttcgcggaacacttggccgttcgctcgaaataccttcccacgctggtcgccaacgccttgagggaaaacagggccgaagccatccctgaaaaggaaatcgaggcggtcaccgcggccttggccgcgaggttcaagaaagaggaaaaagccagggattccgaacaggacaccggggaggacgatgaggctgccgatgcccccgaggctttggcggtcactccgcaactggtatttttccgccccgcgttcgccggcaagatcgcagaactcgcgcggaacttgaggagcaccgatccgctggcctacaagcttttcaccaagatggaaagaatctcgaaaaacgatgagagaagcgccaaggccggcgtcgaaaaattcatcaggtcggtgttcgaggcgcgggaatcgttgtcggtcgatgtcgcgcttttcggtcgcatgaccaccagcgacatcgtaatggatatcgaagcctcgtgccaggtggcgcatgcgatcgcgacccatgagaccttgattgaaagcgattacttcacggcgatggacgacctcaacgacagcttgggcaagggtgccggtgcggcattcctggggtcgggcgacaccgagacattcttcaattccgccgtttattacaagtacctgaacatggacacgggcgcatttttgcgcaacctccggggtgatgacacctccgtggcctccaaggccgccgcggttctccttgaagccgcggcactctcgacgcccacgggaaaacagaactccttcgccgcccattccgtaccggaattggtgctggtcgaggtctccccaaggaagcagccgatcagttacgccaacgcgttcctggggcccgtgcaaggggaggacctgatggcggcctcggcggacgccctggctgattattgcgggacagtcgcggcggcattttcaccgccgaaaactcaaagattttaccttgccgttggcagggcccggaacttcaggatccccatggaaggtgaacggatcgacagcctggccaacttggcccttgaggttgggaaaggtgtcaaggctgccaacgcgggtgccaagtgagcgacaacaccctgttgctgcgcctggcagggcccatgcaggcgtggggcaccgattcccgattccagttgcgccggaccgaatccgttcccggcaagtcgggcgtcatcgggctggttctttgcgccatgggaatcaggcgcgaagaggcctccgcgaaggctgccgaattgtcggccttgaaaatggccgtccgtgtcgaccgggccggccacaccgactgggactaccacaccgtcggcgccggcatcggaatccgtcaagccgaggggggcgtcaagaaaacggcaagcacgggtgaaccggagacccttctgtccaggcgccagtacctttgggacgcctctttcacggtggcgcttcagggtcccggcaacctggttgcggatgccgcccaggcgctgagtgaacccgtttggcctccgttcctcgggcgaaaatgctgcgtgccaaccgaacccgtctttttggccgctggccgtttcgcaaacctcgcggaggcgctgggggcgatcgaatggacggaccatcatggatcgtcgaggaacgggacgacggaactccaggcattcattgaacacgacgaaggcggcccggtcccaccaggtgccttcgtggtttacgacacaccgcgaaccctgcgaaatcccagccatgggccaaggttggtggttcccggcacgatcaatgttcgggttgcgaccgttcaaccggccaacgcaatcggcaggcgaggagtgaactacgccgcggcccaatggcgagcggtgagggaaaggcggttggaactggaccgtttcctctgcgtcttctgcaagatgcccgcggaggatgtgcatcatgtgacctacgaaagggctggaaacgaatccctcgacgacctgaggtcgttgtgcaagatctgccatgacgcctgcacgcaactcgaatacggctccggcatgactcgggaaaggattgatccggcagaacccgcggcgcgcaacgccatcatggagcaggttggcaaacttctttcacaaaggcgcctggcaaggcgtcaggccatacgcgatttggcccgcggcgactttttcgacaatgttcccgatgcggggatatcctgaatgttcctgtcccaattgatcgtcaatacggcgggaaatccggaccaaccccgtcccggcagggaatgggtgcgatccacttacagggtgcatcagcgaatctggatggcttttcccgacgaacacaagcgccatgccgatccgtttttccttggcgcctggtcaacgcctgatggcgtcaagcctcgaaggacggaggcgggattccttttccgcgtcgaaccggatttgccgacccgggttttggtccaatcggttttccgcccggattgggaatatgccttccagaacgccaggcatttgctggcggaaacgccaaatgtgagggaattcaatccggacccagtcgccggccaaccatacaaattcaggctcgccatgctcatggtgaagaggaaaacacacaagggatccgaatcagccgggcccgtcgagcatccgatccgttgcctggttccctcgcccgtggctggcgagccttttcggcccgatccgaaattcacggcttggcgggaaaagctatcctcggaagccttgcggcatgggtttgcgctgggcgagtatccctcaaggctttcagtttcgccgatcaggcacctcatgatgaaaccggacaaggacggcaaggccatgcccttcaacgccgccatgttcgagggcgagttgacctgcaccgacccggaaaaactcaaggccgcgatggttggtggaatcggccgtggcaaggctttcggcatgggcctgctttcgctcgcgatccttcccaagaaagcctccggctagaccttcccaaggcggatcgtccggcccggaaaatatcacctcgccatcaactttgaaatcagggtggcgccgctggcgggccatccgcctgccgtccggtgacatggccccaagcccgcagccggggcccgtcgggcctgatggtgatggcgccctccacggaagtcgaccaggtgcggtccctcgggcctaggcgcgcccgccgcgaatcttcctgcgccaccgtgagccagggcgcggcccagcccaaaaacgccggcccgttggcccccgcgccgccatggtgcggcgattgcagcacggccacgccggggccgggaccggctttcatgagcgccctctggccggcgccctcgaggtcgcccgtgagcagcacatttcccgaggaatgcctcagcagcgccaccacgctcgcctcgttctggctggaggcctcgaagccgggcgccgggtgcaggaactccagcgatgccgccccgcgggccaggctgaaccccggctccacctcctccacgggaactccccgcgccgcgagtccgtcgagcatgaagcggacgccgggcacctccttgcgggcgaaccagcccgacaccagcacccggcccaccggcacccgctcgaccaggtcgagcgcgccattgaaatggtcgaggtcggcatgggaaaggatcaactcgtcaacccgttccacccccctgttccagaggaacggcgcgatgatcctcctgcccacgccggcgttggccaacgatccggcgtcgtacaccgtggtggacccgtcggcccattcgatgacggcgcatcccccgtggccgacggcaaggaaggtgcatcgccagggatcgctccgcgcggggggcgccagcgacaccgccaatcccgcggccagccaggccatcgccggcactcccgcccgggcgcgggcccgccatccgttctccgagagcgccggaatcagcaggatgtgccatggcacaagccaggcgagtgaaatgtcgcccacccagaagctggcccatggccagttggccgcccagccgaccagccccgcacagcccttgagcgccatgcccgcgcaccatccgagcgccggggaaaccaacggaacatccccacccagaatcagcaggggaaagccgggcagcagcgccagcgatcccaggagcgccacgggcggacccaccaccagcgccgaggggctgaccagatgggtgcgcgccgcgaccagcggagtgaggcagcaccagatgacggcattggttccaagggcgatggccagggcccgaaggaacgcgcgaaccagtcgccaaggagccgaccggcccatgtcccgggccctggccaaggcctcctcctgttcggtgggcggttcggaccacccgggtacggcccagtacaaaagggcggtggcgaggaacgacagcaggcaaccggtgccgaaaaggtctcccgggtcgagcaggccgaccacgagccaactgaaggcgatcaccgagggaaggtggcggggccgccgcaggatgtcggccagggccagggccccgacggttgccgcggcgcgggtggccgccggccgcgcccccgtcatgcccgcgtaaatcgccacggtcagggcgatgggccatgccaaggcgcgcgcgcccatgccggcgcaccggccggcgacggtgaggaacatcgccaagagcaccaggtgctggcccgagatcgccagcacatgcaccacgccggtgcggcggtactggtcccagctttcccgggacagccttgaagtctcgcccaacagcagcgcggcggccagcggctcaacctccggatcgatcgccccggccaaccgggccgcggccctcgcccggagcccggcgagaatgacgcggatatcccaggtgcccgagggccccatcgattccagcgcgcccgggttgtcggcgacgcggacctcggcaacgatgccgcgggccagccaaggatcgcgcccgtcggtttcccccggattcatcggcccgggaatcaggcggatctgccccgcgatgtcgacacggtcgccgggcgacgcgtccgggggcgctcccgaaccggcgacccgaacctcgcctaccgcctcggatggcgcgcccccgcgccgggcgctctcgaccgcgaccaccgtctcccagcgcgccggaaccggaatcagacgaagcggatcgggtttgggcggggaagtcgcctggatggcatccaccacgatgccgcgcaggcggattggcgcgtgctcggatccggccatcgaggcgatgtcgttcccgcccatcgaaccgaaaagcaaggcgccgcgaacggcgcccatggcgaacacgaggaacagaatccagagcggccgccacctcacatgggccagggcggccagggcgaacgccaccgccagggccatcaccacccaaggcgtcggcctggccagcctctcgaggaaaatgccggcggtcagtgaaagggcggccggcgccaagggcgccgaccgccagattccagccacgggggccgccaactccagccatcgccgaagcaaggcggccatgacgcttcagcgcgccggggccccgaaggcccaaagatacttgaagccgcgcagataaatcttgccgtcggcgatcgcaggcgaggcggccagcacatcgggcaccgtgttgtcggcgaccttctcgaacttcttgcccgccttcaccaccgtcacggtccccttgtcgcggttggtgaccagcacatggccgtcaaccagcaccggcgaggcgcggaaccggccggcggtggtgcgctcctggtagtactcctgacccgacgcggcatcgatgcagatcagcgtgccgttctcgcggcacaggtaaaccagtccgtccgccaccaggggcgacggcacatccggggtgttgctgggcttgcgccattgctcgtggcccgacccgggccccacgattccggtggccccgggcttgatgcccacgacctgcccgttcttcgccgtgggcacgacgatgaggccgggtgccgcgacgggcgaggcgacaaatcgcagatacttgttgtacttgtccttggggttcaggtcgatcacgcgccagatctcatggccgtccttgaggtcgtgggccacggcgtggtcgttgccatgggtgacgaggtaggccttgccgccgtcctgccaaaggacgggcgaggcgtaggaatgcgggttctcgtcggtgccctcgctgggccgggtcactttccagacttcctttccggtggcggcatcgagggcgatcaccaactgggcgcccgtgtgcagcagctggacgaagagctttccgtcgtgcagaaccggcgtcgagtgcatgccgaactggatgttgaacttgccgtatttctcctggaggttcaccgcccaaaccttggtgccgtcaaccgcgtggcaggccaggtctccggaggcgacgaaggcccacacatgcttgccgtcggtcaccgccgaggccgaggcccagttgccctcgtcggtgcgggccgggacattgccggatcccagcttggcttgccatttttccttgcccttggtgtcgtacgccaataacagcaggtccttctccacgacgcaggtgaggaagatcgagtcgccccacacgacgggggtggagcaacccatgcccggaagcggcgccttccacagcaggttctgggtttcgccccatgccgtgggcaggcccttctcgggagagtggccatcgcccaggggaccgcgccaggtgggccaggggcccgccaaggcgcccgccgccacgcatcccgccattgccaccgccatcaatccgcgcatgccttcttcctcaaccggtttcacgagtctccgtggccaagagtgtaacgggttcgaatccgcccggccagcggttcccgccagccaaggttcatgaaatcttccaacacgggaacccgaacatcgggttgaatggaactaacgatccgacaccgggaggagccgaccatgagacccctgatctgttgtcttgccgtggcgctggcgacggcggccgttcacgcccagatggagccgaactttcccggccccaagcccgacggttccgtccagcttcccaaccagtggcgcctcatgcccgcgggcaggcacaccacgctgggcgattatcccgtgcaggcgctggtgcatcccaagggccccttcgtcgccgccctgcactgcggctacggcaagcacgaggtgatcgtgctcaaggtggaaggcgacaccaccttactggtcagccgcgtcgggttcccccaggccttccacggcatggcgttcgacgccgccggtgaaaccctgttcgtgagcggcggcgagttcgaggtcatccgcgcctacccgttcaaggacggccaactcggcacgccgcgcgaactcaccgtggtggacaaggcccagaccttcattccctcgggcatcgccgtcatgcccggcggcaagtcgctggtcgccgccggcgtgctcggccactccgtggcccaggtcgacctcgccacgggcaagggatccaagcccattcccctgccggaaggatcgtatccctactgctgcctgcccctggatgacgacgaggttctcgtctcactatggggcaagacaatggtggcgctggtcgacctcgacgacgccaaggtgaaggcggtctgggacctcggcctggcccaccccgccgaaatgtccttgtcgaaggatcgaaagactctctatgtggcgtgcgccaactccaccatggtggcggtggtcgacgcggaatcgggcaaggtggccaagaccctcaactgcgcgctccatccaggggcgccggtcggcaacacccccggaagcctgacgctttccgccgacggcaagctgctcgccgtggccaacgccgacgccagcaacctcgccctgttcggcctcgagtcaccgcgcgatcccaagcctctgggcttcattcccaccggttggtatcccacctccgtgcggttccaccatgacggcaggctgctggtcaccaacggcaagggagccagctcgaaggccaatcccaagggccccaaccccctggccaagaggcaacccaccacggaatacatcggcgggctgtttcagggcacgctttcggtgatcgacgcccccactccggaacgcctcgccgaatggacccccaaggcttactcgtgcagtcccctgcgcgccgatgccggtgccatccaggcccgccccgagggcaaccccgttcccgcgaaaatcggcgacaagtcacccatccgccattgcgtttacatcatcaaggagaaccgcacctacgaccaggtgttcggcgacatggtgccgggcaacggcgacaagtcgctctgcctgttccctgaaaagatcacccccaaccaccatgccctggcacgcgaatatgtccagctcgacaacttctatgtcgacggcgaggtttccgcggacgggcacgaatggtcgatgggcgcctacgccaccgacttcgtcgagaaggtctggccgctgggctaccggggcagcccgctcaagaagttcgccttctacccggccgaaggcaccaaggatcccgtcgctcgccccgccggcggctacatctgggaccgcgccgccgaggcgggcgtgacctaccgcagctacggcgaatggatcgccgacacggcgcccggcaagccggccaaggcgcgcgtcaaggcgctcgaggggcatttcgaccctttcttcccctcctacaacctgtcggtcaccgatgtcaggcgcgccgaacggttccttgaggaactcaccggatttgagaaaaccggcaagttcccgcaactcaccatcctcaggctgcccaacgaccacacggccggcacctcgcccggcaagcccacccccaccgccatggtggccgacaacgacctcgcccttggcatggtgatcgagggcctctccaagagccggttctggaaggaaatggcggtgttcgtgcttgaggacgacgcccagaacgggcccgaccatgtggacgcccaccgctcggtggcgttgtgcgtcagcccgttcaccaagggccgcggcctcgactcgaccctctattccaccagttcgatgttgcgcacgatggaactcatcctcggcctcaagccgatgagccagttcgatgccgccgcccggccgatgtacaactcgtttctccccaagggcgacgccgcgccctacaaggcccgccccgcgggcaccgacctgaaggaactcaacacggcgcaggcctggggcgcgaagcagtcgctggcgttcgacctctcgaaggaggacgcggccgacgacctcgccttcaacgaggtgatctggcgctcggtgaagggcgccaacagcccgatgccggcccccgttcgcgcggcgtttttcctggccaagtgaacaaagcaaagaggctgtttcgctccggccccgtgatcgttcaggcaaggacaacaaacaaggcgccgggttcacgcccggtgccagcctgtttcatggggctggctgccgattggcgacgctgacacgacacaatttacacatggaagatcgtataataattcattgaaagtgctgcgaagctccggagtgctgcttcacggagtgggaaccccatggcttgcgccatgggctcaccaaaagtctcccccggttcaccaaacttcccggtgttgtcagttattgtgccgccttggggtgagcgccgtgcgtgagcgcggcgatacgggccagctttcgggaaccccatggcttgcgccatgggctcaccaaaagtctccctcggttcaccaaacttcccggagttgtcagttattgtgccgccttggggtgagcgccgcgcgtgagcgcggcgatacgggccagctttcgggcccctttggattttgggagtgcgcactcgcattggccttgtcggcatcattcttccaaatcaccgacttggccaaaaaaaccaagttggcggcgctgacacgacacaatttacacatggaagatcgtataataattcattgaaagtgctgcgaagcaccggagtgctgcttcacggagtgggaaccccatggcttgcgccatgggctcaccaaaagtctcccccggttcaccaaacttcccggagttgtcagttattgtgccgccttggggtgagcgccgtgcgtgagcgcggcgatacgggccagctttcgggcccctttggattttgggaatgcgcactcgcattggccttgtcggcttcattcttccaaatcaccgaattgaccatgaaaaccaagtaggcggcgctgacacaacacaatttacacatggaagatcgtataaaacttcattgaaagtgttgcgaagcaccggagtgctgcttcacggagtgggaaccccgtggcttgtgccatgggctcaccaaaagtctcccccggttcaccaaacttcccggtgttgtcagttattgtgccgccttggggtgagcgccgtgcgtgagcgcggcgatacgggccagctttcgggcccctttggattttgggaatgcgcatttgcattggccttgtcggcatcattcttccaaatcaccgacttgaccatgaaaaccaaggttgggcgatctgccacccagtcattcacttcaaatccgcaggcaccggttcggcggctggtggcgggggcaccttcaggaactgcgccaggatcgccgcgctggccaagcacgaaaccttgccctcgcgcttgcccggcttgatgcccggcccgtagaccaggagcggaacatgggtgtcatagtcgtagggcgtgccgtgcgaggtgcccgtcggtatcgccgaccccccgaacaggcagccataggcgggcagcaccagcaagtcgcccgagcttttcgggtggaagctcaggcgcgcctgacgaagcaaggagtcgtcggtaggcgcgtccgattcaagctgcccccgcgtgtagcagcagccgatgccatcctgcttgcgcaaccaagttgcagcggcctcgcgaaccttggcgatgtcgccgccggcgaacgccttcgcgttcaggtacatgttttcatcgaccgggccgacaagcggctgaaccttctcccccaagtcgaattcctcacgaagatacgcaaccaacccttgtcccagcttgacggcatcaatgcgcctggcggccttggcgcccttggaagtcgccacctccggcagcggacaaacaccatggtcggctgacaagaccacgccatagttgtccgggcccaccagggcatcgagttccttgaagaaacgcgaaagcagagcgtcggtgcgcagggtgatgtcgagcacctcgtggctgtcggggccccacatgtgtcccaccacatcgttggccgaaaaactcacgcacaaaaggtcgggcacatcccgctggcccagcttttcccgccggacggcctccagcgcgaaatcggccaaaagttcattggaaaacggggagttgtatagcgcgctgtaataggtcttgtccggcttgcctgaatcggagggaaagggatgcggaaaggcgcgtccctgcttcttggcgattcccggcccttcgcccacaacatcatccggcccggcaagcttgtcgtagtcgaggtcgtcgcgaaaccggttccaggtggtgccgaaccacctgtcggccggcttggcggcgttgaaggctcccacccagtcggccacgcggtcgcggtagtaggtggaggtgacgaaatcacctgaatcgctgtcccaccagtagacgatgtttcccttgagtccgccgggaagcacggcgccccggtccttgagggaaaacgaggcgatcttggagccgctttgggcattggcgcgaatcgcgtcacccactgttggcgcccgaagcctttcgggagaaccggcccccttccggactgtggcgacggccgctgtgcccggctttggcacgacgggcttggcgggtggcacgcgctggtgcctctcggtggtggcgcagtacacgcccgcgccggtcaacgggtcgcgccaatcattgccgatgatcccatgcaccgatggactggacccggcgacaaggctggcgtgcccggcgccggtgacggtgacggcatagggatagtgggcattggcataccaggcgccctgctccagaaagcggttgaggccatcgggcccatagtgtgccttccatcgagccggataatcgccgcggaactggtcgaacaccaaaagcaccgccagcttgaccggcttgtcggtgccaccgacaggcgcctgggcccatgcggcggctggtatcatgaacggtaaaagaacaaggaatcgtgtcagcatgcatcgctccccaataggcctctctccctacaggataaccctgcgaaaggcggatgggatgaagggatgaagaaggaccgaggtggtgggggaagattcggaaaggtaaactcgaatccgcattccgcccgggggcccattccgtgccaaaacatgcgctagcgttcctgatcctcgcgtcaatcgcggactcaggcatggccgctgacttcaactcccaagccaagccggtgttcctggcccggtgcgcgcggtgccatggcgccggcacggccaaggcaggtctcaggctcgactcggccggcggggcgctccgcggcggtaccgacggcccggtcatcattcctggccaggccggcaaaagcccgctcatggcacgcgtcacaagcgacaagcccggggagatgatgccgcccaagggaccgcggctttccccggctgaaatatccgcgctgcgcgagtggatcgattcaggggccaagggaggcaacccgggggaagaccgcgatccccggcttgaccactgggcctggcaacccgtggccggcgtggcgactcccgctggcaacccggtcgaccatttcatcaacgcccgcctcaaggccgcaggcctcccgcccgccccgcgcgccgacaggcgctccctgatccgccgactgtcgttcgacctgctcggcctgcctccctcacccgaggaagtgacggcattcgtgaacgaccctgatcgcctggccttcgccaagttggtcgaccgttacctcgactcgccccggtacggggaacggcaggcgcgccactggctcgacatcgcccattacgccgacacccacggcttcgaacgcgaccagcgccgggagaacgcgtggcgctaccgcgactgggtgatccgcgccttcaacgccgacatgccctacgaccgcttcctggccgaccagatcgccggcgaccagttgcgaccgggcgaccccgaggcggtggcggcgacggggttccttgccgcgggaccctgggactttgtcggacaggcggaaacccccagccccgtgctcaagcgccaggcgcgcgccgacgacctcgacgacatggtcacgcaggtgatggcggcggcatgcggggtgacggtgaactgcgcgcgctgccacgatcacaagctcgagccgatatcccagaaggagtattacggcctgtgggccgtcttcagcggcgcgcgccggggggacaggcccctcgatccaccgggcgaggcgcggcgcgacggcgagaggaaggccctgctggccaaggccgccgaactgcgggcaacgctggcccgcctcgacggcaagggcctcagcctggccgatgccgttggcgggggcgacgggctgggctcgggaacccggggcgacgggatcaatccggcgaccggcaggaagtcagccaccaaggccggtctcatcagcggagccgtggcgaaccaataccgggcgctgggcggcctggtcgacggcgtcgtcgtccccggggggggcgatgttcccgtcagttccaccggcatcgtggccaagtcgatccccaagacatccgccaccgcctgggatgccatccgcaacggcccggtcaaccagcaaaggtcgacatccatcgccggcatcgactactcgggccccgggcatgacatcctcggactgcacgccaacgccgcgatcaccttcgacctggccaaggcccgcgccgccctcaaggccgacaccctcaggttcaccgccatggcgggatatggcggccggccgggcgacaattccaccaaggccgaccttcgcgtgctggccgatggcgtggaggtcgagcggcacctgggcctcaacccgggaagcggcccgttgcccatcgacatccccctcggtcccgacaagcggtttctcacgctcgtggccaccgagggagccgacggcggcatcggccacgaccaggtcttcctgggtgacgcccgcctgctcccctccaaaacggcccgacccccggcccctgaaacggcgaacaggcgcgagctttccgaggccctggcggccatcgagcggcaaatcgccgccatcgcgcccggcccgatggtgtacgccgtcaacggcggaacgcccgaggccgtgagggtgctcaagcgtggcaaccccgaggctcccggtgaggaaacgggccccggggcgctttcatgcctcaagggcgcccgcccgctggaggccacgagcgacatgggcgacggggccaggcgcgcggcgctggccaggtggatcgcgcagccggaaaacccgctcaccacccgggtcattgtcaaccgcctctggcaccatcatttcggagccggactagtcggaactcccagcgacttcggggccggcggtggcaagccgagccatccggaactgctcgactggctggcgggcgagctggttcggcggcgctggtcactcaaggcgatgcaccgcgtcatttgcgacagcgaggcctaccagcgatcatccatggcgcaagatcccaaggccgccttggccgacgcgggcaaccggctgctctggaggcaaaacccgcgccggctggatgccgaaagcctccgcgacgccgtcctggcgacaagcgggcagctcgaccccacccccttcggcccgggataccgcgacttcgtctaccaggaggcctacgcccccatctaccggcacatcgatgacgacagcccgtcgctgcgcaggcgcagcatctaccgctttgtcgtgcgcaccactccccagccgttcctcaccacgctcgattgccccaacccggccaacctctccccctcgcgcaccgaaaccaccacggcgctgcagtcgctggccctgctcaacaatccgttcatgctgaggcaggcccggcacttcgcccagaggctgtcccgggatgcgggtgattctaccgccgggcgggtcgggcgcgccttcgccctggcgttcgcccgcgcaccgtcacgggccgagctcgacgcctcgatggcgctcgtccgggcccgcgaccttcccgagctttgccggatgcttctcaacgccagcgagttctgccatgtcgattgagaaccttggcaggaggcgctggctgcggcagggcggatgctcgctgggcgccatcgcgctgggcacccttctggaacgcgacggactcgccgcggcgccctccgcgttcgccccaagggcaccccaccacgccccgcgcgcccgcgccgtgatcgagatcttctgccccggcggcatgagccatgtcgacaccttcgaccacaagcctgaactggaaaaatcccacggcaaggcgttcgacgccgagctgggcaagcagaccttcgccggcacgggcggaacctacgccaggagcttctggcccttccgcaggcacggccgatgcggcaaggcgatcagcgacctgttccccaacctggcccggcatgtcgacgacatcgccttcatccattccatgaggaacaagtcggcgctccatggccccgcgatgttcatgatgaactcgggcttcatccttcccggcttcccgtcgatgggctcctgggtcacctacggcctgggatgcgagaccgacaacctgccggccttcgtggtcctgcccgacatccgcggcctgccccccggcggcgtggtgaactggggcgccgggttcctgccggcggtgcaccagggcacggtggtggaggcctcgggaacccgcgagccgatcgcggacttgtttcctccggaaaggcaaggcgacgaggcgccgggccgcgcgttcctgaggtcgctcaacgccaaccacgcggaggctcgcgcctccgacacccggctggccgcgcggatggccagctacgagcttgccgcccgcctgcagatgagcgcgccggaggccgtggcgctcgaccgggaatccaccgccaccagggccatgtacgcgctcgacgacgaggacatcggcccgttcggcaggcaatgcctgctggcccgccggctggtggagcggggcgtccgcttcgtgcaggtgttctgcggcgccgagaacacccaggcccgcaaggtccgccccaactgggactcgcatgaggacctggtccgcgaccacggctactggggcagggtcctcgacaggggaacctcggcgctgctggccgacctcaagtcgcgcggactcctcgacgagacgctggtgctctgcgccaccgaattcggccgccagccgttcctgcaggggggcaaccggggccgcgaccacaaccccggcgcctacaccgcctggatggccggcggcggcaccaagggcggaacctcatacggttccagcgacgaactcggatggcaggccgccggaaacccgacctactcctacgacctccacgccaccgcgcttcaccagctcggcatcgaccacgagaagctgtcgttctaccacaacggcatcatgcgccggctcaccgatgtgcacgggaaggtcatttccgaaatcgtcgcctgactccggcgcgcctcaggcccgcaacgccgcgagcgcgccgcaatgaacccgcgtcggggcgatcgtgcgggccggcgtgaaaccggtggccgaaagcatcccccggtactccccggcgctgtaggcccgcccctcggtgagcgagaacaacgcggccgaataaagcgccacctccaacgggccgtccagggcgtcgttcaggtagacatcgtggatgaacaacctgcctccggggcggaccgccttgtggcagcggcgcaggatgtcgaggcaggtctcctcgttccagtcgtgaagcacattcgagagcagcaccgcgtcgcacgatgggtactccccgaagaggtctcccgccaccatcgccacccggtcggcggggccatgttccgcgaggatcccggaagccaccttgagcacctcgggccggtcgaggttggtaacgcgcaggcccgggttgcgctgcgccagggccattccatacaccccggttccgccgcccaggtcgaccaggtggccgatgccgtcaaggggcagcacctcggccagcacgggagcgcaaatgaaggcccggcccgccagggccatggtcaggcggcgggcgctgtctcccgattccatggccgattccatcccctcgcggaagatgaacgccttgccctcgtcgggccggttgctcaccggcttgtcggcccgcagcaggtcgatcatggccttcacgccgggcagtgcggaggtgaggccgacatagccgcggatctcatggctgccgcccggcaacaggaaccgtcccatgggagtgatggcctggggcaggcccggcgccccctcgatgagcctgagggcccgcatggcggtggaaagcacggcccacgggcggggcgccaggcccagcttctcccgcagggcatcctccggaaccggcccgccggccaacgcgtcgaagaggcccaattccagcccgctggccaacagttcggtcatgtagttgccgcgaaccatgtcgaacagcggcgtgggatcgagttcgggggtggtgaaggggggcatgatggtctccggggccggctgggcctcgaccggcgccgcctgctaacctgagactaaggcaggcgggggcgtcggagaaggtgcggatgtccgcgaaggatcgaacggcggtggttctgctcagcgggggactcgattcctccaccgtgctggccctggccatctcgcagggctaccgctgccacgccctcaccatcgcctacggccagcgtcaccaggtggaactggccgccgcggcacgcgtggccggtgccgcgggcgtggccgggcacaagacccttgccctcgatctgcggatgttcggcggctcggcgctcaccgccgacattcccgtcccccacgggcgctccatggattcgatggcttcgcacattccctgcacctatgtgcccgcccgcaacacgatcttcctgtcactggccctggcccacgcggaaaccctgggggcgttcgacatcttcgcgggcatgaacgcgctcgactattcgggctatcccgactgccgacccgagtacctggccgcgttcgaggcgatggccaacctcgcaacgcgcgacgccgtggagggcaagggccgctacaggatccacgcgccgcttttgcggttgggcaaggccgacatcatcaggcttggcgcggccatgggggtggattactcactcacccacagctgctacgacccgaccccggccggaaaggcctgcggcacctgcgacagttgcctgctgcggctcaagggcttccaggaggcgggaatgtccgacccggcgctggccgccacatgagaatcgccgaactgttcctctcgctgcagggggagggcctcctcgccggggtaccctcggtgttcgtccgcacctcgggctgcaaccttcgctgcggcttctgcgacactccctacacctcgtggcaaccggaggggctggaacgcccggccgccgatgtcgccgcggaggtgctccgccaccccacccgtcatgtggtggtgacgggcggcgagccgatgctggcgcccgacctgcccgaactcctcgaccccatcgccggcgccggcaggcatatcaccatcgagacagcggcgaccgtgtaccgtccggtccgctgcgacctggcgagcctgagccccaagctggccaacagcgcgccccgcgaccgcgaaggcggccgcttcctggccatgcatgagggcacgcgccggcgaccggatgtcatccgcaggttcatggaccaccacgaataccagctcaagttcgtggttcaagatccttccgacctcgtggagatcgacaacctcctcgatgacctgccccccgtgccgcccgagcgggtcctgctcatgccgctgggagtcaccaacacggaactccgggaacgctccgcctggctcgccggcctatgcctgggccggggctggcggctttgcccccggttgcatattgaactctacgggcacactcgaggcacctgaggcctcgaaacccatggggatggaacgatgatcacccttctgatggcctgcctggcgatgctccccccgccggcaaaacaggaacccctggtggtgccccaccggggcctcctcgggcacgctcctgaaaacacgcttgccaatttccgggcctgcctcgagctggggatggggttcgagttcgatgtccagcgctccaaggatggcgcccttgtctgcatccatgacgacacgctcgaccgaaccaccaacggcaagggccgcgtggcggacatgccgctggcttccatccgcgaactcgacgcgggagcctggttcaatacccggttcaagggggagaaggtgccgacggtggaggaggtgctgtcgctggtcggcgcgcatcgccacaagggggtgctcgtggccgtcgacctgaaggcggcccaagtggaggccgaggtggcggccatggcggtgaaagccggggcgctgaaaaagctcgtgttcataggccgggccatcagcgaacctgccgtgcgcgccaacatcatgaagcaatgccccaaggccgcatgcgcggcgctagccaacacgccggccgacttcgacgcggcgctcaccgccgccgacgcctcttgggtttacttccgtttcatcccgacccccgggctcatggagcgcgtccacaaggcgggaaggaagggattcatcgcgggtgtcacggtcgccggcgttgagccggccaactggaaggcggccgcggccgcgggcatcgacggcctgctgaccgatcatccgcttgaattccatgagaccttgcggccttctcggccaaaaccctgaccccgggccgaatcccggccgtttcaaggtgccacatgcggatcgtgtccctgcttccaagcgcgaccgaggtcgtgtgcgaactcggcctgggcgaaagccttgtgggtgtcacgcatgaatgcgactatccggacttcgtttcggcgctgccgaaagtcacgcgggcgctgatccctcacgacgccaccagccttcagatcgactcgctggtgcgggagagcctgcaagcccgcaaggccctttacgcgctggacatgcccgaactggaacggttgcgccccgacctgatcatcacccaggcgctgtgcgatgtgtgcgccgtggccgaggccgatgtggccgccgccgctgcctcgctacccggccggccgaaggtgttgaacctcgagccgatgtccatcggtgatgttctggagacgctggccacggtggcgaacgcggccggcgcgccggctcatgccaaagcggccatccgacgactgcggacgcggatcgacgcggtggccgaacgctcaaggaaggtcgccggccgcccgcgcgtggtcgtgctggaatggctcgacccgccgttcagttgcggacactggacacccgaactggtggatttggccggggccgacgaggtgatctccaggcccgggcaaccgtcgcggacgctgcggtgggatgaggtggtcgccgcccggccggatgtgctgttcatcgcctgttgcgggttttcggtggaacgcacgctggtcgaccttcccggcctcgccgcccggcccggctggtcggacctgcccgccgcgcgcgcggatcaggtctttgtcacggatggcaacgcctacttcagccggcccgggccgcgcctcgtggacagcctggaaatcctggcccacgccctgcaccccgctattcaccccctgcccgaaggcccgcggcccgccatgcgaataggcacccgccaacttgccgaaggccgggcggccctgccatgagccccaaggcggagacatgggcgggcatctatcaccggcccgggatggcccgcgccgtgtcggaatggcttggccattccaatgatctgatgtcctcaagcgggatattcctttgagccatcccgaacatccgctggtcgagggggtcgattaccatgtcgaggatggccggtgggttttcagcgcccactaccacctcaagcgcggatactgctgcacaagcggttgcaggcattgtccgtatggcaattcgcccaccgaccgggacagggccgcgaacgatggcgcccggccgtcgggagccccgggccggccccgttgaagcccatcacgattcaccgaacccgaaggcggctcgaaatcatccgacggtagtcaatccggcctcgcgcagcgccttttccatggcgggtttcttcgccgggtcgaggggagcgatgggcgcccggcacggcccgatcgattctcccagcagggccagggccgccttcactccgcctggcggcgtgcaaaggttgagcgccaggcgcagcgggtgcaggcgggcctgcgccgcccgggaaccttcccgatcgcccgccatgaacttttcgtagatctccacgagcaacttcggggcgatgttacccgtcgccggaatcgcgcccacggcgccgaggtcgagcgcgctgtagatgagcgtgtcgcgtccctgcagcaccgagaatgagggaggcacacggcggatcaggtcggccaccagcgtgaggtcgccgctggaatccttgatgccgacaatgttgggaacagccgccagtttctcggccgtctcggcctcgatgcgcaggccgccgcaggtgaccggattggaatacagcagcagcggcagcccggtggccccggccacccgcctgtaatggtcttccagttccttctgggtgggcatgatgaaatagggggtgatgaccgagaccccctggacaccctcgcgctccgccatgcgcgtgagcctttcggcctcgcgcgtggtctcggcgcccgtgcccgccagcaccggcaccctgccggcgacatgctccaccgcggtcgcgatcaccgcctgtttttccgcctcgtcgagcgcgtagaactcgctgttggtgccaagcacgaacaccgagtgcacgccgccggtgatgagccggtcgatgaaccagcgaagcctgggtaggtcgagttcccccgactcggaaaacggggtggcgaccggcggaatgatgccccgaaacgacatggcctaccctccaagtcaggaaatggcgacatccagcccgaacggcttttcaccggtgtaggcggcgtcgaggatttgcacgggatggccgacccacacgcggggggagcggtcgcgcatgtgccggtcgatctgcaacaggcagccgacattgccggtgagggccgcggaggcgcccgtggcggcgatgttccccgacttccgctgccccagggccgccgacatttccggctgggtgatgttgtagctgcccgcggcgccgcagcagtgctcgttctcggcgaggggaaccagcgaaagcccgtccaccatcgccagcacctgccggggcgccgagcggatcttctgggcgtgggccaggccgcaggcgtcgtggtaggtggccttgagcgagaccttgtggcggggcttcatggggcccagttcggcgaggaactcgtggatgtcgcgcaccttgccgccgaacacggcgccgggcccggcggcgtcgtgtccttccaggatgtggccgtagtccttgaggacggggctgcaacccccggcgttgctgatgatggcgtcgaggccggccaatccgccgggaaccgccgcgaacgagtcgcagttgccggccgccagcctggcggcgtcgtcgtcgaggccggcgtgcttgtgcagggcgccgcagcaggcctgcgatcgcgggatgtgcacatcgcagccgttgtgctggagcacccgcgccgtggccaggttgatctgcggatggaacgcgtcggcggcgcagcccagcagcaggcccaccgtggcgcgcttgggcccgatcgccggcaggaactcgggaaggttgtgatagggcgccaggtcgggcacgatctcctgcatccgccgcaggaagccgggcatcaggtatcccgaaagcctcacggcccagccgagcccgagccgttgcatcagcttgacgggaaacagcgcccagcccatgcggccgcggtgcggcgtgagcccgaacagcatggcgcgctgcagccagcccagcatgggcgcggggccccgcgtgcgcgcctggtcgttcttgaacgagtggatcacatgccggtactgcacgcccgaggggcaggcggtctcgcaggccatgcactcgaggcagccgttcatgtgcttctcggcctcgggcgagaacggcgcgcggccgtcggcgatggcgcgccagaggtagatgcggccgcgggggctgtcgttctcgttgcccgtctccacataggtggggcacgatcccaggcaaagcccgcaatggacgcagtccatgaacagctcatagtcgatgttcttgccaaggtcgctggcgatgggcaggctttggcgggtggctggggcgctcatgatggctttccgtcggggaggcgcgtgttgtggcgcatgcggttgggattgaagatgcggtcgggatccatttccctggcgatggccgcggagatggcctcctcgggccgggcgggtccccacatggagtcggcctgccgccatgggcgcggggcgcgcgcgaggcgggcccatcctcccggcccggcggcgtcgcgccagcccggcagcaggccccgggggtctttcccctcgggcaccaccgccctgaccacgcccgagccgggcaacgcgtgcaccaccgcgccgggcatgtcggccagcacgcgggccgccaggcccgccgtccgcgagggcaggcaacccagcgccgcgaccgctcccgactgggggtcggtccgctcggccaggcgcgtcgccatggcgtccaccgaattcggctggcactcgatgatctgcacatgggccaggtcgcgaaactcctccttggccctggccacctgccaggccaccgcgggagcctcgccctcgaatccgatcatcgccgtccacgcggccggcccgccgggaagggcgagaaggtcgaacgccacgggccgcgcggcgcacccgtgggcgcggtcggcggcggcctcgtgcatccccgccttcagcggaatcgccagccaggcgcgcaccggcggcaacgggcgcaccttgagcgtcacctgcgccatcggcccgagcgtgccgtgcgccccgacatgcagcttggccatgtcgtagcccgcgacattcttcacgacgcgtccgcccgacctcgtcagcttgccgttgtcgtcaaccacggtgaggccgatgacgaagtcgcggggcgttccgtgggccagccgcctcgatcccgagacattgcacgccagcaccccgcccagggtggccttgtcgggccacgggatgtccaggggcagggtttgccgttccctggcgaggatctcctggagcctcgacacgcggatcccggcctgcgcggtgatcgtcatgtcgcgggcgggatagtcgatcacgcggtcgagggagctcatgtggaccacggtgccgggaaccgtcgcgggtatgccggcgcccagggaaagcccgccgcccacccagtacaggggctggcccgaggcgcgacaggcccggacaacctgggccagggcttcgggcgtctcgggggcgacggcgtccaggtcgaggccgtcgatgtcgaatgtggggtccatggcgtgctgctggtcctcggggggagcgtcagagggcggcgcgtcggccgggcttcacctgcttgtgccgccccgcttccgcgcaggcgccggcggtgggcagcatcttgtcggggctgcacaggccgtcggggttgaatgcctgcctcacccgcctcatcgcggcgaggtcgtcggggctgaacagcttggccatgaagtcgatcttctccacgccgatcccgtgctcgccggtgacgctgccgcccagcctgaggcactcgtcgaggatctcgtggctggcctccatcacgcgcctgagttggtccgggtcgcgctcgtcgaacagcaggatggggtggaggttgccgtcgccggcatggaagacattggcgattctgagcttgtgcctgtcgccaatcgccgtgatcgacctcagcatctcggggagggcggtgcgcggcacaacgccgtcctgggtgcagtagcttggcgccagccggccgacggccccgaaggcctgcttgcggcacttccacagcagcagcctctcggcttccgtgttggcgcgcctcacctcgcgggcacggttggccttggccagcttctcgatccgcgcggcctcctcgcccaggccggcatccagcccgtccacctccatgatgaggaccgccccggcatccagcgggaaaccgaagctgaacgcctcctccaccgccttgaggatcaacgagtcgagcatctcgagcgccgccggcacgatgcccgccccgatgatggccgagatcgccgccgtggcgtcgtcgaccgactcgaacacgcccaggagcgtgcgcaccgactcgggattgcgcaccagcctcacccatgccttggtgaccacgccgaaggttccttccgaaccaacaaccacgccggtgaggtcgaggccggggccgtcctccaccgggccgccaagggtttgcaccgtgccgtcgggcatcacgatctcgacgcccatcacatggttcaccgtgacgccatacttcagggtgtgcgggccgcccgaattggtggcgacattgccgccgatggtgcaggcgccctggctggagggatcgggcgcgtagtgccaaccctcggacttgatccggttggtgagccacatgttgatcacgccggcctcgacaagcgcgaaccggttgcgcaggtcgacttccaggattcgcttcatcctggccagcgagatgatcaccccgccgcccacgggcaggcaccctcccgcgaggctcgtccccgaaccccttggcaggaaggggacccgcaactcccggcatagcttcacgatctcgaccacctgttcggtggccgtggggaacacgacgacatcgggccggttcttttcgagcgtgtagccgtcgcactcgtatacgagcaactcggcctgggagttgatcaggccgtccgggcccacgatgccggtgagccggcgcaccaggttctcgacgacggatggctcaacggcggcgacggtcatgggggggcgttccgggaactaatatcggcctttcccagcatacagggccggaaggatttcctaatagcggaaaccgttgcgccgcacatgggtccacggctcaccctcgggttccgatcggcccgcgagcaccgtgccggtcaccaggtcgtggtcacccacggggtatcggccggaaacctcgcagaggagatgggcgtgggcatcctcgagaaggggcggaaggtcgtcggaaaacctggtggccagaggggcgaatccctcgggcccgggcggcgttcccttgccgaaatgcctcaggagttccttctgtccgtcgcgcaccacatgaaccacgaaacgcgccccaggaaccagaagcggccccaggccccggtcgcggccgatcgccacgctcagggaagggggctcaaacccgcactgctgcacccagcttgccagcatcgcctgggccgaagcccccgtaccggcggtcacgatgtacaacccgcttgagacgcgccccagggccccacccagcgtgtcgcggtcttggctcagcattgtccgctcctccgcgacgatcaatccttgaccagcttttccaaaagctggggcaattccgattcggccgcctcgctgtcgaggtatttcttggcgatcagccccgccttgttgaacacgaaggtcgccggataaccctcgatctcaaacttcttctgccaaacctcaaggggctccctgagcatgtaggaaaccccgggcaacttggcgcgcctgacgatggcgtccaccttctcgcgaaccttggggtgtccctcctcggcatcgagggggatttcaacatggacggcgatcaccgtcacttttccaggaaaccggccgcccatctcgaccagatggggcaaggccttgatgcaggggattcaggtcctctgccagatgtccaccaccacgacctggcccttgaggtcgcgcacggccttggccaactcggggaaccgaacctccttgagtaccggggcgggatcctgggccatcactcccgccagcagcgcgcagcagattgaaatcatcggttcgtctccaagctatgtgtcaaggccggtaacacgactcacttcgcgaacacgcgttcgcccggcttggccgcctccgcgtcgccatcgtgcaccagcatggcgtaggtcagcttgagggtctcgcccttggccagcttcacgaggtcggcgcggcccttcatgtccgggaagccggacctgttcctgccaaacgggttggcggccatcagcccgtagccgcgggcatgccagcaggtgggatatttgttgtccgggtgggccacgatcgccacgccggcgaccttgccgccggtggggccggagtagtcgcaccaggccgacttcttgccccagaggtttttctcgcccttgaggccctcggcgttggtcagcacgcccttgcccggcttttccgtcaggtcgtcgcgaacccgaaccccgaaggaaccttccttggtgtcctcgaaaacaatcccgccctcgctggcggtgatctccgaggcgacctccatgatccacgatgaggcatcccgggcccggaacacgagggtgcgcgcctcggtgaggatcgtcttgcccgtggaatccttccaggtgttggcggtccgcacggtcacggggccattgccgtttccggtgggcgtggaaatcgccaggccggcgatcgtgccatgcccggtttcctcgctccagaagtcgatgccgtcgatccccttgcgcttgggggcctgataaccctcaagcacaatgtcgccatggcagaaccacgccgatttctggtgcttgtggtccttggcctccttggcgtcgggcaccatcggccaatcgcgggtaatcgccaccccgcccggggtgaccacaggccagaaatacggcttcgcgaccttcgggccggcgttgtaccgggtgacgacggctccacccagcttgaacgaaaccacgccgtcgggcgaaacctcggcagccaccggaacctggccggaaaccgccagcacccacgccgccaaccaaccacatgcactggacatgcccggccctcccggcccaccatagccgtgtgaatccttggatgatgctaacgggtattggttcaagagtcagcagtctcccccttgaggatcgattcatgcgatttcccacatgcctcgggctggtggcccttgccgccgccatggcggcaccggcccgcgccgcggagaccgcgctgccgcccctgttggtgcgcctggcgtcgatcgacacgctcaccaggcagttcttcctgctggcggacaaggttggccgcaaggccgaggccgagcagatgaaaaacgcgctgcaggccgccaccggcccgggcggcatcgagggactcgacccggccaagccgatcggcatctacggccgcatcggacccaacggcctcgacagcaccggcgtgatcctcgttccctccagtgacgaggccgccatgctcaaggccctcaagaaactcgccggcgccatcggcggcaacctcgtggagtcgaaggagaagggcggcgcccacacgctcaacctcgaccagtcgcccatgcccatcttcctcaggttcgccaagggatattgctgggccaccttcaaggacgagtccgccatcaccatcgacaagcttccagacccggcccggctgctcgaggcgcccgccggaagcgtggcccgcctgcatttcgacctggcggcggtgccggagaacctccgcgccaccgccgtcgaggcgttcaagcagggcgtcgccgaggcccgggagaaggcgccgccggccgaaaccgccgcgaccaagaagttccggatgcaattgaccgacatgatggagggtggattggtccagttcctcaaggaagggggcggcctcgaccttgagttggtcatcgacgccaagaccgaggatgtctcacttgaggccaggctcgacaccctgcccggttcctcgctcaccaaggcgatgcaggccatgggcgccggggaatcaatcggcaaggccatctccgcggggggggacgccgtcgccatctcgtcctacatgcgcatgccgcaggaacttcgctcggcgttcatgggcgtgttcgaggaagccctggccggcgccaaggagtccaacgactcgccccaaaagcagaaggtcgccaaggacatgatcgccgccgtcatgcccaccctgcagtcggccgtgctggacatgggcatcgcgctgaacccgtcgaagaaggaaggcatctacaacgccgccatcggcttccgcgtggcggaaggcgccaaggtggagacggcactgcgcaccgccgtcaaggaactgttcggcgagaaggccgaaggcaaggtgaagctcgacttcgccacctacgcgggagtgaaggtgcaccagttcaccggggcggacgacgccaagtcccgcgaaatgctgggcgacggccccgcctacctggccatccgcgacgacatggtgcttgtgacggccggacccgatgcactcgccatgctcaaggacatggtcagcctgaagccggagaagggctcgatgatgaaggcggaactcgggctggcggcgatcgccaggctgggtgattcgaatgtgcccaaggcgctggtgaagaaggccgccgacacggcgttcgccggcaagccgggggtcgaccgcgcccgcgtcgagatcagcacggaaaagggattcggcatcaaggtctcggccaacctggccaccttggagttcctcagcatcatggaccccaaccggaacaactgatttccggcctttcgtccactggtgagcgcggggcgtcagctttcctctttaggcgagcgcggggcgtcagccccatgagttgggttgccggcgcgcgcggatgattaccggcggccggccatcgccacctttggggatcttgagacgggcgcgaccgggacggccttcggccggaggctccaccagcacgacgccggcagcatcccgattccagccaacgccaggtgcgcgatccaggtgatccgcagcgagcgcgcgagggtctggtcgaaaccgtaggcatgaagccctacggacaactggttggtgccgaaccagctccacgcggtgatgatgttgcccaggatggccaggacggcaacgccgcggtcgcgcaccatgcctccccagcgggcatgcaggatgagggcgttccaaagcacgatcaacagcgcgccgttctccttgggatcccatccccagaagcggccccacgactggtcggcccagattccgcccagcaccgtgccgacgaagctgaggagcgtggcgaagcagacgacgccgtaggttttcttgacgagggccttgccgccctcagccgacatccacggcgtgcagacaccccacagcacatacccgatgccgaggaacccggcgacgaagctggcggtgtagccgagggtgatgcaggtgacatgggtggccagccagaagttcgtgtcgagcacggcctgcagcatctcgagggtgtcgccgctggcgcccaggaactgggcgatgagcagggaaaggaagccggtgaccgcggcgatggcgtttccggcgccacgcttgtcgagccactcgatcatggctcccagccaggcgcagccccagccgatgaacaccgccgacgagtagaggttggtgaccggcggccgcccctgcaggtacatgcgcatgagcaacgcggcggtgtggatggtcgccaccatgatcgtggcggcgagcacccccctctgcacggcgatcaccttgtcgcccatcatccagcccgccagcgtggccagcaggatgcagacataaaggacgcatgaaaggtagatcgggttgacggcgttgtacacctgctccatgcgcaccttggccatcgccggcgccgcgacgcgctcctggaggatctcctggtaggcttccacatgcttgttgaagtcggcgggcttctgctgggcgtaggcgaggaggacgcggccgaaggcctccgtggcgggattcgacctgccctcgcgcgtggccaccatcgcctcctggaaggtgagccagcggtcgtcggcggtttcctcgcccgtcgggggggtctcccgtggaatcaggcccgtctcgggcagggtgagcgtggcgatctggatgtacagttccaggtgccgggtgagctcgagcagttgcctctgatagacatcgcggcgggccggatccaccttggccgcctctcccgccgccttttcaatgtcggccatcttgtcgcggaactcgttgatggcgtagcgcagtccctgccgccgctcaacgcccaacaggcggagcacctggtcgttttccacgcggaagatcttgaggttctcggcccggcccttgtcggtcaggcgcgaggtcatcacatcgagcagccactcggtggccggacgggagcgtccctcggggtcggtgaactcggtgcggtgggtgatcacctggaggctggtgcgggccagggtgtcgaagggcttgagccggccgccgctttgcatcggcaactggccgaacttctcaaggtcgtagctcgagctgcggtagctcatcgccacgatcatgaacgacagggcgccgacaacggcgccggaaaccagccaaccggccagcggtatcccgggaaggcccttggcgcctggaacctggctcatgtcgtcctccggagaaagcgagacaggttgatgccgaaatgcacgagcattcccagcgacaccacggcgcacgacaggtagggcagcagccagcctggattcctcaccacctggagcacgctgccggaatcgccggcgagagcctggtgctggtagaaggtttcgccgcggtggcgcatcggctcgttcatgcggatggtggtgggtcggtccaccccgatttccgcgtcctcgaggcggatgtcgctttggaagttgcgaggtttgttggtgccggggtacacctcgtggcgaaactcctcgagggtgatcgtgtagggcttgtaggtgcgcctgaagcggaggctcaccaacctctccccctccttgggggcaaccttctgcggccggggtgagcgggtgagctgcaaccaggtgctgaccagccaagtgcccatgtcggtcccatcgcggtcggtcaggcgcaccagcgccgcgggcatgttcaccttctggtcctggtcgacgccgttgacccgcggcctttcgagcacggtgagttccttgccctcgccccggctggcgtattcaggctcgtccttgccccggtcgcggatgtcgctgttggaaaacaggctcagcaccgtcaccgaacatggcaggcgcgggtcgtcgatcggctggccggttcgcgccgccctttccaacaccgttccgggaaccaccacgaccttgtcgctttccttgtcggaagggtcgatgaacgccagttccacatgacggttgctttccacgaacgacgccttgccccccgtgaccagcgtcatggtgctttccacggcgaactcgcgggtgaggaactcgcccaccatcatgagcac

SEQ ID NO: 496 - DNA, 105135 bp, Artificial Sequence
  Synthetic Oligonucleotide
  misc_feature (1)..(91556): n is a, c, g, or t
nnnnnnnnnnnnnnnnnnnnnnnnnnnnnnnnnnnnnnnnnnnnnnnnnnnnnnnnnnnnnnnnnnnnnnnnnnnnnnnnnnnnnnnnnnnnnnnnnnnnnnnnnnnnnnnnnnnnnnnnnnnnnnnnnnnnnnnnnnnnnnnnnnnnnnnnnnnnnnnnnnnnnnnnnnnnnnnnnnnnnnnnnnnnnnnnnnnnnnnnnnnnnnnnnnnnnnnnnnnnnnnnnnnnnnnnnnnnnnnnnnnnnnnnnnnnnnnnnnnnnnnnnnnnnnnnnnnnnnnnnnnnnnnnnnnnnnnnnnnnnnnnnnnnnnnnnnnnnnnnnnnnnnnnnnnnnnnnnnnnnnnnnnnnnnnnnnnnnnnnnnnnnnnnnnnnnnnnnnnnnnnnnnnnnnnnnnnnnnnnnnnnnnnnnnnnnnnnnnnnnnnnnnnnnnnnnnnnnnnnnnnnnnnnnnnnnnnnnnnnnnnnnnnnnnnnnnnnnnnnnnnnnnnnnnnnnnnnnnnnnnnnnnnnnnnnnnnnnnnnnnnnnnnnnnnnnnnnnnnnnnnnnnnnnnnnnnnnnnnnnnnnnnnnnnnnnnnnnnnnnnnnnnnnnnnnnnnnnnnnnnnnnnnnnnnnnnnnnnnnnnnnnnnnnnnnnnnnnnnnnnnnnnnnnnnnnnnnnnnnnnnnnnnnnnnnnnnnnnnnnnnnnnnnnnnnnnnnnnnnnnnnnnnnnnnnnnnnnnnnnnnnnnnnnnnnnnnnnnnnnnnnnnnnnnnnnnnnnnnnnnnnnnnnnnnnnnnnnnnnnnnnnnnnnnnnnnnnnnnnnnnnnnnnnnnnnnnnnnnnnnnnnnnnnnnnnnnnnnnnnnnnnnnnnnnnnnnnnnnnnnnnnnnnnnnnnnnnnnnnnnnnnnnnnnnnnnnnnnnnnnnnnnnnnnnnnnnnnnnnnnnnnnnnnnnnnnnnnnnnnnnnnnnnnnnnnnnnnnnnnnnnnnnnnnnnnnnnnnnnnnnnnnnnnnnnnnnnnnnnnnnnnnnnnnnnnnnnnnnnnnnnnnnnnnnnnnnnnnnnnnnnnnnnnnnnnnnnnnnnnnnnnnnnnnnnnnnnnnnnnnnnnnnnnnnnnnnnnnnnnnnnnnnnnnnnnnnnnnnnnnnnnnnnnnnnnnnnnnnnnnnnnnnnnnnnnnnnnnnnnnnnnnnnnnnnnnnnnnnnnnnnnnnnnnnnnnnnnnnnnnnnnnnnnnnnnnnnnnnnnnnnnnnnnnnnnnnnnnnnnnnnnnnnnnnnnnnnnnnnnnnnnnnnnnnnnnnnnnnnnnnnnnnnnnnnnnnnnnnnnnnnnnnnnnnnnnnnnnnnnnnnnnnnnnnnnnnnnnnnnnnnnnnnnnnnnnnnnnnnnnnnnnnnnnnnnnnnnnnnnnnnnnnnnnnnnnnnnnnnnnnnnnnnnnnnnnnnnnnnnnnnnnnnnnnnnnnnnnnnnnnnnnnnnnnnnnnnnnnnnnnnnnnnnnnnnnnnnnnnnnnnnnnnnnnnnnnnnnnnnnnnnnnnnnnnnnnnnnnnnnnnnnnnnnnnnnnnnnnnnnnnnnnnnnnnnnnnnnnnnnnnnnnnnnnnnnnnnnnnnnnnnnnnnnnnnnnnnnnnnnnnnnnnnnnnnnnnnnnnnnnnnnnnnnnnnnnnnnnnnnnnnnnnnnnnnnnnnnnnnnnnnnnnnnnnnnnnnnnnnnnnnnnnnnnnnnnnnnnnnnnnnnnnnnnnnnnnnnnnnnnnnnnnnnnnnnnnnnnnnnnnnnnnnnnnnnnnnnnnnnnnnnnnnnnnnnnnnnnnnnnnnnnnnnnnnnnnnnnnnnnnnnnnnnnnnnnnnnnnnnnnnnnnnnnnnnnnnnnnnnnnnnnnnnnnnnnnnnnnnnnnnnnnnnnnnnnnnnnnnnnnnnnnnnnnnnnnnnnnnnnnnnnnnnnnnnnnnnnnnnnnnnnnnnnnnnnnnnnnnnnnnnnnnnnnnnnnnnnnnnnnnnnnnnnnnnnnnnnnnnnnnnnnnnnnnnnnnnnnnnnnnnnnnnnnnnnnnnnnnnnnnnnnnnnnnnnnnnnnnnnnnnnnnnnnnnnnnnnnnnnnnnnnnnnnnnnnnnnnnnnnnnnnnnnnnnnnnnnnnnnnnnnnnnnnnnnnnnnnnnnnnnnnnnnnnnnnnnnnnnnnnnnnnnnnnnnnnnnnnnnnnnnnnnnnnnnnnnnnnnnnnnnnnnnnnnnnnnnnnnnnnnnnnnnnnnnnnnnnnnnnnnnnnnnnnnnnnnnnnnnnnnnnnnnnnnnnnnnnnnnnnnnnnnnnnnnnnnnnnnnnnnnnnnnnnnnnnnnnnnnnnnnnnnnnnnnnnnnnnnnnnnnnnnnnnnnnnnnnnnnnnnnnnnnnnnnnnnnnnnnnnnnnnnnnnnnnnnnnnnnnnnnnnnnnnnnnnnnnnnnnnnnnnnnnnnnnnnnnnnnnnnnnnnnnnnnnnnnnnnnnnnnnnnnnnnnnnnnnnnnnnnnnnnnnnnnnnnnnnnnnnnnnnnnnnnnnnnnnnnnnnnnnnnnnnnnnnnnnnnnnnnnnnnnnnnnnnnnnnnnnnnnnnnnnnnnnnnnnnnnnnnnnnnnnnnnnnnnnnnnnnnnnnnnnnnnnnnnnnnnnnnnnnnnnnnnnnnnnnnnnnnnnnnnnnnnnnnnnnnnnnnnnnnnnnnnnnnnnnnnnnnnnnnnnnnnnnnnnnnnnnnnnnnnnnnnnnnnnnnnnnnnnnnnnnnnnnnnnnnnnnnnnnnnnnnnnnnnnnnnnnnnnnnnnnnnnnnnnnnnnnnnnnnnnnnnnnnnnnnnnnnnnnnnnnnnnnnnnnnnnnnnnnnnnnnnnnnnnnnnnnnnnnnnnnnnnnnnnnnnnnnnnnnnnnnnnnnnnnnnnnnnnnnnnnnnnnnnnnnnnnnnnnnnnnnnnnnnnnnnnnnnnnnnnnnnnnnnnnnnnnnnnnnnnnnnnnnnnnnnnnnnnnnnnnnnnnnnnnnnnnnnnnnnnnnnnnnnnnnnnnnnnnnnnnnnnnnnnnnnnnnnnnnnnnnnnnnnnnnnnnnnnnnnnnnnnnnnnnnnnnnnnnnnnnnnnnnnnnnnnnnnnnnnnnnnnnnnnnnnnnnnnnnnnnnnnnnnnnnnnnnnnnnnnnnnnnnnnnnnnnnnnnnnnnnnnnnnnnnnnnnnnnnnnnnnnnnnnnnnnnnnnnnnnnnnnnnnnnnnnnnnnnnnnnnnnnnnnnnnnnnnnnnnnnnnnnnnnnnnnnnnnnnnnnnnnnnnnnnnnnnnnnnnnnnnnnnnnnnnnnnnnnnnnnnnnnnnnnnnnnnnnnnnnnnnnnnnnnnnnnnnnnnnnnnnnnnnnnnnnnnnnnnnnnnnnnnnnnnnnnnnnnnnnnnnnnnnnnnnnnnnnnnnnnnnnnnnnnnnnnnnnnnnnnnnnnnnnnnnnnnnnnnnnnnnnnnnnnnnnnnnnnnnnnnnnnnnnnnnnnnnnnnnnnnnnnnnnnnnnnnnnnnnnnnnnnnnnnnnnnnnnnnnnnnnnnnnnnnnnnnnnnnnnnnnnnnnnnnnnnnnnnnnnnnnnnnnnnnnnnnnnnnnnnnnnnnnnnnnnnnnnnnnnnnnnnnnnnnnnnnnnnnnnnnnnnnnnnnnnnnnnnnnnnnnnnnnnnnnnnnnnnnnnnnnnnnnnnnnnnnnnnnnnnnnnnnnnnnnnnnnnnnnnnnnnnnnnnnnnnnnnnnnnnnnnnnnnnnnnnnnnnnnnnnnnnnnnnnnnnnnnnnnnnnnnnnnnnnnnnnnnnnnnnnnnnnnnnnnnnnnnnnnnnnnnnnnnnnnnnnnnnnnnnnnnnnnnnnnnnnnnnnnnnnnnnnnnnnnnnnnnnnnnnnnnnnnnnnnnnnnnnnnnnnnnnnnnnnnnnnnnnnnnnnnnnnnnnnnnnnnnnnnnnnnnnnnnnnnnnnnnnnnnnnnnnnnnnnnnnnnnnnnnnnnnnnnnnnnnnnnnnnnnnnnnnnnnnnnnnnnnnnnnnnnnnnnnnnnnnnnnnnnnnnnnnnnnnnnnnnnnnnnnnnnnnnnnnnnnnnnnnnnnnnnnnnnnnnnnnnnnnnnnnnnnnnnnnnnnnnnnnnnnnnnnnnnnnnnnnnnnnnnnnnnnnnnnnnnnnnnnnnnnnnnnnnnnnnnnnnnnnnnnnnnnnnnnnnnnnnnnnnnnnnnnnnnnnnnnnnnnnnnnnnnnnnnnnnnnnnnnnnnnnnnnnnnnnnnnnnnnnnnnnnnnnnnnnnnnnnnnnnnnnnnnnnnnnnnnnnnnnnnnnnnnnnnnnnnnnnnnnnnnnnnnnnnnnnnnnnnnnnnnnnnnnnnnnnnnnnnnnnnnnnnnnnnnnnnnnnnnnnnnnnnnnnnnnnnnnnnnnnnnnnnnnnnnnnnnnnnnnnnnnnnnnnnnnnnnnnnnnnnnnnnnnnnnnnnnnnnnnnnnnnnnnnnnnnnnnnnnnnnnnnnnnnnnnnnnnnnnnnnnnnnnnnnnnnnnnnnnnnnnnnnnnnnnnnnnnnnnnnnnnnnnnnnnnnnnnnnnnnnnnnnnnnnnnnnnnnnnnnnnnnnnnnnnnnnnnnnnnnnnnnnnnnnnnnnnnnnnnnnnnnnnnnnnnnnnnnnnnnnnnnnnnnnnnnnnnnnnnnnnnnnnnnnnnnnnnnnnnnnnnnnnnnnnnnnnnnnnnnnnnnnnnnnnnnnnnnnnnnnnnnnnnnnnnnnnnnnnnnnnnnnnnnnnnnnnnnnnnnnnnnnnnnnnnnnnnnnnnnnnnnnnnnnnnnnnnnnnnnnnnnnnnnnnnnnnnnnnnnnnnnnnnnnnnnnnnnnnnnnnnnnnnnnnnnnnnnnnnnnnnnnnnnnnnnnnnnnnnnnnnnnnnnnnnnnnnnnnnnnnnnnnnnnnnnnnnnnnnnnnnnnnnnnnnnnnnnnnnnnnnnnnnnnnnnnnnnnnnnnnnnnnnnnnnnnnnnnnnnnnnnnnnnnnnnnnnnnnnnnnnnnnnnnnnnnnnnnnnnnnnnnnnnnnnnnnnnnnnnnnnnnnnnnnnnnnnnnnnnnnnnnnnnnnnnnnnnnnnnnnnnnnnnnnnnnnnnnnnnnnnnnnnnnnnnnnnnnnnnnnnnnnnnnnnnnnnnnnnnnnnnnnnnnnnnnnnnnnnnnnnnnnnnnnnnnnnnnnnnnnnnnnnnnnnnnnnnnnnnnnnnnnnnnnnnnnnnnnnnnnnnnnnnnnnnnnnnnnnnnnnnnnnnnnnnnnnnnnnnnnnnnnnnnnnnnnnnnnnnnnnnnnnnnnnnnnnnnnnnnnnnnnnnnnnnnnnnnnnnnnnnnnnnnnnnnnnnnnnnnnnnnnnnnnnnnnnnnnnnnnnnnnnnnnnnnnnnnnnnnnnnnnnnnnnnnnnnnnnnnnnnnnnnnnnnnnnnnnnnnnnnnnnnnnnnnnnnnnnnnnnnnnnnnnnnnnnnnnnnnnnnnnnnnnnnnnnnnnnnnnnnnnnnnnnnnnnnnnnnnnnnnnnnnnnnnnnnnnnnnnnnnnnnnnnnnnnnnnnnnnnnnnnnnnnnnnnnnnnnnnnnnnnnnnnnnnnnnnnnnnnnnnnnnnnnnnnnnnnnnnnnnnnnnnnnnnnnnnnnnnnnnnnnnnnnnnnnnnnnnnnnnnnnnnnnnnnnnnnnnnnnnnnnnnnnnnnnnnnnnnnnnnnnnnnnnnnnnnnnnnnnnnnnnnnnnnnnnnnnnnnnnnnnnnnnnnnnnnnnnnnnnnnnnnnnnnnnnnnnnnnnnnnnnnnnnnnnnnnnnnnnnnnnnnnnnnnnnnnnnnnnnnnnnnnnnnnnnnnnnnnnnnnnnnnnnnnnnnnnnnnnnnnnnnnnnnnnnnnnnnnnnnnnnnnnnnnnnnnnnnnnnnnnnnnnnnnnnnnnnnnnnnnnnnnnnnnnnnnnnnnnnnnnnnnnnnnnnnnnnnnnnnnnnnnnnnnnnnnnnnnnnnnnnnnnnnnnnnnnnnnnnnnnnnnnnnnnnnnnnnnnnnnnnnnnnnnnnnnnnnnnnnnnnnnnnnnnnnnnnnnnnnnnnnnnnnnnnnnnnnnnnnnnnnnnnnnnnnnnnnnnnnnnnnnnnnnnnnnnnnnnnnnnnnnnnnnnnnnnnnnnnnnnnnnnnnnnnnnnnnnnnnnnnnnnnnnnnnnnnnnnnnnnnnnnnnnnnnnnnnnnnnnnnnnnnnnnnnnnnnnnnnnnnnnnnnnnnnnnnnnnnnnnnnnnnnnnnnnnnnnnnnnnnnnnnnnnnnnnnnnnnnnnnnnnnnnnnnnnnnnnnnnnnnnnnnnnnnnnnnnnnnnnnnnnnnnnnnnnnnnnnnnnnnnnnnnnnnnnnnnnnnnnnnnnnnnnnnnnnnnnnnnnnnnnnnnnnnnnnnnnnnnnnnnnnnnnnnnnnnnnnnnnnnnnnnnnnnnnnnnnnnnnnnnnnnnnnnnnnnnnnnnnnnnnnnnnnnnnnnnnnnnnnnnnnnnnnnnnnnnnnnnnnnnnnnnnnnnnnnnnnnnnnnnnnnnnnnnnnnnnnnnnnnnnnnnnnnnnnnnnnnnnnnnnnnnnnnnnnnnnnnnnnnnnnnnnnnnnnnnnnnnnnnnnnnnnnnnnnnnnnnnnnnnnnnnnnnnnnnnnnnnnnnnnnnnnnnnnnnnnnnnnnnnnnnnnnnnnnnnnnnnnnnnnnnnnnnnnnnnnnnnnnnnnnnnnnnnnnnnnnnnnnnnnnnnnnnnnnnnnnnnnnnnnnnnnnnnnnnnnnnnnnnnnnnnnnnnnnnnnnnnnnnnnnnnnnnnnnnnnnnnnnnnnnnnnnnnnnnnnnnnnnnnnnnnnnnnnnnnnnnnnnnnnnnnnnnnnnnnnnnnnnnnnnnnnnnnnnnnnnnnnnnnnnnnnnnnnnnnnnnnnnnnnnnnnnnnnnnnnnnnnnnnnnnnnnnnnnnnnnnnnnnnnnnnnnnnnnnnnnnnnnnnnnnnnnnnnnnnnnnnnnnnnnnnnnnnnnnnnnnnnnnnnnnnnnnnnnnnnnnnnnnnnnnnnnnnnnnnnnnnnnnnnnnnnnnnnnnnnnnnnnnnnnnnnnnnnnnnnnnnnnnnnnnnnnnnnnnnnnnnnnnnnnnnnnnnnnnnnnnnnnnnnnnnnnnnnnnnnnnnnnnnnnnnnnnnnnnnnnnnnnnnnnnnnnnnnnnnnnnnnnnnnnnnnnnnnnnnnnnnnnnnnnnnnnnnnnnnnnnnnnnnnnnnnnnnnnnnnnnnnnnnnnnnnnnnnnnnnnnnnnnnnnnnnnnnnnnnnnnnnnnnnnnnnnnnnnnnnnnnnnnnnnnnnnnnnnnnnnnnnnnnnnnnnnnnnnnnnnnnnnnnnnnnnnnnnnnnnnnnnnnnnnnnnnnnnnnnnnnnnnnnnnnnnnnnnnnnnnnnnnnnnnnnnnnnnnnnnnnnnnnnnnnnnnnnnnnnnnnnnnnnnnnnnnnnnnnnnnnnnnnnnnnnnnnnnnnnnnnnnnnnnnnnnnnnnnnnnnnnnnnnnnnnnnnnnnnnnnnnnnnnnnnnnnnnnnnnnnnnnnnnnnnnnnnnnnnnnnnnnnnnnnnnnnnnnnnnnnnnnnnnnnnnnnnnnnnnnnnnnnnnnnnnnnnnnnnnnnnnnnnnnnnnnnnnnnnnnnnnnnnnnnnnnnnnnnnnnnnnnnnnnnnnnnnnnnnnnnnnnnnnnnnnnnnnnnnnnnnnnnnnnnnnnnnnnnnnnnnnnnnnnnnnnnnnnnnnnnnnnnnnnnnnnnnnnnnnnnnnnnnnnnnnnnnnnnnnnnnnnnnnnnnnnnnnnnnnnnnnnnnnnnnnnnnnnnnnnnnnnnnnnnnnnnnnnnnnnnnnnnnnnnnnnnnnnnnnnnnnnnnnnnnnnnnnnnnnnnnnnnnnnnnnnnnnnnnnnnnnnnnnnnnnnnnnnnnnnnnnnnnnnnnnnnnnnnnnnnnnnnnnnnnnnnnnnnnnnnnnnnnnnnnnnnnnnnnnnnnnnnnnnnnnnnnnnnnnnnnnnnnnnnnnnnnnnnnnnnnnnnnnnnnnnnnnnnnnnnnnnnnnnnnnnnnnnnnnnnnnnnnnnnnnnnnnnnnnnnnnnnnnnnnnnnnnnnnnnnnnnnnnnnnnnnnnnnnnnnnnnnnnnnnnnnnnnnnnnnnnnnnnnnnnnnnnnnnnnnnnnnnnnnnnnnnnnnnnnnnnnnnnnnnnnnnnnnnnnnnnnnnnnnnnnnnnnnnnnnnnnnnnnnnnnnnnnnnnnnnnnnnnnnnnnnnnnnnnnnnnnnnnnnnnnnnnnnnnnnnnnnnnnnnnnnnnnnnnnnnnnnnnnnnnnnnnnnnnnnnnnnnnnnnnnnnnnnnnnnnnnnnnnnnnnnnnnnnnnnnnnnnnnnnnnnnnnnnnnnnnnnnnnnnnnnnnnnnnnnnnnnnnnnnnnnnnnnnnnnnnnnnnnnnnnnnnnnnnnnnnnnnnnnnnnnnnnnnnnnnnnnnnnnnnnnnnnnnnnnnnnnnnnnnnnnnnnnnnnnnnnnnnnnnnnnnnnnnnnnnnnnnnnnnnnnnnnnnnnnnnnnnnnnnnnnnnnnnnnnnnnnnnnnnnnnnnnnnnnnnnnnnnnnnnnnnnnnnnnnnnnnnnnnnnnnnnnnnnnnnnnnnnnnnnnnnnnnnnnnnnnnnnnnnnnnnnnnnnnnnnnnnnnnnnnnnnnnnnnnnnnnnnnnnnnnnnnnnnnnnnnnnnnnnnnnnnnnnnnnnnnnnnnnnnnnnnnnnnnnnnnnnnnnnnnnnnnnnnnnnnnnnnnnnnnnnnnnnnnnnnnnnnnnnnnnnnnnnnnnnnnnnnnnnnnnnnnnnnnnnnnnnnnnnnnnnnnnnnnnnnnnnnnnnnnnnnnnnnnnnnnnnnnnnnnnnnnnnnnnnnnnnnnnnnnnnnnnnnnnnnnnnnnnnnnnnnnnnnnnnnnnnnnnnnnnnnnnnnnnnnnnnnnnnnnnnnnnnnnnnnnnnnnnnnnnnnnnnnnnnnnnnnnnnnnnnnnnnnnnnnnnnnnnnnnnnnnnnnnnnnnnnnnnnnnnnnnnnnnnnnnnnnnnnnnnnnnnnnnnnnnnnnnnnnnnnnnnnnnnnnnnnnnnnnnnnnnnnnnnnnnnnnnnnnnnnnnnnnnnnnnnnnnnnnnnnnnnnnnnnnnnnnnnnnnnnnnnnnnnnnnnnnnnnnnnnnnnnnnnnnnnnnnnnnnnnnnnnnnnnnnnnnnnnnnnnnnnnnnnnnnnnnnnnnnnnnnnnnnnnnnnnnnnnnnnnnnnnnnnnnnnnnnnnnnnnnnnnnnnnnnnnnnnnnnnnnnnnnnnnnnnnnnnnnnnnnnnnnnnnnnnnnnnnnnnnnnnnnnnnnnnnnnnnnnnnnnnnnnnnnnnnnnnnnnnnnnnnnnnnnnnnnnnnnnnnnnnnnnnnnnnnnnnnnnnnnnnnnnnnnnnnnnnnnnnnnnnnnnnnnnnnnnnnnnnnnnnnnnnnnnnnnnnnnnnnnnnnnnnnnnnnnnnnnnnnnnnnnnnnnnnnnnnnnnnnnnnnnnnnnnnnnnnnnnnnnnnnnnnnnnnnnnnnnnnnnnnnnnnnnnnnnnnnnnnnnnnnnnnnnnnnnnnnnnnnnnnnnnnnnnnnnnnnnnnnnnnnnnnnnnnnnnnnnnnnnnnnnnnnnnnnnnnnnnnnnnnnnnnnnnnnnnnnnnnnnnnnnnnnnnnnnnnnnnnnnnnnnnnnnnnnnnnnnnnnnnnnnnnnnnnnnnnnnnnnnnnnnnnnnnnnnnnnnnnnnnnnnnnnnnnnnnnnnnnnnnnnnnnnnnnnnnnnnnnnnnnnnnnnnnnnnnnnnnnnnnnnnnnnnnnnnnnnnnnnnnnnnnnnnnnnnnnnnnnnnnnnnnnnnnnnnnnnnnnnnnnnnnnnnnnnnnnnnnnnnnnnnnnnnnnnnnnnnnnnnnnnnnnnnnnnnnnnnnnnnnnnnnnnnnnnnnnnnnnnnnnnnnnnnnnnnnnnnnnnnnnnnnnnnnnnnnnnnnnnnnnnnnnnnnnnnnnnnnnnnnnnnnnnnnnnnnnnnnnnnnnnnnnnnnnnnnnnnnnnnnnnnnnnnnnnnnnnnnnnnnnnnnnnnnnnnnnnnnnnnnnnnnnnnnnnnnnnnnnnnnnnnnnnnnnnnnnnnnnnnnnnnnnnnnnnnnnnnnnnnnnnnnnnnnnnnnnnnnnnnnnnnnnnnnnnnnnnnnnnnnnnnnnnnnnnnnnnnnnnnnnnnnnnnnnnnnnnnnnnnnnnnnnnnnnnnnnnnnnnnnnnnnnnnnnnnnnnnnnnnnnnnnnnnnnnnnnnnnnnnnnnnnnnnnnnnnnnnnnnnnnnnnnnnnnnnnnnnnnnnnnnnnnnnnnnnnnnnnnnnnnnnnnnnnnnnnnnnnnnnnnnnnnnnnnnnnnnnnnnnnnnnnnnnnnnnnnnnnnnnnnnnnnnnnnnnnnnnnnnnnnnnnnnnnnnnnnnnnnnnnnnnnnnnnnnnnnnnnnnnnnnnnnnnnnnnnnnnnnnnnnnnnnnnnnnnnnnnnnnnnnnnnnnnnnnnnnnnnnnnnnnnnnnnnnnnnnnnnnnnnnnnnnnnnnnnnnnnnnnnnnnnnnnnnnnnnnnnnnnnnnnnnnnnnnnnnnnnnnnnnnnnnnnnnnnnnnnnnnnnnnnnnnnnnnnnnnnnnnnnnnnnnnnnnnnnnnnnnnnnnnnnnnnnnnnnnnnnnnnnnnnnnnnnnnnnnnnnnnnnnnnnnnnnnnnnnnnnnnnnnnnnnnnnnnnnnnnnnnnnnnnnnnnnnnnnnnnnnnnnnnnnnnnnnnnnnnnnnnnnnnnnnnnnnnnnnnnnnnnnnnnnnnnnnnnnnnnnnnnnnnnnnnnnnnnnnnnnnnnnnnnnnnnnnnnnnnnnnnnnnnnnnnnnnnnnnnnnnnnnnnnnnnnnnnnnnnnnnnnnnnnnnnnnnnnnnnnnnnnnnnnnnnnnnnnnnnnnnnnnnnnnnnnnnnnnnnnnnnnnnnnnnnnnnnnnnnnnnnnnnnnnnnnnnnnnnnnnnnnnnnnnnnnnnnnnnnnnnnnnnnnnnnnnnnnnnnnnnnnnnnnnnnnnnnnnnnnnnnnnnnnnnnnnnnnnnnnnnnnnnnnnnnnnnnnnnnnnnnnnnnnnnnnnnnnnnnnnnnnnnnnnnnnnnnnnnnnnnnnnnnnnnnnnnnnnnnnnnnnnnnnnnnnnnnnnnnnnnnnnnnnnnnnnnnnnnnnnnnnnnnnnnnnnnnnnnnnnnnnnnnnnnnnnnnnnnnnnnnnnnnnnnnnnnnnnnnnnnnnnnnnnnnnnnnnnnnnnnnnnnnnnnnnnnnnnnnnnnnnnnnnnnnnnnnnnnnnnnnnnnnnnnnnnnnnnnnnnnnnnnnnnnnnnnnnnnnnnnnnnnnnnnnnnnnnnnnnnnnnnnnnnnnnnnnnnnnnnnnnnnnnnnnnnnnnnnnnnnnnnnnnnnnnnnnnnnnnnnnnnnnnnnnnnnnnnnnnnnnnnnnnnnnnnnnnnnnnnnnnnnnnnnnnnnnnnnnnnnnnnnnnnnnnnnnnnnnnnnnnnnnnnnnnnnnnnnnnnnnnnnnnnnnnnnnnnnnnnnnnnnnnnnnnnnnnnnnnnnnnnnnnnnnnnnnnnnnnnnnnnnnnnnnnnnnnnnnnnnnnnnnnnnnnnnnnnnnnnnnnnnnnnnnnnnnnnnnnnnnnnnnnnnnnnnnnnnnnnnnnnnnnnnnnnnnnnnnnnnnnnnnnnnnnnnnnnnnnnnnnnnnnnnnnnnnnnnnnnnnnnnnnnnnnnnnnnnnnnnnnnnnnnnnnnnnnnnnnnnnnnnnnnnnnnnnnnnnnnnnnnnnnnnnnnnnnnnnnnnnnnnnnnnnnnnnnnnnnnnnnnnnnnnnnnnnnnnnnnnnnnnnnnnnnnnnnnnnnnnnnnnnnnnnnnnnnnnnnnnnnnnnnnnnnnnnnnnnnnnnnnnnnnnnnnnnnnnnnnnnnnnnnnnnnnnnnnnnnnnnnnnnnnnnnnnnnnnnnnnnnnnnnnnnnnnnnnnnnnnnnnnnnnnnnnnnnnnnnnnnnnnnnnnnnnnnnnnnnnnnnnnnnnnnnnnnnnnnnnnnnnnnnnnnnnnnnnnnnnnnnnnnnnnnnnnnnnnnnnnnnnnnnnnnnnnnnnnnnnnnnnnnnnnnnnnnnnnnnnnnnnnnnnnnnnnnnnnnnnnnnnnnnnnnnnnnnnnnnnnnnnnnnnnnnnnnnnnnnnnnnnnnnnnnnnnnnnnnnnnnnnnnnnnnnnnnnnnnnnnnnnnnnnnnnnnnnnnnnnnnnnnnnnnnnnnnnnnnnnnnnnnnnnnnnnnnnnnnnnnnnnnnnnnnnnnnnnnnnnnnnnnnnnnnnnnnnnnnnnnnnnnnnnnnnnnnnnnnnnnnnnnnnnnnnnnnnnnnnnnnnnnnnnnnnnnnnnnnnnnnnnnnnnnnnnnnnnnnnnnnnnnnnnnnnnnnnnnnnnnnnnnnnnnnnnnnnnnnnnnnnnnnnnnnnnnnnnnnnnnnnnnnnnnnnnnnnnnnnnnnnnnnnnnnnnnnnnnnnnnnnnnnnnnnnnnnnnnnnnnnnnnnnnnnnnnnnnnnnnnnnnnnnnnnnnnnnnnnnnnnnnnnnnnnnnnnnnnnnnnnnnnnnnnnnnnnnnnnnnnnnnnnnnnnnnnnnnnnnnnnnnnnnnnnnnnnnnnnnnnnnnnnnnnnnnnnnnnnnnnnnnnnnnnnnnnnnnnnnnnnnnnnnnnnnnnnnnnnnnnnnnnnnnnnnnnnnnnnnnnnnnnnnnnnnnnnnnnnnnnnnnnnnnnnnnnnnnnnnnnnnnnnnnnnnnnnnnnnnnnnnnnnnnnnnnnnnnnnnnnnnnnnnnnnnnnnnnnnnnnnnnnnnnnnnnnnnnnnnnnnnnnnnnnnnnnnnnnnnnnnnnnnnnnnnnnnnnnnnnnnnnnnnnnnnnnnnnnnnnnnnnnnnnnnnnnnnnnnnnnnnnnnnnnnnnnnnnnnnnnnnnnnnnnnnnnnnnnnnnnnnnnnnnnnnnnnnnnnnnnnnnnnnnnnnnnnnnnnnnnnnnnnnnnnnnnnnnnnnnnnnnnnnnnnnnnnnnnnnnnnnnnnnnnnnnnnnnnnnnnnnnnnnnnnnnnnnnnnnnnnnnnnnnnnnnnnnnnnnnnnnnnnnnnnnnnnnnnnnnnnnnnnnnnnnnnnnnnnnnnnnnnnnnnnnnnnnnnnnnnnnnnnnnnnnnnnnnnnnnnnnnnnnnnnnnnnnnnnnnnnnnnnnnnnnnnnnnnnnnnnnnnnnnnnnnnnnnnnnnnnnnnnnnnnnnnnnnnnnnnnnnnnnnnnnnnnnnnnnnnnnnnnnnnnnnnnnnnnnnnnnnnnnnnnnnnnnnnnnnnnnnnnnnnnnnnnnnnnnnnnnnnnnnnnnnnnnnnnnnnnnnnnnnnnnnnnnnnnnnnnnnnnnnnnnnnnnnnnnnnnnnnnnnnnnnnnnnnnnnnnnnnnnnnnnnnnnnnnnnnnnnnnnnnnnnnnnnnnnnnnnnnnnnnnnnnnnnnnnnnnnnnnnnnnnnnnnnnnnnnnnnnnnnnnnnnnnnnnnnnnnnnnnnnnnnnnnnnnnnnnnnnnnnnnnnnnnnnnnnnnnnnnnnnnnnnnnnnnnnnnnnnnnnnnnnnnnnnnnnnnnnnnnnnnnnnnnnnnnnnnnnnnnnnnnnnnnnnnnnnnnnnnnnnnnnnnnnnnnnnnnnnnnnnnnnnnnnnnnnnnnnnnnnnnnnnnnnnnnnnnnnnnnnnnnnnnnnnnnnnnnnnnnnnnnnnnnnnnnnnnnnnnnnnnnnnnnnnnnnnnnnnnnnnnnnnnnnnnnnnnnnnnnnnnnnnnnnnnnnnnnnnnnnnnnnnnnnnnnnnnnnnnnnnnnnnnnnnnnnnnnnnnnnnnnnnnnnnnnnnnnnnnnnnnnnnnnnnnnnnnnnnnnnnnnnnnnnnnnnnnnnnnnnnnnnnnnnnnnnnnnnnnnnnnnnnnnnnnnnnnnnnnnnnnnnnnnnnnnnnnnnnnnnnnnnnnnnnnnnnnnnnnnnnnnnnnnnnnnnnnnnnnnnnnnnnnnnnnnnnnnnnnnnnnnnnnnnnnnnnnnnnnnnnnnnnnnnnnnnnnnnnnnnnnnnnnnnnnnnnnnnnnnnnnnnnnnnnnnnnnnnnnnnnnnnnnnnnnnnnnnnnnnnnnnnnnnnnnnnnnnnnnnnnnnnnnnnnnnnnnnnnnnnnnnnnnnnnnnnnnnnnnnnnnnnnnnnnnnnnnnnnnnnnnnnnnnnnnnnnnnnnnnnnnnnnnnnnnnnnnnnnnnnnnnnnnnnnnnnnnnnnnnnnnnnnnnnnnnnnnnnnnnnnnnnnnnnnnnnnnnnnnnnnnnnnnnnnnnnnnnnnnnnnnnnnnnnnnnnnnnnnnnnnnnnnnnnnnnnnnnnnnnnnnnnnnnnnnnnnnnnnnnnnnnnnnnnnnnnnnnnnnnnnnnnnnnnnnnnnnnnnnnnnnnnnnnnnnnnnnnnnnnnnnnnnnnnnnnnnnnnnnnnnnnnnnnnnnnnnnnnnnnnnnnnnnnnnnnnnnnnnnnnnnnnnnnnnnnnnnnnnnnnnnnnnnnnnnnnnnnnnnnnnnnnnnnnnnnnnnnnnnnnnnnnnnnnnnnnnnnnnnnnnnnnnnnnnnnnnnnnnnnnnnnnnnnnnnnnnnnnnnnnnnnnnnnnnnnnnnnnnnnnnnnnnnnnnnnnnnnnnnnnnnnnnnnnnnnnnnnnnnnnnnnnnnnnnnnnnnnnnnnnnnnnnnnnnnnnnnnnnnnnnnnnnnnnnnnnnnnnnnnnnnnnnnnnnnnnnnnnnnnnnnnnnnnnnnnnnnnnnnnnnnnnnnnnnnnnnnnnnnnnnnnnnnnnnnnnnnnnnnnnnnnnnnnnnnnnnnnnnnnnnnnnnnnnnnnnnnnnnnnnnnnnnnnnnnnnnnnnnnnnnnnnnnnnnnnnnnnnnnnnnnnnnnnnnnnnnnnnnnnnnnnnnnnnnnnnnnnnnnnnnnnnnnnnnnnnnnnnnnnnnnnnnnnnnnnnnnnnnnnnnnnnnnnnnnnnnnnnnnnnnnnnnnnnnnnnnnnnnnnnnnnnnnnnnnnnnnnnnnnnnnnnnnnnnnnnnnnnnnnnnnnnnnnnnnnnnnnnnnnnnnnnnnnnnnnnnnnnnnnnnnnnnnnnnnnnnnnnnnnnnnnnnnnnnnnnnnnnnnnnnnnnnnnnnnnnnnnnnnnnnnnnnnnnnnnnnnnnnnnnnnnnnnnnnnnnnnnnnnnnnnnnnnnnnnnnnnnnnnnnnnnnnnnnnnnnnnnnnnnnnnnnnnnnnnnnnnnnnnnnnnnnnnnnnnnnnnnnnnnnnnnnnnnnnnnnnnnnnnnnnnnnnnnnnnnnnnnnnnnnnnnnnnnnnnnnnnnnnnnnnnnnnnnnnnnnnnnnnnnnnnnnnnnnnnnnnnnnnnnnnnnnnnnnnnnnnnnnnnnnnnnnnnnnnnnnnnnnnnnnnnnnnnnnnnnnnnnnnnnnnnnnnnnnnnnnnnnnnnnnnnnnnnnnnnnnnnnnnnnnnnnnnnnnnnnnnnnnnnnnnnnnnnnnnnnnnnnnnnnnnnnnnnnnnnnnnnnnnnnnnnnnnnnnnnnnnnnnnnnnnnnnnnnnnnnnnnnnnnnnnnnnnnnnnnnnnnnnnnnnnnnnnnnnnnnnnnnnnnnnnnnnnnnnnnnnnnnnnnnnnnnnnnnnnnnnnnnnnnnnnnnnnnnnnnnnnnnnnnnnnnnnnnnnnnnnnnnnnnnnnnnnnnnnnnnnnnnnnnnnnnnnnnnnnnnnnnnnnnnnnnnnnnnnnnnnnnnnnnnnnnnnnnnnnnnnnnnnnnnnnnnnnnnnnnnnnnnnnnnnnnnnnnnnnnnnnnnnnnnnnnnnnnnnnnnnnnnnnnnnnnnnnnnnnnnnnnnnnnnnnnnnnnnnnnnnnnnnnnnnnnnnnnnnnnnnnnnnnnnnnnnnnnnnnnnnnnnnnnnnnnnnnnnnnnnnnnnnnnnnnnnnnnnnnnnnnnnnnnnnnnnnnnnnnnnnnnnnnnnnnnnnnnnnnnnnnnnnnnnnnnnnnnnnnnnnnnnnnnnnnnnnnnnnnnnnnnnnnnnnnnnnnnnnnnnnnnnnnnnnnnnnnnnnnnnnnnnnnnnnnnnnnnnnnnnnnnnnnnnnnnnnnnnnnnnnnnnnnnnnnnnnnnnnnnnnnnnnnnnnnnnnnnnnnnnnnnnnnnnnnnnnnnnnnnnnnnnnnnnnnnnnnnnnnnnnnnnnnnnnnnnnnnnnnnnnnnnnnnnnnnnnnnnnnnnnnnnnnnnnnnnnnnnnnnnnnnnnnnnnnnnnnnnnnnnnnnnnnnnnnnnnnnnnnnnnnnnnnnnnnnnnnnnnnnnnnnnnnnnnnnnnnnnnnnnnnnnnnnnnnnnnnnnnnnnnnnnnnnnnnnnnnnnnnnnnnnnnnnnnnnnnnnnnnnnnnnnnnnnnnnnnnnnnnnnnnnnnnnnnnnnnnnnnnnnnnnnnnnnnnnnnnnnnnnnnnnnnnnnnnnnnnnnnnnnnnnnnnnnnnnnnnnnnnnnnnnnnnnnnnnnnnnnnnnnnnnnnnnnnnnnnnnnnnnnnnnnnnnnnnnnnnnnnnnnnnnnnnnnnnnnnnnnnnnnnnnnnnnnnnnnnnnnnnnnnnnnnnnnnnnnnnnnnnnnnnnnnnnnnnnnnnnnnnnnnnnnnnnnnnnnnnnnnnnnnnnnnnnnnnnnnnnnnnnnnnnnnnnnnnnnnnnnnnnnnnnnnnnnnnnnnnnnnnnnnnnnnnnnnnnnnnnnnnnnnnnnnnnnnnnnnnnnnnnnnnnnnnnnnnnnnnnnnnnnnnnnnnnnnnnnnnnnnnnnnnnnnnnnnnnnnnnnnnnnnnnnnnnnnnnnnnnnnnnnnnnnnnnnnnnnnnnnnnnnnnnnnnnnnnnnnnnnnnnnnnnnnnnnnnnnnnnnnnnnnnnnnnnnnnnnnnnnnnnnnnnnnnnnnnnnnnnnnnnnnnnnnnnnnnnnnnnnnnnnnnnnnnnnnnnnnnnnnnnnnnnnnnnnnnnnnnnnnnnnnnnnnnnnnnnnnnnnnnnnnnnnnnnnnnnnnnnnnnnnnnnnnnnnnnnnnnnnnnnnnnnnnnnnnnnnnnnnnnnnnnnnnnnnnnnnnnnnnnnnnnnnnnnnnnnnnnnnnnnnnnnnnnnnnnnnnnnnnnnnnnnnnnnnnnnnnnnnnnnnnnnnnnnnnnnnnnnnnnnnnnnnnnnnnnnnnnnnnnnnnnnnnnnnnnnnnnnnnnnnnnnnnnnnnnnnnnnnnnnnnnnnnnnnnnnnnnnnnnnnnnnnnnnnnnnnnnnnnnnnnnnnnnnnnnnnnnnnnnnnnnnnnnnnnnnnnnnnnnnnnnnnnnnnnnnnnnnnnnnnnnnnnnnnnnnnnnnnnnnnnnnnnnnnnnnnnnnnnnnnnnnnnnnnnnnnnnnnnnnnnnnnnnnnnnnnnnnnnnnnnnnnnnnnnnnnnnnnnnnnnnnnnnnnnnnnnnnnnnnnnnnnnnnnnnnnnnnnnnnnnnnnnnnnnnnnnnnnnnnnnnnnnnnnnnnnnnnnnnnnnnnnnnnnnnnnnnnnnnnnnnnnnnnnnnnnnnnnnnnnnnnnnnnnnnnnnnnnnnnnnnnnnnnnnnnnnnnnnnnnnnnnnnnnnnnnnnnnnnnnnnnnnnnnnnnnnnnnnnnnnnnnnnnnnnnnnnnnnnnnnnnnnnnnnnnnnnnnnnnnnnnnnnnnnnnnnnnnnnnnnnnnnnnnnnnnnnnnnnnnnnnnnnnnnnnnnnnnnnnnnnnnnnnnnnnnnnnnnnnnnnnnnnnnnnnnnnnnnnnnnnnnnnnnnnnnnnnnnnnnnnnnnnnnnnnnnnnnnnnnnnnnnnnnnnnnnnnnnnnnnnnnnnnnnnnnnnnnnnnnnnnnnnnnnnnnnnnnnnnnnnnnnnnnnnnnnnnnnnnnnnnnnnnnnnnnnnnnnnnnnnnnnnnnnnnnnnnnnnnnnnnnnnnnnnnnnnnnnnnnnnnnnnnnnnnnnnnnnnnnnnnnnnnnnnnnnnnnnnnnnnnnnnnnnnnnnnnnnnnnnnnnnnnnnnnnnnnnnnnnnnnnnnnnnnnnnnnnnnnnnnnnnnnnnnnnnnnnnnnnnnnnnnnnnnnnnnnnnnnnnnnnnnnnnnnnnnnnnnnnnnnnnnnnnnnnnnnnnnnnnnnnnnnnnnnnnnnnnnnnnnnnnnnnnnnnnnnnnnnnnnnnnnnnnnnnnnnnnnnnnnnnnnnnnnnnnnnnnnnnnnnnnnnnnnnnnnnnnnnnnnnnnnnnnnnnnnnnnnnnnnnnnnnnnnnnnnnnnnnnnnnnnnnnnnnnnnnnnnnnnnnnnnnnnnnnnnnnnnnnnnnnnnnnnnnnnnnnnnnnnnnnnnnnnnnnnnnnnnnnnnnnnnnnnnnnnnnnnnnnnnnnnnnnnnnnnnnnnnnnnnnnnnnnnnnnnnnnnnnnnnnnnnnnnnnnnnnnnnnnnnnnnnnnnnnnnnnnnnnnnnnnnnnnnnnnnnnnnnnnnnnnnnnnnnnnnnnnnnnnnnnnnnnnnnnnnnnnnnnnnnnnnnnnnnnnnnnnnnnnnnnnnnnnnnnnnnnnnnnnnnnnnnnnnnnnnnnnnnnnnnnnnnnnnnnnnnnnnnnnnnnnnnnnnnnnnnnnnnnnnnnnnnnnnnnnnnnnnnnnnnnnnnnnnnnnnnnnnnnnnnnnnnnnnnnnnnnnnnnnnnnnnnnnnnnnnnnnnnnnnnnnnnnnnnnnnnnnnnnnnnnnnnnnnnnnnnnnnnnnnnnnnnnnnnnnnnnnnnnnnnnnnnnnnnnnnnnnnnnnnnnnnnnnnnnnnnnnnnnnnnnnnnnnnnnnnnnnnnnnnnnnnnnnnnnnnnnnnnnnnnnnnnnnnnnnnnnnnnnnnnnnnnnnnnnnnnnnnnnnnnnnnnnnnnnnnnnnnnnnnnnnnnnnnnnnnnnnnnnnnnnnnnnnnnnnnnnnnnnnnnnnnnnnnnnnnnnnnnnnnnnnnnnnnnnnnnnnnnnnnnnnnnnnnnnnnnnnnnnnnnnnnnnnnnnnnnnnnnnnnnnnnnnnnnnnnnnnnnnnnnnnnnnnnnnnnnnnnnnnnnnnnnnnnnnnnnnnnnnnnnnnnnnnnnnnnnnnnnnnnnnnnnnnnnnnnnnnnnnnnnnnnnnnnnnnnnnnnnnnnnnnnnnnnnnnnnnnnnnnnnnnnnnnnnnnnnnnnnnnnnnnnnnnnnnnnnnnnnnnnnnnnnnnnnnnnnnnnnnnnnnnnnnnnnnnnnnnnnnnnnnnnnnnnnnnnnnnnnnnnnnnnnnnnnnnnnnnnnnnnnnnnnnnnnnnnnnnnnnnnnnnnnnnnnnnnnnnnnnnnnnnnnnnnnnnnnnnnnnnnnnnnnnnnnnnnnnnnnnnnnnnnnnnnnnnnnnnnnnnnnnnnnnnnnnnnnnnnnnnnnnnnnnnnnnnnnnnnnnnnnnnnnnnnnnnnnnnnnnnnnnnnnnnnnnnnnnnnnnnnnnnnnnnnnnnnnnnnnnnnnnnnnnnnnnnnnnnnnnnnnnnnnnnnnnnnnnnnnnnnnnnnnnnnnnnnnnnnnnnnnnnnnnnnnnnnnnnnnnnnnnnnnnnnnnnnnnnnnnnnnnnnnnnnnnnnnnnnnnnnnnnnnnnnnnnnnnnnnnnnnnnnnnnnnnnnnnnnnnnnnnnnnnnnnnnnnnnnnnnnnnnnnnnnnnnnnnnnnnnnnnnnnnnnnnnnnnnnnnnnnnnnnnnnnnnnnnnnnnnnnnnnnnnnnnnnnnnnnnnnnnnnnnnnnnnnnnnnnnnnnnnnnnnnnnnnnnnnnnnnnnnnnnnnnnnnnnnnnnnnnnnnnnnnnnnnnnnnnnnnnnnnnnnnnnnnnnnnnnnnnnnnnnnnnnnnnnnnnnnnnnnnnnnnnnnnnnnnnnnnnnnnnnnnnnnnnnnnnnnnnnnnnnnnnnnnnnnnnnnnnnnnnnnnnnnnnnnnnnnnnnnnnnnnnnnnnnnnnnnnnnnnnnnnnnnnnnnnnnnnnnnnnnnnnnnnnnnnnnnnnnnnnnnnnnnnnnnnnnnnnnnnnnnnnnnnnnnnnnnnnnnnnnnnnnnnnnnnnnnnnnnnnnnnnnnnnnnnnnnnnnnnnnnnnnnnnnnnnnnnnnnnnnnnnnnnnnnnnnnnnnnnnnnnnnnnnnnnnnnnnnnnnnnnnnnnnnnnnnnnnnnnnnnnnnnnnnnnnnnnnnnnnnnnnnnnnnnnnnnnnnnnnnnnnnnnnnnnnnnnnnnnnnnnnnnnnnnnnnnnnnnnnnnnnnnnnnnnnnnnnnnnnnnnnnnnnnnnnnnnnnnnnnnnnnnnnnnnnnnnnnnnnnnnnnnnnnnnnnnnnnnnnnnnnnnnnnnnnnnnnnnnnnnnnnnnnnnnnnnnnnnnnnnnnnnnnnnnnnnnnnnnnnnnnnnnnnnnnnnnnnnnnnnnnnnnnnnnnnnnnnnnnnnnnnnnnnnnnnnnnnnnnnnnnnnnnnnnnnnnnnnnnnnnnnnnnnnnnnnnnnnnnnnnnnnnnnnnnnnnnnnnnnnnnnnnnnnnnnnnnnnnnnnnnnnnnnnnnnnnnnnnnnnnnnnnnnnnnnnnnnnnnnnnnnnnnnnnnnnnnnnnnnnnnnnnnnnnnnnnnnnnnnnnnnnnnnnnnnnnnnnnnnnnnnnnnnnnnnnnnnnnnnnnnnnnnnnnnnnnnnnnnnnnnnnnnnnnnnnnnnnnnnnnnnnnnnnnnnnnnnnnnnnnnnnnnnnnnnnnnnnnnnnnnnnnnnnnnnnnnnnnnnnnnnnnnnnnnnnnnnnnnnnnnnnnnnnnnnnnnnnnnnnnnnnnnnnnnnnnnnnnnnnnnnnnnnnnnnnnnnnnnnnnnnnnnnnnnnnnnnnnnnnnnnnnnnnnnnnnnnnnnnnnnnnnnnnnnnnnnnnnnnnnnnnnnnnnnnnnnnnnnnnnnnnnnnnnnnnnnnnnnnnnnnnnnnnnnnnnnnnnnnnnnnnnnnnnnnnnnnnnnnnnnnnnnnnnnnnnnnnnnnnnnnnnnnnnnnnnnnnnnnnnnnnnnnnnnnnnnnnnnnnnnnnnnnnnnnnnnnnnnnnnnnnnnnnnnnnnnnnnnnnnnnnnnnnnnnnnnnnnnnnnnnnnnnnnnnnnnnnnnnnnnnnnnnnnnnnnnnnnnnnnnnnnnnnnnnnnnnnnnnnnnnnnnnnnnnnnnnnnnnnnnnnnnnnnnnnnnnnnnnnnnnnnnnnnnnnnnnnnnnnnnnnnnnnnnnnnnnnnnnnnnnnnnnnnnnnnnnnnnnnnnnnnnnnnnnnnnnnnnnnnnnnnnnnnnnnnnnnnnnnnnnnnnnnnnnnnnnnnnnnnnnnnnnnnnnnnnnnnnnnnnnnnnnnnnnnnnnnnnnnnnnnnnnnnnnnnnnnnnnnnnnnnnnnnnnnnnnnnnnnnnnnnnnnnnnnnnnnnnnnnnnnnnnnnnnnnnnnnnnnnnnnnnnnnnnnnnnnnnnnnnnnnnnnnnnnnnnnnnnnnnnnnnnnnnnnnnnnnnnnnnnnnnnnnnnnnnnnnnnnnnnnnnnnnnnnnnnnnnnnnnnnnnnnnnnnnnnnnnnnnnnnnnnnnnnnnnnnnnnnnnnnnnnnnnnnnnnnnnnnnnnnnnnnnnnnnnnnnnnnnnnnnnnnnnnnnnnnnnnnnnnnnnnnnnnnnnnnnnnnnnnnnnnnnnnnnnnnnnnnnnnnnnnnnnnnnnnnnnnnnnnnnnnnnnnnnnnnnnnnnnnnnnnnnnnnnnnnnnnnnnnnnnnnnnnnnnnnnnnnnnnnnnnnnnnnnnnnnnnnnnnnnnnnnnnnnnnnnnnnnnnnnnnnnnnnnnnnnnnnnnnnnnnnnnnnnnnnnnnnnnnnnnnnnnnnnnnnnnnnnnnnnnnnnnnnnnnnnnnnnnnnnnnnnnnnnnnnnnnnnnnnnnnnnnnnnnnnnnnnnnnnnnnnnnnnnnnnnnnnnnnnnnnnnnnnnnnnnnnnnnnnnnnnnnnnnnnnnnnnnnnnnnnnnnnnnnnnnnnnnnnnnnnnnnnnnnnnnnnnnnnnnnnnnnnnnnnnnnnnnnnnnnnnnnnnnnnnnnnnnnnnnnnnnnnnnnnnnnnnnnnnnnnnnnnnnnnnnnnnnnnnnnnnnnnnnnnnnnnnnnnnnnnnnnnnnnnnnnnnnnnnnnnnnnnnnnnnnnnnnnnnnnnnnnnnnnnnnnnnnnnnnnnnnnnnnnnnnnnnnnnnnnnnnnnnnnnnnnnnnnnnnnnnnnnnnnnnnnnnnnnnnnnnnnnnnnnnnnnnnnnnnnnnnnnnnnnnnnnnnnnnnnnnnnnnnnnnnnnnnnnnnnnnnnnnnnnnnnnnnnnnnnnnnnnnnnnnnnnnnnnnnnnnnnnnnnnnnnnnnnnnnnnnnnnnnnnnnnnnnnnnnnnnnnnnnnnnnnnnnnnnnnnnnnnnnnnnnnnnnnnnnnnnnnnnnnnnnnnnnnnnnnnnnnnnnnnnnnnnnnnnnnnnnnnnnnnnnnnnnnnnnnnnnnnnnnnnnnnnnnnnnnnnnnnnnnnnnnnnnnnnnnnnnnnnnnnnnnnnnnnnnnnnnnnnnnnnnnnnnnnnnnnnnnnnnnnnnnnnnnnnnnnnnnnnnnnnnnnnnnnnnnnnnnnnnnnnnnnnnnnnnnnnnnnnnnnnnnnnnnnnnnnnnnnnnnnnnnnnnnnnnnnnnnnnnnnnnnnnnnnnnnnnnnnnnnnnnnnnnnnnnnnnnnnnnnnnnnnnnnnnnnnnnnnnnnnnnnnnnnnnnnnnnnnnnnnnnnnnnnnnnnnnnnnnnnnnnnnnnnnnnnnnnnnnnnnnnnnnnnnnnnnnnnnnnnnnnnnnnnnnnnnnnnnnnnnnnnnnnnnnnnnnnnnnnnnnnnnnnnnnnnnnnnnnnnnnnnnnnnnnnnnnnnnnnnnnnnnnnnnnnnnnnnnnnnnnnnnnnnnnnnnnnnnnnnnnnnnnnnnnnnnnnnnnnnnnnnnnnnnnnnnnnnnnnnnnnnnnnnnnnnnnnnnnnnnnnnnnnnnnnnnnnnnnnnnnnnnnnnnnnnnnnnnnnnnnnnnnnnnnnnnnnnnnnnnnnnnnnnnnnnnnnnnnnnnnnnnnnnnnnnnnnnnnnnnnnnnnnnnnnnnnnnnnnnnnnnnnnnnnnnnnnnnnnnnnnnnnnnnnnnnnnnnnnnnnnnnnnnnnnnnnnnnnnnnnnnnnnnnnnnnnnnnnnnnnnnnnnnnnnnnnnnnnnnnnnnnnnnnnnnnnnnnnnnnnnnnnnnnnnnnnnnnnnnnnnnnnnnnnnnnnnnnnnnnnnnnnnnnnnnnnnnnnnnnnnnnnnnnnnnnnnnnnnnnnnnnnnnnnnnnnnnnnnnnnnnnnnnnnnnnnnnnnnnnnnnnnnnnnnnnnnnnnnnnnnnnnnnnnnnnnnnnnnnnnnnnnnnnnnnnnnnnnnnnnnnnnnnnnnnnnnnnnnnnnnnnnnnnnnnnnnnnnnnnnnnnnnnnnnnnnnnnnnnnnnnnnnnnnnnnnnnnnnnnnnnnnnnnnnnnnnnnnnnnnnnnnnnnnnnnnnnnnnnnnnnnnnnnnnnnnnnnnnnnnnnnnnnnnnnnnnnnnnnnnnnnnnnnnnnnnnnnnnnnnnnnnnnnnnnnnnnnnnnnnnnnnnnnnnnnnnnnnnnnnnnnnnnnnnnnnnnnnnnnnnnnnnnnnnnnnnnnnnnnnnnnnnnnnnnnnnnnnnnnnnnnnnnnnnnnnnnnnnnnnnnnnnnnnnnnnnnnnnnnnnnnnnnnnnnnnnnnnnnnnnnnnnnnnnnnnnnnnnnnnnnnnnnnnnnnnnnnnnnnnnnnnnnnnnnnnnnnnnnnnnnnnnnnnnnnnnnnnnnnnnnnnnnnnnnnnnnnnnnnnnnnnnnnnnnnnnnnnnnnnnnnnnnnnnnnnnnnnnnnnnnnnnnnnnnnnnnnnnnnnnnnnnnnnnnnnnnnnnnnnnnnnnnnnnnnnnnnnnnnnnnnnnnnnnnnnnnnnnnnnnnnnnnnnnnnnnnnnnnnnnnnnnnnnnnnnnnnnnnnnnnnnnnnnnnnnnnnnnnnnnnnnnnnnnnnnnnnnnnnnnnnnnnnnnnnnnnnnnnnnnnnnnnnnnnnnnnnnnnnnnnnnnnnnnnnnnnnnnnnnnnnnnnnnnnnnnnnnnnnnnnnnnnnnnnnnnnnnnnnnnnnnnnnnnnnnnnnnnnnnnnnnnnnnnnnnnnnnnnnnnnnnnnnnnnnnnnnnnnnnnnnnnnnnnnnnnnnnnnnnnnnnnnnnnnnnnnnnnnnnnnnnnnnnnnnnnnnnnnnnnnnnnnnnnnnnnnnnnnnnnnnnnnnnnnnnnnnnnnnnnnnnnnnnnnnnnnnnnnnnnnnnnnnnnnnnnnnnnnnnnnnnnnnnnnnnnnnnnnnnnnnnnnnnnnnnnnnnnnnnnnnnnnnnnnnnnnnnnnnnnnnnnnnnnnnnnnnnnnnnnnnnnnnnnnnnnnnnnnnnnnnnnnnnnnnnnnnnnnnnnnnnnnnnnnnnnnnnnnnnnnnnnnnnnnnnnnnnnnnnnnnnnnnnnnnnnnnnnnnnnnnnnnnnnnnnnnnnnnnnnnnnnnnnnnnnnnnnnnnnnnnnnnnnnnnnnnnnnnnnnnnnnnnnnnnnnnnnnnnnnnnnnnnnnnnnnnnnnnnnnnnnnnnnnnnnnnnnnnnnnnnnnnnnnnnnnnnnnnnnnnnnnnnnnnnnnnnnnnnnnnnnnnnnnnnnnnnnnnnnnnnnnnnnnnnnnnnnnnnnnnnnnnnnnnnnnnnnnnnnnnnnnnnnnnnnnnnnnnnnnnnnnnnnnnnnnnnnnnnnnnnnnnnnnnnnnnnnnnnnnnnnnnnnnnnnnnnnnnnnnnnnnnnnnnnnnnnnnnnnnnnnnnnnnnnnnnnnnnnnnnnnnnnnnnnnnnnnnnnnnnnnnnnnnnnnnnnnnnnnnnnnnnnnnnnnnnnnnnnnnnnnnnnnnnnnnnnnnnnnnnnnnnnnnnnnnnnnnnnnnnnnnnnnnnnnnnnnnnnnnnnnnnnnnnnnnnnnnnnnnnnnnnnnnnnnnnnnnnnnnnnnnnnnnnnnnnnnnnnnnnnnnnnnnnnnnnnnnnnnnnnnnnnnnnnnnnnnnnnnnnnnnnnnnnnnnnnnnnnnnnnnnnnnnnnnnnnnnnnnnnnnnnnnnnnnnnnnnnnnnnnnnnnnnnnnnnnnnnnnnnnnnnnnnnnnnnnnnnnnnnnnnnnnnnnnnnnnnnnnnnnnnnnnnnnnnnnnnnnnnnnnnnnnnnnnnnnnnnnnnnnnnnnnnnnnnnnnnnnnnnnnnnnnnnnnnnnnnnnnnnnnnnnnnnnnnnnnnnnnnnnnnnnnnnnnnnnnnnnnnnnnnnnnnnnnnnnnnnnnnnnnnnnnnnnnnnnnnnnnnnnnnnnnnnnnnnnnnnnnnnnnnnnnnnnnnnnnnnnnnnnnnnnnnnnnnnnnnnnnnnnnnnnnnnnnnnnnnnnnnnnnnnnnnnnnnnnnnnnnnnnnnnnnnnnnnnnnnnnnnnnnnnnnnnnnnnnnnnnnnnnnnnnnnnnnnnnnnnnnnnnnnnnnnnnnnnnnnnnnnnnnnnnnnnnnnnnnnnnnnnnnnnnnnnnnnnnnnnnnnnnnnnnnnnnnnnnnnnnnnnnnnnnnnnnnnnnnnnnnnnnnnnnnnnnnnnnnnnnnnnnnnnnnnnnnnnnnnnnnnnnnnnnnnnnnnnnnnnnnnnnnnnnnnnnnnnnnnnnnnnnnnnnnnnnnnnnnnnnnnnnnnnnnnnnnnnnnnnnnnnnnnnnnnnnnnnnnnnnnnnnnnnnnnnnnnnnnnnnnnnnnnnnnnnnnnnnnnnnnnnnnnnnnnnnnnnnnnnnnnnnnnnnnnnnnnnnnnnnnnnnnnnnnnnnnnnnnnnnnnnnnnnnnnnnnnnnnnnnnnnnnnnnnnnnnnnnnnnnnnnnnnnnnnnnnnnnnnnnnnnnnnnnnnnnnnnnnnnnnnnnnnnnnnnnnnnnnnnnnnnnnnnnnnnnnnnnnnnnnnnnnnnnnnnnnnnnnnnnnnnnnnnnnnnnnnnnnnnnnnnnnnnnnnnnnnnnnnnnnnnnnnnnnnnnnnnnnnnnnnnnnnnnnnnnnnnnnnnnnnnnnnnnnnnnnnnnnnnnnnnnnnnnnnnnnnnnnnnnnnnnnnnnnnnnnnnnnnnnnnnnnnnnnnnnnnnnnnnnnnnnnnnnnnnnnnnnnnnnnnnnnnnnnnnnnnnnnnnnnnnnnnnnnnnnnnnnnnnnnnnnnnnnnnnnnnnnnnnnnnnnnnnnnnnnnnnnnnnnnnnnnnnnnnnnnnnnnnnnnnnnnnnnnnnnnnnnnnnnnnnnnnnnnnnnnnnnnnnnnnnnnnnnnnnnnnnnnnnnnnnnnnnnnnnnnnnnnnnnnnnnnnnnnnnnnnnnnnnnnnnnnnnnnnnnnnnnnnnnnnnnnnnnnnnnnnnnnnnnnnnnnnnnnnnnnnnnnnnnnnnnnnnnnnnnnnnnnnnnnnnnnnnnnnnnnnnnnnnnnnnnnnnnnnnnnnnnnnnnnnnnnnnnnnnnnnnnnnnnnnnnnnnnnnnnnnnnnnnnnnnnnnnnnnnnnnnnnnnnnnnnnnnnnnnnnnnnnnnnnnnnnnnnnnnnnnnnnnnnnnnnnnnnnnnnnnnnnnnnnnnnnnnnnnnnnnnnnnnnnnnnnnnnnnnnnnnnnnnnnnnnnnnnnnnnnnnnnnnnnnnnnnnnnnnnnnnnnnnnnnnnnnnnnnnnnnnnnnnnnnnnnnnnnnnnnnnnnnnnnnnnnnnnnnnnnnnnnnnnnnnnnnnnnnnnnnnnnnnnnnnnnnnnnnnnnnnnnnnnnnnnnnnnnnnnnnnnnnnnnnnnnnnnnnnnnnnnnnnnnnnnnnnnnnnnnnnnnnnnnnnnnnnnnnnnnnnnnnnnnnnnnnnnnnnnnnnnnnnnnnnnnnnnnnnnnnnnnnnnnnnnnnnnnnnnnnnnnnnnnnnnnnnnnnnnnnnnnnnnnnnnnnnnnnnnnnnnnnnnnnnnnnnnnnnnnnnnnnnnnnnnnnnnnnnnnnnnnnnnnnnnnnnnnnnnnnnnnnnnnnnnnnnnnnnnnnnnnnnnnnnnnnnnnnnnnnnnnnnnnnnnnnnnnnnnnnnnnnnnnnnnnnnnnnnnnnnnnnnnnnnnnnnnnnnnnnnnnnnnnnnnnnnnnnnnnnnnnnnnnnnnnnnnnnnnnnnnnnnnnnnnnnnnnnnnnnnnnnnnnnnnnnnnnnnnnnnnnnnnnnnnnnnnnnnnnnnnnnnnnnnnnnnnnnnnnnnnnnnnnnnnnnnnnnnnnnnnnnnnnnnnnnnnnnnnnnnnnnnnnnnnnnnnnnnnnnnnnnnnnnnnnnnnnnnnnnnnnnnnnnnnnnnnnnnnnnnnnnnnnnnnnnnnnnnnnnnnnnnnnnnnnnnnnnnnnnnnnnnnnnnnnnnnnnnnnnnnnnnnnnnnnnnnnnnnnnnnnnnnnnnnnnnnnnnnnnnnnnnnnnnnnnnnnnnnnnnnnnnnnnnnnnnnnnnnnnnnnnnnnnnnnnnnnnnnnnnnnnnnnnnnnnnnnnnnnnnnnnnnnnnnnnnnnnnnnnnnnnnnnnnnnnnnnnnnnnnnnnnnnnnnnnnnnnnnnnnnnnnnnnnnnnnnnnnnnnnnnnnnnnnnnnnnnnnnnnnnnnnnnnnnnnnnnnnnnnnnnnnnnnnnnnnnnnnnnnnnnnnnnnnnnnnnnnnnnnnnnnnnnnnnnnnnnnnnnnnnnnnnnnnnnnnnnnnnnnnnnnnnnnnnnnnnnnnnnnnnnnnnnnnnnnnnnnnnnnnnnnnnnnnnnnnnnnnnnnnnnnnnnnnnnnnnnnnnnnnnnnnnnnnnnnnnnnnnnnnnnnnnnnnnnnnnnnnnnnnnnnnnnnnnnnnnnnnnnnnnnnnnnnnnnnnnnnnnnnnnnnnnnnnnnnnnnnnnnnnnnnnnnnnnnnnnnnnnnnnnnnnnnnnnnnnnnnnnnnnnnnnnnnnnnnnnnnnnnnnnnnnnnnnnnnnnnnnnnnnnnnnnnnnnnnnnnnnnnnnnnnnnnnnnnnnnnnnnnnnnnnnnnnnnnnnnnnnnnnnnnnnnnnnnnnnnnnnnnnnnnnnnnnnnnnnnnnnnnnnnnnnnnnnnnnnnnnnnnnnnnnnnnnnnnnnnnnnnnnnnnnnnnnnnnnnnnnnnnnnnnnnnnnnnnnnnnnnnnnnnnnnnnnnnnnnnnnnnnnnnnnnnnnnnnnnnnnnnnnnnnnnnnnnnnnnnnnnnnnnnnnnnnnnnnnnnnnnnnnnnnnnnnnnnnnnnnnnnnnnnnnnnnnnnnnnnnnnnnnnnnnnnnnnnnnnnnnnnnnnnnnnnnnnnnnnnnnnnnnnnnnnnnnnnnnnnnnnnnnnnnnnnnnnnnnnnnnnnnnnnnnnnnnnnnnnnnnnnnnnnnnnnnnnnnnnnnnnnnnnnnnnnnnnnnnnnnnnnnnnnnnnnnnnnnnnnnnnnnnnnnnnnnnnnnnnnnnnnnnnnnnnnnnnnnnnnnnnnnnnnnnnnnnnnnnnnnnnnnnnnnnnnnnnnnnnnnnnnnnnnnnnnnnnnnnnnnnnnnnnnnnnnnnnnnnnnnnnnnnnnnnnnnnnnnnnnnnnnnnnnnnnnnnnnnnnnnnnnnnnnnnnnnnnnnnnnnnnnnnnnnnnnnnnnnnnnnnnnnnnnnnnnnnnnnnnnnnnnnnnnnnnnnnnnnnnnnnnnnnnnnnnnnnnnnnnnnnnnnnnnnnnnnnnnnnnnnnnnnnnnnnnnnnnnnnnnnnnnnnnnnnnnnnnnnnnnnnnnnnnnnnnnnnnnnnnnnnnnnnnnnnnnnnnnnnnnnnnnnnnnnnnnnnnnnnnnnnnnnnnnnnnnnnnnnnnnnnnnnnnnnnnnnnnnnnnnnnnnnnnnnnnnnnnnnnnnnnnnnnnnnnnnnnnnnnnnnnnnnnnnnnnnnnnnnnnnnnnnnnnnnnnnnnnnnnnnnnnnnnnnnnnnnnnnnnnnnnnnnnnnnnnnnnnnnnnnnnnnnnnnnnnnnnnnnnnnnnnnnnnnnnnnnnnnnnnnnnnnnnnnnnnnnnnnnnnnnnnnnnnnnnnnnnnnnnnnnnnnnnnnnnnnnnnnnnnnnnnnnnnnnnnnnnnnnnnnnnnnnnnnnnnnnnnnnnnnnnnnnnnnnnnnnnnnnnnnnnnnnnnnnnnnnnnnnnnnnnnnnnnnnnnnnnnnnnnnnnnnnnnnnnnnnnnnnnnnnnnnnnnnnnnnnnnnnnnnnnnnnnnnnnnnnnnnnnnnnnnnnnnnnnnnnnnnnnnnnnnnnnnnnnnnnnnnnnnnnnnnnnnnnnnnnnnnnnnnnnnnnnnnnnnnnnnnnnnnnnnnnnnnnnnnnnnnnnnnnnnnnnnnnnnnnnnnnnnnnnnnnnnnnnnnnnnnnnnnnnnnnnnnnnnnnnnnnnnnnnnnnnnnnnnnnnnnnnnnnnnnnnnnnnnnnnnnnnnnnnnnnnnnnnnnnnnnnnnnnnnnnnnnnnnnnnnnnnnnnnnnnnnnnnnnnnnnnnnnnnnnnnnnnnnnnnnnnnnnnnnnnnnnnnnnnnnnnnnnnnnnnnnnnnnnnnnnnnnnnnnnnnnnnnnnnnnnnnnnnnnnnnnnnnnnnnnnnnnnnnnnnnnnnnnnnnnnnnnnnnnnnnnnnnnnnnnnnnnnnnnnnnnnnnnnnnnnnnnnnnnnnnnnnnnnnnnnnnnnnnnnnnnnnnnnnnnnnnnnnnnnnnnnnnnnnnnnnnnnnnnnnnnnnnnnnnnnnnnnnnnnnnnnnnnnnnnnnnnnnnnnnnnnnnnnnnnnnnnnnnnnnnnnnnnnnnnnnnnnnnnnnnnnnnnnnnnnnnnnnnnnnnnnnnnnnnnnnnnnnnnnnnnnnnnnnnnnnnnnnnnnnnnnnnnnnnnnnnnnnnnnnnnnnnnnnnnnnnnnnnnnnnnnnnnnnnnnnnnnnnnnnnnnnnnnnnnnnnnnnnnnnnnnnnnnnnnnnnnnnnnnnnnnnnnnnnnnnnnnnnnnnnnnnnnnnnnnnnnnnnnnnnnnnnnnnnnnnnnnnnnnnnnnnnnnnnnnnnnnnnnnnnnnnnnnnnnnnnnnnnnnnnnnnnnnnnnnnnnnnnnnnnnnnnnnnnnnnnnnnnnnnnnnnnnnnnnnnnnnnnnnnnnnnnnnnnnnnnnnnnnnnnnnnnnnnnnnnnnnnnnnnnnnnnnnnnnnnnnnnnnnnnnnnnnnnnnnnnnnnnnnnnnnnnnnnnnnnnnnnnnnnnnnnnnnnnnnnnnnnnnnnnnnnnnnnnnnnnnnnnnnnnnnnnnnnnnnnnnnnnnnnnnnnnnnnnnnnnnnnnnnnnnnnnnnnnnnnnnnnnnnnnnnnnnnnnnnnnnnnnnnnnnnnnnnnnnnnnnnnnnnnnnnnnnnnnnnnnnnnnnnnnnnnnnnnnnnnnnnnnnnnnnnnnnnnnnnnnnnnnnnnnnnnnnnnnnnnnnnnnnnnnnnnnnnnnnnnnnnnnnnnnnnnnnnnnnnnnnnnnnnnnnnnnnnnnnnnnnnnnnnnnnnnnnnnnnnnnnnnnnnnnnnnnnnnnnnnnnnnnnnnnnnnnnnnnnnnnnnnnnnnnnnnnnnnnnnnnnnnnnnnnnnnnnnnnnnnnnnnnnnnnnnnnnnnnnnnnnnnnnnnnnnnnnnnnnnnnnnnnnnnnnnnnnnnnnnnnnnnnnnnnnnnnnnnnnnnnnnnnnnnnnnnnnnnnnnnnnnnnnnnnnnnnnnnnnnnnnnnnnnnnnnnnnnnnnnnnnnnnnnnnnnnnnnnnnnnnnnnnnnnnnnnnnnnnnnnnnnnnnnnnnnnnnnnnnnnnnnnnnnnnnnnnnnnnnnnnnnnnnnnnnnnnnnnnnnnnnnnnnnnnnnnnnnnnnnnnnnnnnnnnnnnnnnnnnnnnnnnnnnnnnnnnnnnnnnnnnnnnnnnnnnnnnnnnnnnnnnnnnnnnnnnnnnnnnnnnnnnnnnnnnnnnnnnnnnnnnnnnnnnnnnnnnnnnnnnnnnnnnnnnnnnnnnnnnnnnnnnnnnnnnnnnnnnnnnnnnnnnnnnnnnnnnnnnnnnnnnnnnnnnnnnnnnnnnnnnnnnnnnnnnnnnnnnnnnnnnnnnnnnnnnnnnnnnnnnnnnnnnnnnnnnnnnnnnnnnnnnnnnnnnnnnnnnnnnnnnnnnnnnnnnnnnnnnnnnnnnnnnnnnnnnnnnnnnnnnnnnnnnnnnnnnnnnnnnnnnnnnnnnnnnnnnnnnnnnnnnnnnnnnnnnnnnnnnnnnnnnnnnnnnnnnnnnnnnnnnnnnnnnnnnnnnnnnnnnnnnnnnnnnnnnnnnnnnnnnnnnnnnnnnnnnnnnnnnnnnnnnnnnnnnnnnnnnnnnnnnnnnnnnnnnnnnnnnnnnnnnnnnnnnnnnnnnnnnnnnnnnnnnnnnnnnnnnnnnnnnnnnnnnnnnnnnnnnnnnnnnnnnnnnnnnnnnnnnnnnnnnnnnnnnnnnnnnnnnnnnnnnnnnnnnnnnnnnnnnnnnnnnnnnnnnnnnnnnnnnnnnnnnnnnnnnnnnnnnnnnnnnnnnnnnnnnnnnnnnnnnnnnnnnnnnnnnnnnnnnnnnnnnnnnnnnnnnnnnnnnnnnnnnnnnnnnnnnnnnnnnnnnnnnnnnnnnnnnnnnnnnnnnnnnnnnnnnnnnnnnnnnnnnnnnnnnnnnnnnnnnnnnnnnnnnnnnnnnnnnnnnnnnnnnnnnnnnnnnnnnnnnnnnnnnnnnnnnnnnnnnnnnnnnnnnnnnnnnnnnnnnnnnnnnnnnnnnnnnnnnnnnnnnnnnnnnnnnnnnnnnnnnnnnnnnnnnnnnnnnnnnnnnnnnnnnnnnnnnnnnnnnnnnnnnnnnnnnnnnnnnnnnnnnnnnnnnnnnnnnnnnnnnnnnnnnnnnnnnnnnnnnnnnnnnnnnnnnnnnnnnnnnnnnnnnnnnnnnnnnnnnnnnnnnnnnnnnnnnnnnnnnnnnnnnnnnnnnnnnnnnnnnnnnnnnnnnnnnnnnnnnnnnnnnnnnnnnnnnnnnnnnnnnnnnnnnnnnnnnnnnnnnnnnnnnnnnnnnnnnnnnnnnnnnnnnnnnnnnnnnnnnnnnnnnnnnnnnnnnnnnnnnnnnnnnnnnnnnnnnnnnnnnnnnnnnnnnnnnnnnnnnnnnnnnnnnnnnnnnnnnnnnnnnnnnnnnnnnnnnnnnnnnnnnnnnnnnnnnnnnnnnnnnnnnnnnnnnnnnnnnnnnnnnnnnnnnnnnnnnnnnnnnnnnnnnnnnnnnnnnnnnnnnnnnnnnnnnnnnnnnnnnnnnnnnnnnnnnnnnnnnnnnnnnnnnnnnnnnnnnnnnnnnnnnnnnnnnnnnnnnnnnnnnnnnnnnnnnnnnnnnnnnnnnnnnnnnnnnnnnnnnnnnnnnnnnnnnnnnnnnnnnnnnnnnnnnnnnnnnnnnnnnnnnnnnnnnnnnnnnnnnnnnnnnnnnnnnnnnnnnnnnnnnnnnnnnnnnnnnnnnnnnnnnnnnnnnnnnnnnnnnnnnnnnnnnnnnnnnnnnnnnnnnnnnnnnnnnnnnnnnnnnnnnnnnnnnnnnnnnnnnnnnnnnnnnnnnnnnnnnnnnnnnnnnnnnnnnnnnnnnnnnnnnnnnnnnnnnnnnnnnnnnnnnnnnnnnnnnnnnnnnnnnnnnnnnnnnnnnnnnnnnnnnnnnnnnnnnnnnnnnnnnnnnnnnnnnnnnnnnnnnnnnnnnnnnnnnnnnnnnnnnnnnnnnnnnnnnnnnnnnnnnnnnnnnnnnnnnnnnnnnnnnnnnnnnnnnnnnnnnnnnnnnnnnnnnnnnnnnnnnnnnnnnnnnnnnnnnnnnnnnnnnnnnnnnnnnnnnnnnnnnnnnnnnnnnnnnnnnnnnnnnnnnnnnnnnnnnnnnnnnnnnnnnnnnnnnnnnnnnnnnnnnnnnnnnnnnnnnnnnnnnnnnnnnnnnnnnnnnnnnnnnnnnnnnnnnnnnnnnnnnnnnnnnnnnnnnnnnnnnnnnnnnnnnnnnnnnnnnnnnnnnnnnnnnnnnnnnnnnnnnnnnnnnnnnnnnnnnnnnnnnnnnnnnnnnnnnnnnnnnnnnnnnnnnnnnnnnnnnnnnnnnnnnnnnnnnnnnnnnnnnnnnnnnnnnnnnnnnnnnnnnnnnnnnnnnnnnnnnnnnnnnnnnnnnnnnnnnnnnnnnnnnnnnnnnnnnnnnnnnnnnnnnnnnnnnnnnnnnnnnnnnnnnnnnnnnnnnnnnnnnnnnnnnnnnnnnnnnnnnnnnnnnnnnnnnnnnnnnnnnnnnnnnnnnnnnnnnnnnnnnnnnnnnnnnnnnnnnnnnnnnnnnnnnnnnnnnnnnnnnnnnnnnnnnnnnnnnnnnnnnnnnnnnnnnnnnnnnnnnnnnnnnnnnnnnnnnnnnnnnnnnnnnnnnnnnnnnnnnnnnnnnnnnnnnnnnnnnnnnnnnnnnnnnnnnnnnnnnnnnnnnnnnnnnnnnnnnnnnnnnnnnnnnnnnnnnnnnnnnnnnnnnnnnnnnnnnnnnnnnnnnnnnnnnnnnnnnnnnnnnnnnnnnnnnnnnnnnnnnnnnnnnnnnnnnnnnnnnnnnnnnnnnnnnnnnnnnnnnnnnnnnnnnnnnnnnnnnnnnnnnnnnnnnnnnnnnnnnnnnnnnnnnnnnnnnnnnnnnnnnnnnnnnnnnnnnnnnnnnnnnnnnnnnnnnnnnnnnnnnnnnnnnnnnnnnnnnnnnnnnnnnnnnnnnnnnnnnnnnnnnnnnnnnnnnnnnnnnnnnnnnnnnnnnnnnnnnnnnnnnnnnnnnnnnnnnnnnnnnnnnnnnnnnnnnnnnnnnnnnnnnnnnnnnnnnnnnnnnnnnnnnnnnnnnnnnnnnnnnnnnnnnnnnnnnnnnnnnnnnnnnnnnnnnnnnnnnnnnnnnnnnnnnnnnnnnnnnnnnnnnnnnnnnnnnnnnnnnnnnnnnnnnnnnnnnnnnnnnnnnnnnnnnnnnnnnnnnnnnnnnnnnnnnnnnnnnnnnnnnnnnnnnnnnnnnnnnnnnnnnnnnnnnnnnnnnnnnnnnnnnnnnnnnnnnnnnnnnnnnnnnnnnnnnnnnnnnnnnnnnnnnnnnnnnnnnnnnnnnnnnnnnnnnnnnnnnnnnnnnnnnnnnnnnnnnnnnnnnnnnnnnnnnnnnnnnnnnnnnnnnnnnnnnnnnnnnnnnnnnnnnnnnnnnnnnnnnnnnnnnnnnnnnnnnnnnnnnnnnnnnnnnnnnnnnnnnnnnnnnnnnnnnnnnnnnnnnnnnnnnnnnnnnnnnnnnnnnnnnnnnnnnnnnnnnnnnnnnnnnnnnnnnnnnnnnnnnnnnnnnnnnnnnnnnnnnnnnnnnnnnnnnnnnnnnnnnnnnnnnnnnnnnnnnnnnnnnnnnnnnnnnnnnnnnnnnnnnnnnnnnnnnnnnnnnnnnnnnnnnnnnnnnnnnnnnnnnnnnnnnnnnnnnnnnnnnnnnnnnnnnnnnnnnnnnnnnnnnnnnnnnnnnnnnnnnnnnnnnnnnnnnnnnnnnnnnnnnnnnnnnnnnnnnnnnnnnnnnnnnnnnnnnnnnnnnnnnnnnnnnnnnnnnnnnnnnnnnnnnnnnnnnnnnnnnnnnnnnnnnnnnnnnnnnnnnnnnnnnnnnnnnnnnnnnnnnnnnnnnnnnnnnnnnnnnnnnnnnnnnnnnnnnnnnnnnnnnnnnnnnnnnnnnnnnnnnnnnnnnnnnnnnnnnnnnnnnnnnnnnnnnnnnnnnnnnnnnnnnnnnnnnnnnnnnnnnnnnnnnnnnnnnnnnnnnnnnnnnnnnnnnnnnnnnnnnnnnnnnnnnnnnnnnnnnnnnnnnnnnnnnnnnnnnnnnnnnnnnnnnnnnnnnnnnnnnnnnnnnnnnnnnnnnnnnnnnnnnnnnnnnnnnnnnnnnnnnnnnnnnnnnnnnnnnnnnnnnnnnnnnnnnnnnnnnnnnnnnnnnnnnnnnnnnnnnnnnnnnnnnnnnnnnnnnnnnnnnnnnnnnnnnnnnnnnnnnnnnnnnnnnnnnnnnnnnnnnnnnnnnnnnnnnnnnnnnnnnnnnnnnnnnnnnnnnnnnnnnnnnnnnnnnnnnnnnnnnnnnnnnnnnnnnnnnnnnnnnnnnnnnnnnnnnnnnnnnnnnnnnnnnnnnnnnnnnnnnnnnnnnnnnnnnnnnnnnnnnnnnnnnnnnnnnnnnnnnnnnnnnnnnnnnnnnnnnnnnnnnnnnnnnnnnnnnnnnnnnnnnnnnnnnnnnnnnnnnnnnnnnnnnnnnnnnnnnnnnnnnnnnnnnnnnnnnnnnnnnnnnnnnnnnnnnnnnnnnnnnnnnnnnnnnnnnnnnnnnnnnnnnnnnnnnnnnnnnnnnnnnnnnnnnnnnnnnnnnnnnnnnnnnnnnnnnnnnnnnnnnnnnnnnnnnnnnnnnnnnnnnnnnnnnnnnnnnnnnnnnnnnnnnnnnnnnnnnnnnnnnnnnnnnnnnnnnnnnnnnnnnnnnnnnnnnnnnnnnnnnnnnnnnnnnnnnnnnnnnnnnnnnnnnnnnnnnnnnnnnnnnnnnnnnnnnnnnnnnnnnnnnnnnnnnnnnnnnnnnnnnnnnnnnnnnnnnnnnnnnnnnnnnnnnnnnnnnnnnnnnnnnnnnnnnnnnnnnnnnnnnnnnnnnnnnnnnnnnnnnnnnnnnnnnnnnnnnnnnnnnnnnnnnnnnnnnnnnnnnnnnnnnnnnnnnnnnnnnnnnnnnnnnnnnnnnnnnnnnnnnnnnnnnnnnnnnnnnnnnnnnnnnnnnnnnnnnnnnnnnnnnnnnnnnnnnnnnnnnnnnnnnnnnnnnnnnnnnnnnnnnnnnnnnnnnnnnnnnnnnnnnnnnnnnnnnnnnnnnnnnnnnnnnnnnnnnnnnnnnnnnnnnnnnnnnnnnnnnnnnnnnnnnnnnnnnnnnnnnnnnnnnnnnnnnnnnnnnnnnnnnnnnnnnnnnnnnnnnnnnnnnnnnnnnnnnnnnnnnnnnnnnnnnnnnnnnnnnnnnnnnnnnnnnnnnnnnnnnnnnnnnnnnnnnnnnnnnnnnnnnnnnnnnnnnnnnnnnnnnnnnnnnnnnnnnnnnnnnnnnnnnnnnnnnnnnnnnnnnnnnnnnnnnnnnnnnnnnnnnnnnnnnnnnnnnnnnnnnnnnnnnnnnnnnnnnnnnnnnnnnnnnnnnnnnnnnnnnnnnnnnnnnnnnnnnnnnnnnnnnnnnnnnnnnnnnnnnnnnnnnnnnnnnnnnnnnnnnnnnnnnnnnnnnnnnnnnnnnnnnnnnnnnnnnnnnnnnnnnnnnnnnnnnnnnnnnnnnnnnnnnnnnnnnnnnnnnnnnnnnnnnnnnnnnnnnnnnnnnnnnnnnnnnnnnnnnnnnnnnnnnnnnnnnnnnnnnnnnnnnnnnnnnnnnnnnnnnnnnnnnnnnnnnnnnnnnnnnnnnnnnnnnnnnnnnnnnnnnnnnnnnnnnnnnnnnnnnnnnnnnnnnnnnnnnnnnnnnnnnnnnnnnnnnnnnnnnnnnnnnnnnnnnnnnnnnnnnnnnnnnnnnnnnnnnnnnnnnnnnnnnnnnnnnnnnnnnnnnnnnnnnnnnnnnnnnnnnnnnnnnnnnnnnnnnnnnnnnnnnnnnnnnnnnnnnnnnnnnnnnnnnnnnnnnnnnnnnnnnnnnnnnnnnnnnnnnnnnnnnnnnnnnnnnnnnnnnnnnnnnnnnnnnnnnnnnnnnnnnnnnnnnnnnnnnnnnnnnnnnnnnnnnnnnnnnnnnnnnnnnnnnnnnnnnnnnnnnnnnnnnnnnnnnnnnnnnnnnnnnnnnnnnnnnnnnnnnnnnnnnnnnnnnnnnnnnnnnnnnnnnnnnnnnnnnnnnnnnnnnnnnnnnnnnnnnnnnnnnnnnnnnnnnnnnnnnnnnnnnnnnnnnnnnnnnnnnnnnnnnnnnnnnnnnnnnnnnnnnnnnnnnnnnnnnnnnnnnnnnnnnnnnnnnnnnnnnnnnnnnnnnnnnnnnnnnnnnnnnnnnnnnnnnnnnnnnnnnnnnnnnnnnnnnnnnnnnnnnnnnnnnnnnnnnnnnnnnnnnnnnnnnnnnnnnnnnnnnnnnnnnnnnnnnnnnnnnnnnnnnnnnnnnnnnnnnnnnnnnnnnnnnnnnnnnnnnnnnnnnnnnnnnnnnnnnnnnnnnnnnnnnnnnnnnnnnnnnnnnnnnnnnnnnnnnnnnnnnnnnnnnnnnnnnnnnnnnnnnnnnnnnnnnnnnnnnnnnnnnnnnnnnnnnnnnnnnnnnnnnnnnnnnnnnnnnnnnnnnnnnnnnnnnnnnnnnnnnnnnnnnnnnnnnnnnnnnnnnnnnnnnnnnnnnnnnnnnnnnnnnnnnnnnnnnnnnnnnnnnnnnnnnnnnnnnnnnnnnnnnnnnnnnnnnnnnnnnnnnnnnnnnnnnnnnnnnnnnnnnnnnnnnnnnnnnnnnnnnnnnnnnnnnnnnnnnnnnnnnnnnnnnnnnnnnnnnnnnnnnnnnnnnnnnnnnnnnnnnnnnnnnnnnnnnnnnnnnnnnnnnnnnnnnnnnnnnnnnnnnnnnnnnnnnnnnnnnnnnnnnnnnnnnnnnnnnnnnnnnnnnnnnnnnnnnnnnnnnnnnnnnnnnnnnnnnnnnnnnnnnnnnnnnnnnnnnnnnnnnnnnnnnnnnnnnnnnnnnnnnnnnnnnnnnnnnnnnnnnnnnnnnnnnnnnnnnnnnnnnnnnnnnnnnnnnnnnnnnnnnnnnnnnnnnnnnnnnnnnnnnnnnnnnnnnnnnnnnnnnnnnnnnnnnnnnnnnnnnnnnnnnnnnnnnnnnnnnnnnnnnnnnnnnnnnnnnnnnnnnnnnnnnnnnnnnnnnnnnnnnnnnnnnnnnnnnnnnnnnnnnnnnnnnnnnnnnnnnnnnnnnnnnnnnnnnnnnnnnnnnnnnnnnnnnnnnnnnnnnnnnnnnnnnnnnnnnnnnnnnnnnnnnnnnnnnnnnnnnnnnnnnnnnnnnnnnnnnnnnnnnnnnnnnnnnnnnnnnnnnnnnnnnnnnnnnnnnnnnnnnnnnnnnnnnnnnnnnnnnnnnnnnnnnnnnnnnnnnnnnnnnnnnnnnnnnnnnnnnnnnnnnnnnnnnnnnnnnnnnnnnnnnnnnnnnnnnnnnnnnnnnnnnnnnnnnnnnnnnnnnnnnnnnnnnnnnnnnnnnnnnnnnnnnnnnnnnnnnnnnnnnnnnnnnnnnnnnnnnnnnnnnnnnnnnnnnnnnnnnnnnnnnnnnnnnnnnnnnnnnnnnnnnnnnnnnnnnnnnnnnnnnnnnnnnnnnnnnnnnnnnnnnnnnnnnnnnnnnnnnnnnnnnnnnnnnnnnnnnnnnnnnnnnnnnnnnnnnnnnnnnnnnnnnnnnnnnnnnnnnnnnnnnnnnnnnnnnnnnnnnnnnnnnnnnnnnnnnnnnnnnnnnnnnnnnnnnnnnnnnnnnnnnnnnnnnnnnnnnnnnnnnnnnnnnnnnnnnnnnnnnnnnnnnnnnnnnnnnnnnnnnnnnnnnnnnnnnnnnnnnnnnnnnnnnnnnnnnnnnnnnnnnnnnnnnnnnnnnnnnnnnnnnnnnnnnnnnnnnnnnnnnnnnnnnnnnnnnnnnnnnnnnnnnnnnnnnnnnnnnnnnnnnnnnnnnnnnnnnnnnnnnnnnnnnnnnnnnnnnnnnnnnnnnnnnnnnnnnnnnnnnnnnnnnnnnnnnnnnnnnnnnnnnnnnnnnnnnnnnnnnnnnnnnnnnnnnnnnnnnnnnnnnnnnnnnnnnnnnnnnnnnnnnnnnnnnnnnnnnnnnnnnnnnnnnnnnnnnnnnnnnnnnnnnnnnnnnnnnnnnnnnnnnnnnnnnnnnnnnnnnnnnnnnnnnnnnnnnnnnnnnnnnnnnnnnnnnnnnnnnnnnnnnnnnnnnnnnnnnnnnnnnnnnnnnnnnnnnnnnnnnnnnnnnnnnnnnnnnnnnnnnnnnnnnnnnnnnnnnnnnnnnnnnnnnnnnnnnnnnnnnnnnnnnnnnnnnnnnnnnnnnnnnnnnnnnnnnnnnnnnnnnnnnnnnnnnnnnnnnnnnnnnnnnnnnnnnnnnnnnnnnnnnnnnnnnnnnnnnnnnnnnnnnnnnnnnnnnnnnnnnnnnnnnnnnnnnnnnnnnnnnnnnnnnnnnnnnnnnnnnnnnnnnnnnnnnnnnnnnnnnnnnnnnnnnnnnnnnnnnnnnnnnnnnnnnnnnnnnnnnnnnnnnnnnnnnnnnnnnnnnnnnnnnnnnnnnnnnnnnnnnnnnnnnnnnnnnnnnnnnnnnnnnnnnnnnnnnnnnnnnnnnnnnnnnnnnnnnnnnnnnnnnnnnnnnnnnnnnnnnnnnnnnnnnnnnnnnnnnnnnnnnnnnnnnnnnnnnnnnnnnnnnnnnnnnnnnnnnnnnnnnnnnnnnnnnnnnnnnnnnnnnnnnnnnnnnnnnnnnnnnnnnnnnnnnnnnnnnnnnnnnnnnnnnnnnnnnnnnnnnnnnnnnnnnnnnnnnnnnnnnnnnnnnnnnnnnnnnnnnnnnnnnnnnnnnnnnnnnnnnnnnnnnnnnnnnnnnnnnnnnnnnnnnnnnnnnnnnnnnnnnnnnnnnnnnnnnnnnnnnnnnnnnnnnnnnnnnnnnnnnnnnnnnnnnnnnnnnnnnnnnnnnnnnnnnnnnnnnnnnnnnnnnnnnnnnnnnnnnnnnnnnnnnnnnnnnnnnnnnnnnnnnnnnnnnnnnnnnnnnnnnnnnnnnnnnnnnnnnnnnnnnnnnnnnnnnnnnnnnnnnnnnnnnnnnnnnnnnnnnnnnnnnnnnnnnnnnnnnnnnnnnnnnnnnnnnnnnnnnnnnnnnnnnnnnnnnnnnnnnnnnnnnnnnnnnnnnnnnnnnnnnnnnnnnnnnnnnnnnnnnnnnnnnnnnnnnnnnnnnnnnnnnnnnnnnnnnnnnnnnnnnnnnnnnnnnnnnnnnnnnnnnnnnnnnnnnnnnnnnnnnnnnnnnnnnnnnnnnnnnnnnnnnnnnnnnnnnnnnnnnnnnnnnnnnnnnnnnnnnnnnnnnnnnnnnnnnnnnnnnnnnnnnnnnnnnnnnnnnnnnnnnnnnnnnnnnnnnnnnnnnnnnnnnnnnnnnnnnnnnnnnnnnnnnnnnnnnnnnnnnnnnnnnnnnnnnnnnnnnnnnnnnnnnnnnnnnnnnnnnnnnnnnnnnnnnnnnnnnnnnnnnnnnnnnnnnnnnnnnnnnnnnnnnnnnnnnnnnnnnnnnnnnnnnnnnnnnnnnnnnnnnnnnnnnnnnnnnnnnnnnnnnnnnnnnnnnnnnnnnnnnnnnnnnnnnnnnnnnnnnnnnnnnnnnnnnnnnnnnnnnnnnnnnnnnnnnnnnnnnnnnnnnnnnnnnnnnnnnnnnnnnnnnnnnnnnnnnnnnnnnnnnnnnnnnnnnnnnnnnnnnnnnnnnnnnnnnnnnnnnnnnnnnnnnnnnnnnnnnnnnnnnnnnnnnnnnnnnnnnnnnnnnnnnnnnnnnnnnnnnnnnnnnnnnnnnnnnnnnnnnnnnnnnnnnnnnnnnnnnnnnnnnnnnnnnnnnnnnnnnnnnnnnnnnnnnnnnnnnnnnnnnnnnnnnnnnnnnnnnnnnnnnnnnnnnnnnnnnnnnnnnnnnnnnnnnnnnnnnnnnnnnnnnnnnnnnnnnnnnnnnnnnnnnnnnnnnnnnnnnnnnnnnnnnnnnnnnnnnnnnnnnnnnnnnnnnnnnnnnnnnnnnnnnnnnnnnnnnnnnnnnnnnnnnnnnnnnnnnnnnnnnnnnnnnnnnnnnnnnnnnnnnnnnnnnnnnnnnnnnnnnnnnnnnnnnnnnnnnnnnnnnnnnnnnnnnnnnnnnnnnnnnnnnnnnnnnnnnnnnnnnnnnnnnnnnnnnnnnnnnnnnnnnnnnnnnnnnnnnnnnnnnnnnnnnnnnnnnnnnnnnnnnnnnnnnnnnnnnnnnnnnnnnnnnnnnnnnnnnnnnnnnnnnnnnnnnnnnnnnnnnnnnnnnnnnnnnnnnnnnnnnnnnnnnnnnnnnnnnnnnnnnnnnnnnnnnnnnnnnnnnnnnnnnnnnnnnnnnnnnnnnnnnnnnnnnnnnnnnnnnnnnnnnnnnnnnnnnnnnnnnnnnnnnnnnnnnnnnnnnnnnnnnnnnnnnnnnnnnnnnnnnnnnnnnnnnnnnnnnnnnnnnnnnnnnnnnnnnnnnnnnnnnnnnnnnnnnnnnnnnnnnnnnnnnnnnnnnnnnnnnnnnnnnnnnnnnnnnnnnnnnnnnnnnnnnnnnnnnnnnnnnnnnnnnnnnnnnnnnnnnnnnnnnnnnnnnnnnnnnnnnnnnnnnnnnnnnnnnnnnnnnnnnnnnnnnnnnnnnnnnnnnnnnnnnnnnnnnnnnnnnnnnnnnnnnnnnnnnnnnnnnnnnnnnnnnnnnnnnnnnnnnnnnnnnnnnnnnnnnnnnnnnnnnnnnnnnnnnnnnnnnnnnnnnnnnnnnnnnnnnnnnnnnnnnnnnnnnnnnnnnnnnnnnnnnnnnnnnnnnnnnnnnnnnnnnnnnnnnnnnnnnnnnnnnnnnnnnnnnnnnnnnnnnnnnnnnnnnnnnnnnnnnnnnnnnnnnnnnnnnnnnnnnnnnnnnnnnnnnnnnnnnnnnnnnnnnnnnnnnnnnnnnnnnnnnnnnnnnnnnnnnnnnnnnnnnnnnnnnnnnnnnnnnnnnnnnnnnnnnnnnnnnnnnnnnnnnnnnnnnnnnnnnnnnnnnnnnnnnnnnnnnnnnnnnnnnnnnnnnnnnnnnnnnnnnnnnnnnnnnnnnnnnnnnnnnnnnnnnnnnnnnnnnnnnnnnnnnnnnnnnnnnnnnnnnnnnnnnnnnnnnnnnnnnnnnnnnnnnnnnnnnnnnnnnnnnnnnnnnnnnnnnnnnnnnnnnnnnnnnnnnnnnnnnnnnnnnnnnnnnnnnnnnnnnnnnnnnnnnnnnnnnnnnnnnnnnnnnnnnnnnnnnnnnnnnnnnnnnnnnnnnnnnnnnnnnnnnnnnnnnnnnnnnnnnnnnnnnnnnnnnnnnnnnnnnnnnnnnnnnnnnnnnnnnnnnnnnnnnnnnnnnnnnnnnnnnnnnnnnnnnnnnnnnnnnnnnnnnnnnnnnnnnnnnnnnnnnnnnnnnnnnnnnnnnnnnnnnnnnnnnnnnnnnnnnnnnnnnnnnnnnnnnnnnnnnnnnnnnnnnnnnnnnnnnnnnnnnnnnnnnnnnnnnnnnnnnnnnnnnnnnnnnnnnnnnnnnnnnnnnnnnnnnnnnnnnnnnnnnnnnnnnnnnnnnnnnnnnnnnnnnnnnnnnnnnnnnnnnnnnnnnnnnnnnnnnnnnnnnnnnnnnnnnnnnnnnnnnnnnnnnnnnnnnnnnnnnnnnnnnnnnnnnnnnnnnnnnnnnnnnnnnnnnnnnnnnnnnnnnnnnnnnnnnnnnnnnnnnnnnnnnnnnnnnnnnnnnnnnnnnnnnnnnnnnnnnnnnnnnnnnnnnnnnnnnnnnnnnnnnnnnnnnnnnnnnnnnnnnnnnnnnnnnnnnnnnnnnnnnnnnnnnnnnnnnnnnnnnnnnnnnnnnnnnnnnnnnnnnnnnnnnnnnnnnnnnnnnnnnnnnnnnnnnnnnnnnnnnnnnnnnnnnnnnnnnnnnnnnnnnnnnnnnnnnnnnnnnnnnnnnnnnnnnnnnnnnnnnnnnnnnnnnnnnnnnnnnnnnnnnnnnnnnnnnnnnnnnnnnnnnnnnnnnnnnnnnnnnnnnnnnnnnnnnnnnnnnnnnnnnnnnnnnnnnnnnnnnnnnnnnnnnnnnnnnnnnnnnnnnnnnnnnnnnnnnnnnnnnnnnnnnnnnnnnnnnnnnnnnnnnnnnnnnnnnnnnnnnnnnnnnnnnnnnnnnnnnnnnnnnnnnnnnnnnnnnnnnnnnnnnnnnnnnnnnnnnnnnnnnnnnnnnnnnnnnnnnnnnnnnnnnnnnnnnnnnnnnnnnnnnnnnnnnnnnnnnnnnnnnnnnnnnnnnnnnnnnnnnnnnnnnnnnnnnnnnnnnnnnnnnnnnnnnnnnnnnnnnnnnnnnnnnnnnnnnnnnnnnnnnnnnnnnnnnnnnnnnnnnnnnnnnnnnnnnnnnnnnnnnnnnnnnnnnnnnnnnnnnnnnnnnnnnnnnnnnnnnnnnnnnnnnnnnnnnnnnnnnnnnnnnnnnnnnnnnnnnnnnnnnnnnnnnnnnnnnnnnnnnnnnnnnnnnnnnnnnnnnnnnnnnnnnnnnnnnnnnnnnnnnnnnnnnnnnnnnnnnnnnnnnnnnnnnnnnnnnnnnnnnnnnnnnnnnnnnnnnnnnnnnnnnnnnnnnnnnnnnnnnnnnnnnnnnnnnnnnnnnnnnnnnnnnnnnnnnnnnnnnnnnnnnnnnnnnnnnnnnnnnnnnnnnnnnnnnnnnnnnnnnnnnnnnnnnnnnnnnnnnnnnnnnnnnnnnnnnnnnnnnnnnnnnnnnnnnnnnnnnnnnnnnnnnnnnnnnnnnnnnnnnnnnnnnnnnnnnnnnnnnnnnnnnnnnnnnnnnnnnnnnnnnnnnnnnnnnnnnnnnnnnnnnnnnnnnnnnnnnnnnnnnnnnnnnnnnnnnnnnnnnnnnnnnnnnnnnnnnnnnnnnnnnnnnnnnnnnnnnnnnnnnnnnnnnnnnnnnnnnnnnnnnnnnnnnnnnnnnnnnnnnnnnnnnnnnnnnnnnnnnnnnnnnnnnnnnnnnnnnnnnnnnnnnnnnnnnnnnnnnnnnnnnnnnnnnnnnnnnnnnnnnnnnnnnnnnnnnnnnnnnnnnnnnnnnnnnnnnnnnnnnnnnnnnnnnnnnnnnnnnnnnnnnnnnnnnnnnnnnnnnnnnnnnnnnnnnnnnnnnnnnnnnnnnnnnnnnnnnnnnnnnnnnnnnnnnnnnnnnnnnnnnnnnnnnnnnnnnnnnnnnnnnnnnnnnnnnnnnnnnnnnnnnnnnnnnnnnnnnnnnnnnnnnnnnnnnnnnnnnnnnnnnnnnnnnnnnnnnnnnnnnnnnnnnnnnnnnnnnnnnnnnnnnnnnnnnnnnnnnnnnnnnnnnnnnnnnnnnnnnnnnnnnnnnnnnnnnnnnnnnnnnnnnnnnnnnnnnnnnnnnnnnnnnnnnnnnnnnnnnnnnnnnnnnnnnnnnnnnnnnnnnnnnnnnnnnnnnnnnnnnnnnnnnnnnnnnnnnnnnnnnnnnnnnnnnnnnnnnnnnnnnnnnnnnnnnnnnnnnnnnnnnnnnnnnnnnnnnnnnnnnnnnnnnnnnnnnnnnnnnnnnnnnnnnnnnnnnnnnnnnnnnnnnnnnnnnnnnnnnnnnnnnnnnnnnnnnnnnnnnnnnnnnnnnnnnnnnnnnnnnnnnnnnnnnnnnnnnnnnnnnnnnnnnnnnnnnnnnnnnnnnnnnnnnnnnnnnnnnnnnnnnnnnnnnnnnnnnnnnnnnnnnnnnnnnnnnnnnnnnnnnnnnnnnnnnnnnnnnnnnnnnnnnnnnnnnnnnnnnnnnnnnnnnnnnnnnnnnnnnnnnnnnnnnnnnnnnnnnnnnnnnnnnnnnnnnnnnnnnnnnnnnnnnnnnnnnnnnnnnnnnnnnnnnnnnnnnnnnnnnnnnnnnnnnnnnnnnnnnnnnnnnnnnnnnnnnnnnnnnnnnnnnnnnnnnnnnnnnnnnnnnnnnnnnnnnnnnnnnnnnnnnnnnnnnnnnnnnnnnnnnnnnnnnnnnnnnnnnnnnnnnnnnnnnnnnnnnnnnnnnnnnnnnnnnnnnnnnnnnnnnnnnnnnnnnnnnnnnnnnnnnnnnnnnnnnnnnnnnnnnnnnnnnnnnnnnnnnnnnnnnnnnnnnnnnnnnnnnnnnnnnnnnnnnnnnnnnnnnnnnnnnnnnnnnnnnnnnnnnnnnnnnnnnnnnnnnnnnnnnnnnnnnnnnnnnnnnnnnnnnnnnnnnnnnnnnnnnnnnnnnnnnnnnnnnnnnnnnnnnnnnnnnnnnnnnnnnnnnnnnnnnnnnnnnnnnnnnnnnnnnnnnnnnnnnnnnnnnnnnnnnnnnnnnnnnnnnnnnnnnnnnnnnnnnnnnnnnnnnnnnnnnnnnnnnnnnnnnnnnnnnnnnnnnnnnnnnnnnnnnnnnnnnnnnnnnnnnnnnnnnnnnnnnnnnnnnnnnnnnnnnnnnnnnnnnnnnnnnnnnnnnnnnnnnnnnnnnnnnnnnnnnnnnnnnnnnnnnnnnnnnnnnnnnnnnnnnnnnnnnnnnnnnnnnnnnnnnnnnnnnnnnnnnnnnnnnnnnnnnnnnnnnnnnnnnnnnnnnnnnnnnnnnnnnnnnnnnnnnnnnnnnnnnnnnnnnnnnnnnnnnnnnnnnnnnnnnnnnnnnnnnnnnnnnnnnnnnnnnnnnnnnnnnnnnnnnnnnnnnnnnnnnnnnnnnnnnnnnnnnnnnnnnnnnnnnnnnnnnnnnnnnnnnnnnnnnnnnnnnnnnnnnnnnnnnnnnnnnnnnnnnnnnnnnnnnnnnnnnnnnnnnnnnnnnnnnnnnnnnnnnnnnnnnnnnnnnnnnnnnnnnnnnnnnnnnnnnnnnnnnnnnnnnnnnnnnnnnnnnnnnnnnnnnnnnnnnnnnnnnnnnnnnnnnnnnnnnnnnnnnnnnnnnnnnnnnnnnnnnnnnnnnnnnnnnnnnnnnnnnnnnnnnnnnnnnnnnnnnnnnnnnnnnnnnnnnnnnnnnnnnnnnnnnnnnnnnnnnnnnnnnnnnnnnnnnnnnnnnnnnnnnnnnnnnnnnnnnnnnnnnnnnnnnnnnnnnnnnnnnnnnnnnnnnnnnnnnnnnnnnnnnnnnnnnnnnnnnnnnnnnnnnnnnnnnnnnnnnnnnnnnnnnnnnnnnnnnnnnnnnnnnnnnnnnnnnnnnnnnnnnnnnnnnnnnnnnnnnnnnnnnnnnnnnnnnnnnnnnnnnnnnnnnnnnnnnnnnnnnnnnnnnnnnnnnnnnnnnnnnnnnnnnnnnnnnnnnnnnnnnnnnnnnnnnnnnnnnnnnnnnnnnnnnnnnnnnnnnnnnnnnnnnnnnnnnnnnnnnnnnnnnnnnnnnnnnnnnnnnnnnnnnnnnnnnnnnnnnnnnnnnnnnnnnnnnnnnnnnnnnnnnnnnnnnnnnnnnnnnnnnnnnnnnnnnnnnnnnnnnnnnnnnnnnnnnnnnnnnnnnnnnnnnnnnnnnnnnnnnnnnnnnnnnnnnnnnnnnnnnnnnnnnnnnnnnnnnnnnnnnnnnnnnnnnnnnnnnnnnnnnnnnnnnnnnnnnnnnnnnnnnnnnnnnnnnnnnnnnnnnnnnnnnnnnnnnnnnnnnnnnnnnnnnnnnnnnnnnnnnnnnnnnnnnnnnnnnnnnnnnnnnnnnnnnnnnnnnnnnnnnnnnnnnnnnnnnnnnnnnnnnnnnnnnnnnnnnnnnnnnnnnnnnnnnnnnnnnnnnnnnnnnnnnnnnnnnnnnnnnnnnnnnnnnnnnnnnnnnnnnnnnnnnnnnnnnnnnnnnnnnnnnnnnnnnnnnnnnnnnnnnnnnnnnnnnnnnnnnnnnnnnnnnnnnnnnnnnnnnnnnnnnnnnnnnnnnnnnnnnnnnnnnnnnnnnnnnnnnnnnnnnnnnnnnnnnnnnnnnnnnnnnnnnnnnnnnnnnnnnnnnnnnnnnnnnnnnnnnnnnnnnnnnnnnnnnnnnnnnnnnnnnnnnnnnnnnnnnnnnnnnnnnnnnnnnnnnnnnnnnnnnnnnnnnnnnnnnnnnnnnnnnnnnnnnnnnnnnnnnnnnnnnnnnnnnnnnnnnnnnnnnnnnnnnnnnnnnnnnnnnnnnnnnnnnnnnnnnnnnnnnnnnnnnnnnnnnnnnnnnnnnnnnnnnnnnnnnnnnnnnnnnnnnnnnnnnnnnnnnnnnnnnnnnnnnnnnnnnnnnnnnnnnnnnnnnnnnnnnnnnnnnnnnnnnnnnnnnnnnnnnnnnnnnnnnnnnnnnnnnnnnnnnnnnnnnnnnnnnnnnnnnnnnnnnnnnnnnnnnnnnnnnnnnnnnnnnnnnnnnnnnnnnnnnnnnnnnnnnnnnnnnnnnnnnnnnnnnnnnnnnnnnnnnnnnnnnnnnnnnnnnnnnnnnnnnnnnnnnnnnnnnnnnnnnnnnnnnnnnnnnnnnnnnnnnnnnnnnnnnnnnnnnnnnnnnnnnnnnnnnnnnnnnnnnnnnnnnnnnnnnnnnnnnnnnnnnnnnnnnnnnnnnnnnnnnnnnnnnnnnnnnnnnnnnnnnnnnnnnnnnnnnnnnnnnnnnnnnnnnnnnnnnnnnnnnnnnnnnnnnnnnnnnnnnnnnnnnnnnnnnnnnnnnnnnnnnnnnnnnnnnnnnnnnnnnnnnnnnnnnnnnnnnnnnnnnnnnnnnnnnnnnnnnnnnnnnnnnnnnnnnnnnnnnnnnnnnnnnnnnnnnnnnnnnnnnnnnnnnnnnnnnnnnnnnnnnnnnnnnnnnnnnnnnnnnnnnnnnnnnnnnnnnnnnnnnnnnnnnnnnnnnnnnnnnnnnnnnnnnnnnnnnnnnnnnnnnnnnnnnnnnnnnnnnnnnnnnnnnnnnnnnnnnnnnnnnnnnnnnnnnnnnnnnnnnnnnnnnnnnnnnnnnnnnnnnnnnnnnnnnnnnnnnnnnnnnnnnnnnnnnnnnnnnnnnnnnnnnnnnnnnnnnnnnnnnnnnnnnnnnnnnnnnnnnnnnnnnnnnnnnnnnnnnnnnnnnnnnnnnnnnnnnnnnnnnnnnnnnnnnnnnnnnnnnnnnnnnnnnnnnnnnnnnnnnnnnnnnnnnnnnnnnnnnnnnnnnnnnnnnnnnnnnnnnnnnnnnnnnnnnnnnnnnnnnnnnnnnnnnnnnnnnnnnnnnnnnnnnnnnnnnnnnnnnnnnnnnnnnnnnnnnnnnnnnnnnnnnnnnnnnnnnnnnnnnnnnnnnnnnnnnnnnnnnnnnnnnnnnnnnnnnnnnnnnnnnnnnnnnnnnnnnnnnnnnnnnnnnnnnnnnnnnnnnnnnnnnnnnnnnnnnnnnnnnnnnnnnnnnnnnnnnnnnnnnnnnnnnnnnnnnnnnnnnnnnnnnnnnnnnnnnnnnnnnnnnnnnnnnnnnnnnnnnnnnnnnnnnnnnnnnnnnnnnnnnnnnnnnnnnnnnnnnnnnnnnnnnnnnnnnnnnnnnnnnnnnnnnnnnnnnnnnnnnnnnnnnnnnnnnnnnnnnnnnnnnnnnnnnnnnnnnnnnnnnnnnnnnnnnnnnnnnnnnnnnnnnnnnnnnnnnnnnnnnnnnnnnnnnnnnnnnnnnnnnnnnnnnnnnnnnnnnnnnnnnnnnnnnnnnnnnnnnnnnnnnnnnnnnnnnnnnnnnnnnnnnnnnnnnnnnnnnnnnnnnnnnnnnnnnnnnnnnnnnnnnnnnnnnnnnnnnnnnnnnnnnnnnnnnnnnnnnnnnnnnnnnnnnnnnnnnnnnnnnnnnnnnnnnnnnnnnnnnnnnnnnnnnnnnnnnnnnnnnnnnnnnnnnnnnnnnnnnnnnnnnnnnnnnnnnnnnnnnnnnnnnnnnnnnnnnnnnnnnnnnnnnnnnnnnnnnnnnnnnnnnnnnnnnnnnnnnnnnnnnnnnnnnnnnnnnnnnnnnnnnnnnnnnnnnnnnnnnnnnnnnnnnnnnnnnnnnnnnnnnnnnnnnnnnnnnnnnnnnnnnnnnnnnnnnnnnnnnnnnnnnnnnnnnnnnnnnnnnnnnnnnnnnnnnnnnnnnnnnnnnnnnnnnnnnnnnnnnnnnnnnnnnnnnnnnnnnnnnnnnnnnnnnnnnnnnnnnnnnnnnnnnnnnnnnnnnnnnnnnnnnnnnnnnnnnnnnnnnnnnnnnnnnnnnnnnnnnnnnnnnnnnnnnnnnnnnnnnnnnnnnnnnnnnnnnnnnnnnnnnnnnnnnnnnnnnnnnnnnnnnnnnnnnnnnnnnnnnnnnnnnnnnnnnnnnnnnnnnnnnnnnnnnnnnnnnnnnnnnnnnnnnnnnnnnnnnnnnnnnnnnnnnnnnnnnnnnnnnnnnnnnnnnnnnnnnnnnnnnnnnnnnnnnnnnnnnnnnnnnnnnnnnnnnnnnnnnnnnnnnnnnnnnnnnnnnnnnnnnnnnnnnnnnnnnnnnnnnnnnnnnnnnnnnnnnnnnnnnnnnnnnnnnnnnnnnnnnnnnnnnnnnnnnnnnnnnnnnnnnnnnnnnnnnnnnnnnnnnnnnnnnnnnnnnnnnnnnnnnnnnnnnnnnnnnnnnnnnnnnnnnnnnnnnnnnnnnnnnnnnnnnnnnnnnnnnnnnnnnnnnnnnnnnnnnnnnnnnnnnnnnnnnnnnnnnnnnnnnnnnnnnnnnnnnnnnnnnnnnnnnnnnnnnnnnnnnnnnnnnnnnnnnnnnnnnnnnnnnnnnnnnnnnnnnnnnnnnnnnnnnnnnnnnnnnnnnnnnnnnnnnnnnnnnnnnnnnnnnnnnnnnnnnnnnnnnnnnnnnnnnnnnnnnnnnnnnnnnnnnnnnnnnnnnnnnnnnnnnnnnnnnnnnnnnnnnnnnnnnnnnnnnnnnnnnnnnnnnnnnnnnnnnnnnnnnnnnnnnnnnnnnnnnnnnnnnnnnnnnnnnnnnnnnnnnnnnnnnnnnnnnnnnnnnnnnnnnnnnnnnnnnnnnnnnnnnnnnnnnnnnnnnnnnnnnnnnnnnnnnnnnnnnnnnnnnnnnnnnnnnnnnnnnnnnnnnnnnnnnnnnnnnnnnnnnnnnnnnnnnnnnnnnnnnnnnnnnnnnnnnnnnnnnnnnnnnnnnnnnnnnnnnnnnnnnnnnnnnnnnnnnnnnnnnnnnnnnnnnnnnnnnnnnnnnnnnnnnnnnnnnnnnnnnnnnnnnnnnnnnnnnnnnnnnnnnnnnnnnnnnnnnnnnnnnnnnnnnnnnnnnnnnnnnnnnnnnnnnnnnnnnnnnnnnnnnnnnnnnnnnnnnnnnnnnnnnnnnnnnnnnnnnnnnnnnnnnnnnnnnnnnnnnnnnnnnnnnnnnnnnnnnnnnnnnnnnnnnnnnnnnnnnnnnnnnnnnnnnnnnnnnnnnnnnnnnnnnnnnnnnnnnnnnnnnnnnnnnnnnnnnnnnnnnnnnnnnnnnnnnnnnnnnnnnnnnnnnnnnnnnnnnnnnnnnnnnnnnnnnnnnnnnnnnnnnnnnnnnnnnnnnnnnnnnnnnnnnnnnnnnnnnnnnnnnnnnnnnnnnnnnnnnnnnnnnnnnnnnnnnnnnnnnnnnnnnnnnnnnnnnnnnnnnnnnnnnnnnnnnnnnnnnnnnnnnnnnnnnnnnnnnnnnnnnnnnnnnnnnnnnnnnnnnnnnnnnnnnnnnnnnnnnnnnnnnnnnnnnnnnnnnnnnnnnnnnnnnnnnnnnnnnnnnnnnnnnnnnnnnnnnnnnnnnnnnnnnnnnnnnnnnnnnnnnnnnnnnnnnnnnnnnnnnnnnnnnnnnnnnnnnnnnnnnnnnnnnnnnnnnnnnnnnnnnnnnnnnnnnnnnnnnnnnnnnnnnnnnnnnnnnnnnnnnnnnnnnnnnnnnnnnnnnnnnnnnnnnnnnnnnnnnnnnnnnnnnnnnnnnnnnnnnnnnnnnnnnnnnnnnnnnnnnnnnnnnnnnnnnnnnnnnnnnnnnnnnnnnnnnnnnnnnnnnnnnnnnnnnnnnnnnnnnnnnnnnnnnnnnnnnnnnnnnnnnnnnnnnnnnnnnnnnnnnnnnnnnnnnnnnnnnnnnnnnnnnnnnnnnnnnnnnnnnnnnnnnnnnnnnnnnnnnnnnnnnnnnnnnnnnnnnnnnnnnnnnnnnnnnnnnnnnnnnnnnnnnnnnnnnnnnnnnnnnnnnnnnnnnnnnnnnnnnnnnnnnnnnnnnnnnnnnnnnnnnnnnnnnnnnnnnnnnnnnnnnnnnnnnnnnnnnnnnnnnnnnnnnnnnnnnnnnnnnnnnnnnnnnnnnnnnnnnnnnnnnnnnnnnnnnnnnnnnnnnnnnnnnnnnnnnnnnnnnnnnnnnnnnnnnnnnnnnnnnnnnnnnnnnnnnnnnnnnnnnnnnnnnnnnnnnnnnnnnnnnnnnnnnnnnnnnnnnnnnnnnnnnnnnnnnnnnnnnnnnnnnnnnnnnnnnnnnnnnnnnnnnnnnnnnnnnnnnnnnnnnnnnnnnnnnnnnnnnnnnnnnnnnnnnnnnnnnnnnnnnnnnnnnnnnnnnnnnnnnnnnnnnnnnnnnnnnnnnnnnnnnnnnnnnnnnnnnnnnnnnnnnnnnnnnnnnnnnnnnnnnnnnnnnnnnnnnnnnnnnnnnnnnnnnnnnnnnnnnnnnnnnnnnnnnnnnnnnnnnnnnnnnnnnnnnnnnnnnnnnnnnnnnnnnnnnnnnnnnnnnnnnnnnnnnnnnnnnnnnnnnnnnnnnnnnnnnnnnnnnnnnnnnnnnnnnnnnnnnnnnnnnnnnnnnnnnnnnnnnnnnnnnnnnnnnnnnnnnnnnnnnnnnnnnnnnnnnnnnnnnnnnnnnnnnnnnnnnnnnnnnnnnnnnnnnnnnnnnnnnnnnnnnnnnnnnnnnnnnnnnnnnnnnnnnnnnnnnnnnnnnnnnnnnnnnnnnnnnnnnnnnnnnnnnnnnnnnnnnnnnnnnnnnnnnnnnnnnnnnnnnnnnnnnnnnnnnnnnnnnnnnnnnnnnnnnnnnnnnnnnnnnnnnnnnnnnnnnnnnnnnnnnnnnnnnnnnnnnnnnnnnnnnnnnnnnnnnnnnnnnnnnnnnnnnnnnnnnnnnnnnnnnnnnnnnnnnnnnnnnnnnnnnnnnnnnnnnnnnnnnnnnnnnnnnnnnnnnnnnnnnnnnnnnnnnnnnnnnnnnnnnnnnnnnnnnnnnnnnnnnnnnnnnnnnnnnnnnnnnnnnnnnnnnnnnnnnnnnnnnnnnnnnnnnnnnnnnnnnnnnnnnnnnnnnnnnnnnnnnnnnnnnnnnnnnnnnnnnnnnnnnnnnnnnnnnnnnnnnnnnnnnnnnnnnnnnnnnnnnnnnnnnnnnnnnnnnnnnnnnnnnnnnnnnnnnnnnnnnnnnnnnnnnnnnnnnnnnnnnnnnnnnnnnnnnnnnnnnnnnnnnnnnnnnnnnnnnnnnnnnnnnnnnnnnnnnnnnnnnnnnnnnnnnnnnnnnnnnnnnnnnnnnnnnnnnnnnnnnnnnnnnnnnnnnnnnnnnnnnnnnnnnnnnnnnnnnnnnnnnnnnnnnnnnnnnnnnnnnnnnnnnnnnnnnnnnnnnnnnnnnnnnnnnnnnnnnnnnnnnnnnnnnnnnnnnnnnnnnnnnnnnnnnnnnnnnnnnnnnnnnnnnnnnnnnnnnnnnnnnnnnnnnnnnnnnnnnnnnnnnnnnnnnnnnnnnnnnnnnnnnnnnnnnnnnnnnnnnnnnnnnnnnnnnnnnnnnnnnnnnnnnnnnnnnnnnnnnnnnnnnnnnnnnnnnnnnnnnnnnnnnnnnnnnnnnnnnnnnnnnnnnnnnnnnnnnnnnnnnnnnnnnnnnnnnnnnnnnnnnnnnnnnnnnnnnnnnnnnnnnnnnnnnnnnnnnnnnnnnnnnnnnnnnnnnnnnnnnnnnnnnnnnnnnnnnnnnnnnnnnnnnnnnnnnnnnnnnnnnnnnnnnnnnnnnnnnnnnnnnnnnnnnnnnnnnnnnnnnnnnnnnnnnnnnnnnnnnnnnnnnnnnnnnnnnnnnnnnnnnnnnnnnnnnnnnnnnnnnnnnnnnnnnnnnnnnnnnnnnnnnnnnnnnnnnnnnnnnnnnnnnnnnnnnnnnnnnnnnnnnnnnnnnnnnnnnnnnnnnnnnnnnnnnnnnnnnnnnnnnnnnnnnnnnnnnnnnnnnnnnnnnnnnnnnnnnnnnnnnnnnnnnnnnnnnnnnnnnnnnnnnnnnnnnnnnnnnnnnnnnnnnnnnnnnnnnnnnnnnnnnnnnnnnnnnnnnnnnnnnnnnnnnnnnnnnnnnnnnnnnnnnnnnnnnnnnnnnnnnnnnnnnnnnnnnnnnnnnnnnnnnnnnnnnnnnnnnnnnnnnnnnnnnnnnnnnnnnnnnnnnnnnnnnnnnnnnnnnnnnnnnnnnnnnnnnnnnnnnnnnnnnnnnnnnnnnnnnnnnnnnnnnnnnnnnnnnnnnnnnnnnnnnnnnnnnnnnnnnnnnnnnnnnnnnnnnnnnnnnnnnnnnnnnnnnnnnnnnnnnnnnnnnnnnnnnnnnnnnnnnnnnnnnnnnnnnnnnnnnnnnnnnnnnnnnnnnnnnnnnnnnnnnnnnnnnnnnnnnnnnnnnnnnnnnnnnnnnnnnnnnnnnnnnnnnnnnnnnnnnnnnnnnnnnnnnnnnnnnnnnnnnnnnnnnnnnnnnnnnnnnnnnnnnnnnnnnnnnnnnnnnnnnnnnnnnnnnnnnnnnnnnnnnnnnnnnnnnnnnnnnnnnnnnnnnnnnnnnnnnnnnnnnnnnnnnnnnnnnnnnnnnnnnnnnnnnnnnnnnnnnnnnnnnnnnnnnnnnnnnnnnnnnnnnnnnnnnnnnnnnnnnnnnnnnnnnnnnnnnnnnnnnnnnnnnnnnnnnnnnnnnnnnnnnnnnnnnnnnnnnnnnnnnnnnnnnnnnnnnnnnnnnnnnnnnnnnnnnnnnnnnnnnnnnnnnnnnnnnnnnnnnnnnnnnnnnnnnnnnnnnnnnnnnnnnnnnnnnnnnnnnnnnnnnnnnnnnnnnnnnnnnnnnnnnnnnnnnnnnnnnnnnnnnnnnnnnnnnnnnnnnnnnnnnnnnnnnnnnnnnnnnnnnnnnnnnnnnnnnnnnnnnnnnnnnnnnnnnnnnnnnnnnnnnnnnnnnnnnnnnnnnnnnnnnnnnnnnnnnnnnnnnnnnnnnnnnnnnnnnnnnnnnnnnnnnnnnnnnnnnnnnnnnnnnnnnnnnnnnnnnnnnnnnnnnnnnnnnnnnnnnnnnnnnnnnnnnnnnnnnnnnnnnnnnnnnnnnnnnnnnnnnnnnnnnnnnnnnnnnnnnnnnnnnnnnnnnnnnnnnnnnnnnnnnnnnnnnnnnnnnnnnnnnnnnnnnnnnnnnnnnnnnnnnnnnnnnnnnnnnnnnnnnnnnnnnnnnnnnnnnnnnnnnnnnnnnnnnnnnnnnnnnnnnnnnnnnnnnnnnnnnnnnnnnnnnnnnnnnnnnnnnnnnnnnnnnnnnnnnnnnnnnnnnnnnnnnnnnnnnnnnnnnnnnnnnnnnnnnnnnnnnnnnnnnnnnnnnnnnnnnnnnnnnnnnnnnnnnnnnnnnnnnnnnnnnnnnnnnnnnnnnnnnnnnnnnnnnnnnnnnnnnnnnnnnnnnnnnnnnnnnnnnnnnnnnnnnnnnnnnnnnnnnnnnnnnnnnnnnnnnnnnnnnnnnnnnnnnnnnnnnnnnnnnnnnnnnnnnnnnnnnnnnnnnnnnnnnnnnnnnnnnnnnnnnnnnnnnnnnnnnnnnnnnnnnnnnnnnnnnnnnnnnnnnnnnnnnnnnnnnnnnnnnnnnnnnnnnnnnnnnnnnnnnnnnnnnnnnnnnnnnnnnnnnnnnnnnnnnnnnnnnnnnnnnnnnnnnnnnnnnnnnnnnnnnnnnnnnnnnnnnnnnnnnnnnnnnnnnnnnnnnnnnnnnnnnnnnnnnnnnnnnnnnnnnnnnnnnnnnnnnnnnnnnnnnnnnnnnnnnnnnnnnnnnnnnnnnnnnnnnnnnnnnnnnnnnnnnnnnnnnnnnnnnnnnnnnnnnnnnnnnnnnnnnnnnnnnnnnnnnnnnnnnnnnnnnnnnnnnnnnnnnnnnnnnnnnnnnnnnnnnnnnnnnnnnnnnnnnnnnnnnnnnnnnnnnnnnnnnnnnnnnnnnnnnnnnnnnnnnnnnnnnnnnnnnnnnnnnnnnnnnnnnnnnnnnnnnnnnnnnnnnnnnnnnnnnnnnnnnnnnnnnnnnnnnnnnnnnnnnnnnnnnnnnnnnnnnnnnnnnnnnnnnnnnnnnnnnnnnnnnnnnnnnnnnnnnnnnnnnnnnnnnnnnnnnnnnnnnnnnnnnnnnnnnnnnnnnnnnnnnnnnnnnnnnnnnnnnnnnnnnnnnnnnnnnnnnnnnnnnnnnnnnnnnnnnnnnnnnnnnnnnnnnnnnnnnnnnnnnnnnnnnnnnnnnnnnnnnnnnnnnnnnnnnnnnnnnnnnnnnnnnnnnnnnnnnnnnnnnnnnnnnnnnnnnnnnnnnnnnnnnnnnnnnnnnnnnnnnnnnnnnnnnnnnnnnnnnnnnnnnnnnnnnnnnnnnnnnnnnnnnnnnnnnnnnnnnnnnnnnnnnnnnnnnnnnnnnnnnnnnnnnnnnnnnnnnnnnnnnnnnnnnnnnnnnnnnnnnnnnnnnnnnnnnnnnnnnnnnnnnnnnnnnnnnnnnnnnnnnnnnnnnnnnnnnnnnnnnnnnnnnnnnnnnnnnnnnnnnnnnnnnnnnnnnnnnnnnnnnnnnnnnnnnnnnnnnnnnnnnnnnnnnnnnnnnnnnnnnnnnnnnnnnnnnnnnnnnnnnnnnnnnnnnnnnnnnnnnnnnnnnnnnnnnnnnnnnnnnnnnnnnnnnnnnnnnnnnnnnnnnnnnnnnnnnnnnnnnnnnnnnnnnnnnnnnnnnnnnnnnnnnnnnnnnnnnnnnnnnnnnnnnnnnnnnnnnnnnnnnnnnnnnnnnnnnnnnnnnnnnnnnnnnnnnnnnnnnnnnnnnnnnnnnnnnnnnnnnnnnnnnnnnnnnnnnnnnnnnnnnnnnnnnnnnnnnnnnnnnnnnnnnnnnnnnnnnnnnnnnnnnnnnnnnnnnnnnnnnnnnnnnnnnnnnnnnnnnnnnnnnnnnnnnnnnnnnnnnnnnnnnnnnnnnnnnnnnnnnnnnnnnnnnnnnnnnnnnnnnnnnnnnnnnnnnnnnnnnnnnnnnnnnnnnnnnnnnnnnnnnnnnnnnnnnnnnnnnnnnnnnnnnnnnnnnnnnnnnnnnnnnnnnnnnnnnnnnnnnnnnnnnnnnnnnnnnnnnnnnnnnnnnnnnnnnnnnnnnnnnnnnnnnnnnnnnnnnnnnnnnnnnnnnnnnnnnnnnnnnnnnnnnnnnnnnnnnnnnnnnnnnnnnnnnnnnnnnnnnnnnnnnnnnnnnnnnnnnnnnnnnnnnnnnnnnnnnnnnnnnnnnnnnnnnnnnnnnnnnnnnnnnnnnnnnnnnnnnnnnnnnnnnnnnnnnnnnnnnnnnnnnnnnnnnnnnnnnnnnnnnnnnnnnnnnnnnnnnnnnnnnnnnnnnnnnnnnnnnnnnnnnnnnnnnnnnnnnnnnnnnnnnnnnnnnnnnnnnnnnnnnnnnnnnnnnnnnnnnnnnnnnnnnnnnnnnnnnnnnnnnnnnnnnnnnnnnnnnnnnnnnnnnnnnnnnnnnnnnnnnnnnnnnnnnnnnnnnnnnnnnnnnnnnnnnnnnnnnnnnnnnnnnnnnnnnnnnnnnnnnnnnnnnnnnnnnnnnnnnnnnnnnnnnnnnnnnnnnnnnnnnnnnnnnnnnnnnnnnnnnnnnnnnnnnnnnnnnnnnnnnnnnnnnnnnnnnnnnnnnnnnnnnnnnnnnnnnnnnnnnnnnnnnnnnnnnnnnnnnnnnnnnnnnnnnnnnnnnnnnnnnnnnnnnnnnnnnnnnnnnnnnnnnnnnnnnnnnnnnnnnnnnnnnnnnnnnnnnnnnnnnnnnnnnnnnnnnnnnnnnnnnnnnnnnnnnnnnnnnnnnnnnnnnnnnnnnnnnnnnnnnnnnnnnnnnnnnnnnnnnnnnnnnnnnnnnnnnnnnnnnnnnnnnnnnnnnnnnnnnnnnnnnnnnnnnnnnnnnnnnnnnnnnnnnnnnnnnnnnnnnnnnnnnnnnnnnnnnnnnnnnnnnnnnnnnnnnnnnnnnnnnnnnnnnnnnnnnnnnnnnnnnnnnnnnnnnnnnnnnnnnnnnnnnnnnnnnnnnnnnnnnnnnnnnnnnnnnnnnnnnnnnnnnnnnnnnnnnnnnnnnnnnnnnnnnnnnnnnnnnnnnnnnnnnnnnnnnnnnnnnnnnnnnnnnnnnnnnnnnnnnnnnnnnnnnnnnnnnnnnnnnnnnnnnnnnnnnnnnnnnnnnnnnnnnnnnnnnnnnnnnnnnnnnnnnnnnnnnnnnnnnnnnnnnnnnnnnnnnnnnnnnnnnnnnnnnnnnnnnnnnnnnnnnnnnnnnnnnnnnnnnnnnnnnnnnnnnnnnnnnnnnnnnnnnnnnnnnnnnnnnnnnnnnnnnnnnnnnnnnnnnnnnnnnnnnnnnnnnnnnnnnnnnnnnnnnnnnnnnnnnnnnnnnnnnnnnnnnnnnnnnnnnnnnnnnnnnnnnnnnnnnnnnnnnnnnnnnnnnnnnnnnnnnnnnnnnnnnnnnnnnnnnnnnnnnnnnnnnnnnnnnnnnnnnnnnnnnnnnnnnnnnnnnnnnnnnnnnnnnnnnnnnnnnnnnnnnnnnnnnnnnnnnnnnnnnnnnnnnnnnnnnnnnnnnnnnnnnnnnnnnnnnnnnnnnnnnnnnnnnnnnnnnnnnnnnnnnnnnnnnnnnnnnnnnnnnnnnnnnnnnnnnnnnnnnnnnnnnnnnnnnnnnnnnnnnnnnnnnnnnnnnnnnnnnnnnnnnnnnnnnnnnnnnnnnnnnnnnnnnnnnnnnnnnnnnnnnnnnnnnnnnnnnnnnnnnnnnnnnnnnnnnnnnnnnnnnnnnnnnnnnnnnnnnnnnnnnnnnnnnnnnnnnnnnnnnnnnnnnnnnnnnnnnnnnnnnnnnnnnnnnnnnnnnnnnnnnnnnnnnnnnnnnnnnnnnnnnnnnnnnnnnnnnnnnnnnnnnnnnnnnnnnnnnnnnnnnnnnnnnnnnnnnnnnnnnnnnnnnnnnnnnnnnnnnnnnnnnnnnnnnnnnnnnnnnnnnnnnnnnnnnnnnnnnnnnnnnnnnnnnnnnnnnnnnnnnnnnnnnnnnnnnnnnnnnnnnnnnnnnnnnnnnnnnnnnnnnnnnnnnnnnnnnnnnnnnnnnnnnnnnnnnnnnnnnnnnnnnnnnnnnnnnnnnnnnnnnnnnnnnnnnnnnnnnnnnnnnnnnnnnnnnnnnnnnnnnnnnnnnnnnnnnnnnnnnnnnnnnnnnnnnnnnnnnnnnnnnnnnnnnnnnnnnnnnnnnnnnnnnnnnnnnnnnnnnnnnnnnnnnnnnnnnnnnnnnnnnnnnnnnnnnnnnnnnnnnnnnnnnnnnnnnnnnnnnnnnnnnnnnnnnnnnnnnnnnnnnnnnnnnnnnnnnnnnnnnnnnnnnnnnnnnnnnnnnnnnnnnnnnnnnnnnnnnnnnnnnnnnnnnnnnnnnnnnnnnnnnnnnnnnnnnnnnnnnnnnnnnnnnnnnnnnnnnnnnnnnnnnnnnnnnnnnnnnnnnnnnnnnnnnnnnnnnnnnnnnnnnnnnnnnnnnnnnnnnnnnnnnnnnnnnnnnnnnnnnnnnnnnnnnnnnnnnnnnnnnnnnnnnnnnnnnnnnnnnnnnnnnnnnnnnnnnnnnnnnnnnnnnnnnnnnnnnnnnnnnnnnnnnnnnnnnnnnnnnnnnnnnnnnnnnnnnnnnnnnnnnnnnnnnnnnnnnnnnnnnnnnnnnnnnnnnnnnnnnnnnnnnnnnnnnnnnnnnnnnnnnnnnnnnnnnnnnnnnnnnnnnnnnnnnnnnnnnnnnnnnnnnnnnnnnnnnnnnnnnnnnnnnnnnnnnnnnnnnnnnnnnnnnnnnnnnnnnnnnnnnnnnnnnnnnnnnnnnnnnnnnnnnnnnnnnnnnnnnnnnnnnnnnnnnnnnnnnnnnnnnnnnnnnnnnnnnnnnnnnnnnnnnnnnnnnnnnnnnnnnnnnnnnnnnnnnnnnnnnnnnnnnnnnnnnnnnnnnnnnnnnnnnnnnnnnnnnnnnnnnnnnnnnnnnnnnnnnnnnnnnnnnnnnnnnnnnnnnnnnnnnnnnnnnnnnnnnnnnnnnnnnnnnnnnnnnnnnnnnnnnnnnnnnnnnnnnnnnnnnnnnnnnnnnnnnnnnnnnnnnnnnnnnnnnnnnnnnnnnnnnnnnnnnnnnnnnnnnnnnnnnnnnnnnnnnnnnnnnnnnnnnnnnnnnnnnnnnnnnnnnnnnnnnnnnnnnnnnnnnnnnnnnnnnnnnnnnnnnnnnnnnnnnnnnnnnnnnnnnnnnnnnnnnnnnnnnnnnnnnnnnnnnnnnnnnnnnnnnnnnnnnnnnnnnnnnnnnnnnnnnnnnnnnnnnnnnnnnnnnnnnnnnnnnnnnnnnnnnnnnnnnnnnnnnnnnnnnnnnnnnnnnnnnnnnnnnnnnnnnnnnnnnnnnnnnnnnnnnnnnnnnnnnnnnnnnnnnnnnnnnnnnnnnnnnnnnnnnnnnnnnnnnnnnnnnnnnnnnnnnnnnnnnnnnnnnnnnnnnnnnnnnnnnnnnnnnnnnnnnnnnnnnnnnnnnnnnnnnnnnnnnnnnnnnnnnnnnnnnnnnnnnnnnnnnnnnnnnnnnnnnnnnnnnnnnnnnnnnnnnnnnnnnnnnnnnnnnnnnnnnnnnnnnnnnnnnnnnnnnnnnnnnnnnnnnnnnnnnnnnnnnnnnnnnnnnnnnnnnnnnnnnnnnnnnnnnnnnnnnnnnnnnnnnnnnnnnnnnnnnnnnnnnnnnnnnnnnnnnnnnnnnnnnnnnnnnnnnnnnnnnnnnnnnnnnnnnnnnnnnnnnnnnnnnnnnnnnnnnnnnnnnnnnnnnnnnnnnnnnnnnnnnnnnnnnnnnnnnnnnnnnnnnnnnnnnnnnnnnnnnnnnnnnnnnnnnnnnnnnnnnnnnnnnnnnnnnnnnnnnnnnnnnnnnnnnnnnnnnnnnnnnnnnnnnnnnnnnnnnnnnnnnnnnnnnnnnnnnnnnnnnnnnnnnnnnnnnnnnnnnnnnnnnnnnnnnnnnnnnnnnnnnnnnnnnnnnnnnnnnnnnnnnnnnnnnnnnnnnnnnnnnnnnnnnnnnnnnnnnnnnnnnnnnnnnnnnnnnnnnnnnnnnnnnnnnnnnnnnnnnnnnnnnnnnnnnnnnnnnnnnnnnnnnnnnnnnnnnnnnnnnnnnnnnnnnnnnnnnnnnnnnnnnnnnnnnnnnnnnnnnnnnnnnnnnnnnnnnnnnnnnnnnnnnnnnnnnnnnnnnnnnnnnnnnnnnnnnnnnnnnnnnnnnnnnnnnnnnnnnnnnnnnnnnnnnnnnnnnnnnnnnnnnnnnnnnnnnnnnnnnnnnnnnnnnnnnnnnnnnnnnnnnnnnnnnnnnnnnnnnnnnnnnnnnnnnnnnnnnnnnnnnnnnnnnnnnnnnnnnnnnnnnnnnnnnnnnnnnnnnnnnnnnnnnnnnnnnnnnnnnnnnnnnnnnnnnnnnnnnnnnnnnnnnnnnnnnnnnnnnnnnnnnnnnnnnnnnnnnnnnnnnnnnnnnnnnnnnnnnnnnnnnnnnnnnnnnnnnnnnnnnnnnnnnnnnnnnnnnnnnnnnnnnnnnnnnnnnnnnnnnnnnnnnnnnnnnnnnnnnnnnnnnnnnnnnnnnnnnnnnnnnnnnnnnnnnnnnnnnnnnnnnnnnnnnnnnnnnnnnnnnnnnnnnnnnnnnnnnnnnnnnnnnnnnnnnnnnnnnnnnnnnnnnnnnnnnnnnnnnnnnnnnnnnnnnnnnnnnnnnnnnnnnnnnnnnnnnnnnnnnnnnnnnnnnnnnnnnnnnnnnnnnnnnnnnnnnnnnnnnnnnnnnnnnnnnnnnnnnnnnnnnnnnnnnnnnnnnnnnnnnnnnnnnnnnnnnnnnnnnnnnnnnnnnnnnnnnnnnnnnnnnnnnnnnnnnnnnnnnnnnnnnnnnnnnnnnnnnnnnnnnnnnnnnnnnnnnnnnnnnnnnnnnnnnnnnnnnnnnnnnnnnnnnnnnnnnnnnnnnnnnnnnnnnnnnnnnnnnnnnnnnnnnnnnnnnnnnnnnnnnnnnnnnnnnnnnnnnnnnnnnnnnnnnnnnnnnnnnnnnnnnnnnnnnnnnnnnnnnnnnnnnnnnnnnnnnnnnnnnnnnnnnnnnnnnnnnnnnnnnnnnnnnnnnnnnnnnnnnnnnnnnnnnnnnnnnnnnnnnnnnnnnnnnnnnnnnnnnnnnnnnnnnnnnnnnnnnnnnnnnnnnnnnnnnnnnnnnnnnnnnnnnnnnnnnnnnnnnnnnnnnnnnnnnnnnnnnnnnnnnnnnnnnnnnnnnnnnnnnnnnnnnnnnnnnnnnnnnnnnnnnnnnnnnnnnnnnnnnnnnnnnnnnnnnnnnnnnnnnnnnnnnnnnnnnnnnnnnnnnnnnnnnnnnnnnnnnnnnnnnnnnnnnnnnnnnnnnnnnnnnnnnnnnnnnnnnnnnnnnnnnnnnnnnnnnnnnnnnnnnnnnnnnnnnnnnnnnnnnnnnnnnnnnnnnnnnnnnnnnnnnnnnnnnnnnnnnnnnnnnnnnnnnnnnnnnnnnnnnnnnnnnnnnnnnnnnnnnnnnnnnnnnnnnnnnnnnnnnnnnnnnnnnnnnnnnnnnnnnnnnnnnnnnnnnnnnnnnnnnnnnnnnnnnnnnnnnnnnnnnnnnnnnnnnnnnnnnnnnnnnnnnnnnnnnnnnnnnnnnnnnnnnnnnnnnnnnnnnnnnnnnnnnnnnnnnnnnnnnnnnnnnnnnnnnnnnnnnnnnnnnnnnnnnnnnnnnnnnnnnnnnnnnnnnnnnnnnnnnnnnnnnnnnnnnnnnnnnnnnnnnnnnnnnnnnnnnnnnnnnnnnnnnnnnnnnnnnnnnnnnnnnnnnnnnnnnnnnnnnnnnnnnnnnnnnnnnnnnnnnnnnnnnnnnnnnnnnnnnnnnnnnnnnnnnnnnnnnnnnnnnnnnnnnnnnnnnnnnnnnnnnnnnnnnnnnnnnnnnnnnnnnnnnnnnnnnnnnnnnnnnnnnnnnnnnnnnnnnnnnnnnnnnnnnnnnnnnnnnnnnnnnnnnnnnnnnnnnnnnnnnnnnnnnnnnnnnnnnnnnnnnnnnnnnnnnnnnnnnnnnnnnnnnnnnnnnnnnnnnnnnnnnnnnnnnnnnnnnnnnnnnnnnnnnnnnnnnnnnnnnnnnnnnnnnnnnnnnnnnnnnnnnnnnnnnnnnnnnnnnnnnnnnnnnnnnnnnnnnnnnnnnnnnnnnnnnnnnnnnnnnnnnnnnnnnnnnnnnnnnnnnnnnnnnnnnnnnnnnnnnnnnnnnnnnnnnnnnnnnnnnnnnnnnnnnnnnnnnnnnnnnnnnnnnnnnnnnnnnnnnnnnnnnnnnnnnnnnnnnnnnnnnnnnnnnnnnnnnnnnnnnnnnnnnnnnnnnnnnnnnnnnnnnnnnnnnnnnnnnnnnnnnnnnnnnnnnnnnnnnnnnnnnnnnnnnnnnnnnnnnnnnnnnnnnnnnnnnnnnnnnnnnnnnnnnnnnnnnnnnnnnnnnnnnnnnnnnnnnnnnnnnnnnnnnnnnnnnnnnnnnnnnnnnnnnnnnnnnnnnnnnnnnnnnnnnnnnnnnnnnnnnnnnnnnnnnnnnnnnnnnnnnnnnnnnnnnnnnnnnnnnnnnnnnnnnnnnnnnnnnnnnnnnnnnnnnnnnnnnnnnnnnnnnnnnnnnnnnnnnnnnnnnnnnnnnnnnnnnnnnnnnnnnnnnnnnnnnnnnnnnnnnnnnnnnnnnnnnnnnnnnnnnnnnnnnnnnnnnnnnnnnnnnnnnnnnnnnnnnnnnnnnnnnnnnnnnnnnnnnnnnnnnnnnnnnnnnnnnnnnnnnnnnnnnnnnnnnnnnnnnnnnnnnnnnnnnnnnnnnnnnnnnnnnnnnnnnnnnnnnnnnnnnnnnnnnnnnnnnnnnnnnnnnnnnnnnnnnnnnnnnnnnnnnnnnnnnnnnnnnnnnnnnnnnnnnnnnnnnnnnnnnnnnnnnnnnnnnnnnnnnnnnnnnnnnnnnnnnnnnnnnnnnnnnnnnnnnnnnnnnnnnnnnnnnnnnnnnnnnnnnnnnnnnnnnnnnnnnnnnnnnnnnnnnnnnnnnnnnnnnnnnnnnnnnnnnnnnnnnnnnnnnnnnnnnnnnnnnnnnnnnnnnnnnnnnnnnnnnnnnnnnnnnnnnnnnnnnnnnnnnnnnnnnnnnnnnnnnnnnnnnnnnnnnnnnnnnnnnnnnnnnnnnnnnnnnnnnnnnnnnnnnnnnnnnnnnnnnnnnnnnnnnnnnnnnnnnnnnnnnnnnnnnnnnnnnnnnnnnnnnnnnnnnnnnnnnnnnnnnnnnnnnnnnnnnnnnnnnnnnnnnnnnnnnnnnnnnnnnnnnnnnnnnnnnnnnnnnnnnnnnnnnnnnnnnnnnnnnnnnnnnnnnnnnnnnnnnnnnnnnnnnnnnnnnnnnnnnnnnnnnnnnnnnnnnnnnnnnnnnnnnnnnnnnnnnnnnnnnnnnnnnnnnnnnnnnnnnnnnnnnnnnnnnnnnnnnnnnnnnnnnnnnnnnnnnnnnnnnnnnnnnnnnnnnnnnnnnnnnnnnnnnnnnnnnnnnnnnnnnnnnnnnnnnnnnnnnnnnnnnnnnnnnnnnnnnnnnnnnnnnnnnnnnnnnnnnnnnnnnnnnnnnnnnnnnnnnnnnnnnnnnnnnnnnnnnnnnnnnnnnnnnnnnnnnnnnnnnnnnnnnnnnnnnnnnnnnnnnnnnnnnnnnnnnnnnnnnnnnnnnnnnnnnnnnnnnnnnnnnnnnnnnnnnnnnnnnnnnnnnnnnnnnnnnnnnnnnnnnnnnnnnnnnnnnnnnnnnnnnnnnnnnnnnnnnnnnnnnnnnnnnnnnnnnnnnnnnnnnnnnnnnnnnnnnnnnnnnnnnnnnnnnnnnnnnnnnnnnnnnnnnnnnnnnnnnnnnnnnnnnnnnnnnnnnnnnnnnnnnnnnnnnnnnnnnnnnnnnnnnnnnnnnnnnnnnnnnnnnnnnnnnnnnnnnnnnnnnnnnnnnnnnnnnnnnnnnnnnnnnnnnnnnnnnnnnnnnnnnnnnnnnnnnnnnnnnnnnnnnnnnnnnnnnnnnnnnnnnnnnnnnnnnnnnnnnnnnnnnnnnnnnnnnnnnnnnnnnnnnnnnnnnnnnnnnnnnnnnnnnnnnnnnnnnnnnnnnnnnnnnnnnnnnnnnnnnnnnnnnnnnnnnnnnnnnnnnnnnnnnnnnnnnnnnnnnnnnnnnnnnnnnnnnnnnnnnnnnnnnnnnnnnnnnnnnnnnnnnnnnnnnnnnnnnnnnnnnnnnnnnnnnnnnnnnnnnnnnnnnnnnnnnnnnnnnnnnnnnnnnnnnnnnnnnnnnnnnnnnnnnnnnnnnnnnnnnnnnnnnnnnnnnnnnnnnnnnnnnnnnnnnnnnnnnnnnnnnnnnnnnnnnnnnnnnnnnnnnnnnnnnnnnnnnnnnnnnnnnnnnnnnnnnnnnnnnnnnnnnnnnnnnnnnnnnnnnnnnnnnnnnnnnnnnnnnnnnnnnnnnnnnnnnnnnnnnnnnnnnnnnnnnnnnnnnnnnnnnnnnnnnnnnnnnnnnnnnnnnnnnnnnnnnnnnnnnnnnnnnnnnnnnnnnnnnnnnnnnnnnnnnnnnnnnnnnnnnnnnnnnnnnnnnnnnnnnnnnnnnnnnnnnnnnnnnnnnnnnnnnnnnnnnnnnnnnnnnnnnnnnnnnnnnnnnnnnnnnnnnnnnnnnnnnnnnnnnnnnnnnnnnnnnnnnnnnnnnnnnnnnnnnnnnnnnnnnnnnnnnnnnnnnnnnnnnnnnnnnnnnnnnnnnnnnnnnnnnnnnnnnnnnnnnnnnnnnnnnnnnnnnnnnnnnnnnnnnnnnnnnnnnnnnnnnnnnnnnnnnnnnnnnnnnnnnnnnnnnnnnnnnnnnnnnnnnnnnnnnnnnnnnnnnnnnnnnnnnnnnnnnnnnnnnnnnnnnnnnnnnnnnnnnnnnnnnnnnnnnnnnnnnnnnnnnnnnnnnnnnnnnnnnnnnnnnnnnnnnnnnnnnnnnnnnnnnnnnnnnnnnnnnnnnnnnnnnnnnnnnnnnnnnnnnnnnnnnnnnnnnnnnnnnnnnnnnnnnnnnnnnnnnnnnnnnnnnnnnnnnnnnnnnnnnnnnnnnnnnnnnnnnnnnnnnnnnnnnnnnnnnnnnnnnnnnnnnnnnnnnnnnnnnnnnnnnnnnnnnnnnnnnnnnnnnnnnnnnnnnnnnnnnnnnnnnnnnnnnnnnnnnnnnnnnnnnnnnnnnnnnnnnnnnnnnnnnnnnnnnnnnnnnnnnnnnnnnnnnnnnnnnnnnnnnnnnnnnnnnnnnnnnnnnnnnnnnnnnnnnnnnnnnnnnnnnnnnnnnnnnnnnnnnnnnnnnnnnnnnnnnnnnnnnnnnnnnnnnnnnnnnnnnnnnnnnnnnnnnnnnnnnnnnnnnnnnnnnnnnnnnnnnnnnnnnnnnnnnnnnnnnnnnnnnnnnnnnnnnnnnnnnnnnnnnnnnnnnnnnnnnnnnnnnnnnnnnnnnnnnnnnnnnnnnnnnnnnnnnnnnnnnnnnnnnnnnnnnnnnnnnnnnnnnnnnnnnnnnnnnnnnnnnnnnnnnnnnnnnnnnnnnnnnnnnnnnnnnnnnnnnnnnnnnnnnnnnnnnnnnnnnnnnnnnnnnnnnnnnnnnnnnnnnnnnnnnnnnnnnnnnnnnnnnnnnnnnnnnnnnnnnnnnnnnnnnnnnnnnnnnnnnnnnnnnnnnnnnnnnnnnnnnnnnnnnnnnnnnnnnnnnnnnnnnnnnnnnnnnnnnnnnnnnnnnnnnnnnnnnnnnnnnnnnnnnnnnnnnnnnnnnnnnnnnnnnnnnnnnnnnnnnnnnnnnnnnnnnnnnnnnnnnnnnnnnnnnnnnnnnnnnnnnnnnnnnnnnnnnnnnnnnnnnnnnnnnnnnnnnnnnnnnnnnnnnnnnnnnnnnnnnnnnnnnnnnnnnnnnnnnnnnnnnnnnnnnnnnnnnnnnnnnnnnnnnnnnnnnnnnnnnnnnnnnnnnnnnnnnnnnnnnnnnnnnnnnnnnnnnnnnnnnnnnnnnnnnnnnnnnnnnnnnnnnnnnnnnnnnnnnnnnnnnnnnnnnnnnnnnnnnnnnnnnnnnnnnnnnnnnnnnnnnnnnnnnnnnnnnnnnnnnnnnnnnnnnnnnnnnnnnnnnnnnnnnnnnnnnnnnnnnnnnnnnnnnnnnnnnnnnnnnnnnnnnnnnnnnnnnnnnnnnnnnnnnnnnnnnnnnnnnnnnnnnnnnnnnnnnnnnnnnnnnnnnnnnnnnnnnnnnnnnnnnnnnnnnnnnnnnnnnnnnnnnnnnnnnnnnnnnnnnnnnnnnnnnnnnnnnnnnnnnnnnnnnnnnnnnnnnnnnnnnnnnnnnnnnnnnnnnnnnnnnnnnnnnnnnnnnnnnnnnnnnnnnnnnnnnnnnnnnnnnnnnnnnnnnnnnnnnnnnnnnnnnnnnnnnnnnnnnnnnnnnnnnnnnnnnnnnnnnnnnnnnnnnnnnnnnnnnnnnnnnnnnnnnnnnnnnnnnnnnnnnnnnnnnnnnnnnnnnnnnnnnnnnnnnnnnnnnnnnnnnnnnnnnnnnnnnnnnnnnnnnnnnnnnnnnnnnnnnnnnnnnnnnnnnnnnnnnnnnnnnnnnnnnnnnnnnnnnnnnnnnnnnnnnnnnnnnnnnnnnnnnnnnnnnnnnnnnnnnnnnnnnnnnnnnnnnnnnnnnnnnnnnnnnnnnnnnnnnnnnnnnnnnnnnnnnnnnnnnnnnnnnnnnnnnnnnnnnnnnnnnnnnnnnnnnnnnnnnnnnnnnnnnnnnnnnnnnnnnnnnnnnnnnnnnnnnnnnnnnnnnnnnnnnnnnnnnnnnnnnnnnnnnnnnnnnnnnnnnnnnnnnnnnnnnnnnnnnnnnnnnnnnnnnnnnnnnnnnnnnnnnnnnnnnnnnnnnnnnnnnnnnnnnnnnnnnnnnnnnnnnnnnnnnnnnnnnnnnnnnnnnnnnnnnnnnnnnnnnnnnnnnnnnnnnnnnnnnnnnnnnnnnnnnnnnnnnnnnnnnnnnnnnnnnnnnnnnnnnnnnnnnnnnnnnnnnnnnnnnnnnnnnnnnnnnnnnnnnnnnnnnnnnnnnnnnnnnnnnnnnnnnnnnnnnnnnnnnnnnnnnnnnnnnnnnnnnnnnnnnnnnnnnnnnnnnnnnnnnnnnnnnnnnnnnnnnnnnnnnnnnnnnnnnnnnnnnnnnnnnnnnnnnnnnnnnnnnnnnnnnnnnnnnnnnnnnnnnnnnnnnnnnnnnnnnnnnnnnnnnnnnnnnnnnnnnnnnnnnnnnnnnnnnnnnnnnnnnnnnnnnnnnnnnnnnnnnnnnnnnnnnnnnnnnnnnnnnnnnnnnnnnnnnnnnnnnnnnnnnnnnnnnnnnnnnnnnnnnnnnnnnnnnnnnnnnnnnnnnnnnnnnnnnnnnnnnnnnnnnnnnnnnnnnnnnnnnnnnnnnnnnnnnnnnnnnnnnnnnnnnnnnnnnnnnnnnnnnnnnnnnnnnnnnnnnnnnnnnnnnnnnnnnnnnnnnnnnnnnnnnnnnnnnnnnnnnnnnnnnnnnnnnnnnnnnnnnnnnnnnnnnnnnnnnnnnnnnnnnnnnnnnnnnnnnnnnnnnnnnnnnnnnnnnnnnnnnnnnnnnnnnnnnnnnnnnnnnnnnnnnnnnnnnnnnnnnnnnnnnnnnnnnnnnnnnnnnnnnnnnnnnnnnnnnnnnnnnnnnnnnnnnnnnnnnnnnnnnnnnnnnnnnnnnnnnnnnnnnnnnnnnnnnnnnnnnnnnnnnnnnnnnnnnnnnnnnnnnnnnnnnnnnnnnnnnnnnnnnnnnnnnnnnnnnnnnnnnnnnnnnnnnnnnnnnnnnnnnnnnnnnnnnnnnnnnnnnnnnnnnnnnnnnnnnnnnnnnnnnnnnnnnnnnnnnnnnnnnnnnnnnnnnnnnnnnnnnnnnnnnnnnnnnnnnnnnnnnnnnnnnnnnnnnnnnnnnnnnnnnnnnnnnnnnnnnnnnnnnnnnnnnnnnnnnnnnnnnnnnnnnnnnnnnnnnnnnnnnnnnnnnnnnnnnnnnnnnnnnnnnnnnnnnnnnnnnnnnnnnnnnnnnnnnnnnnnnnnnnnnnnnnnnnnnnnnnnnnnnnnnnnnnnnnnnnnnnnnnnnnnnnnnnnnnnnnnnnnnnnnnnnnnnnnnnnnnnnnnnnnnnnnnnnnnnnnnnnnnnnnnnnnnnnnnnnnnnnnnnnnnnnnnnnnnnnnnnnnnnnnnnnnnnnnnnnnnnnnnnnnnnnnnnnnnnnnnnnnnnnnnnnnnnnnnnnnnnnnnnnnnnnnnnnnnnnnnnnnnnnnnnnnnnnnnnnnnnnnnnnnnnnnnnnnnnnnnnnnnnnnnnnnnnnnnnnnnnnnnnnnnnnnnnnnnnnnnnnnnnnnnnnnnnnnnnnnnnnnnnnnnnnnnnnnnnnnnnnnnnnnnnnnnnnnnnnnnnnnnnnnnnnnnnnnnnnnnnnnnnnnnnnnnnnnnnnnnnnnnnnnnnnnnnnnnnnnnnnnnnnnnnnnnnnnnnnnnnnnnnnnnnnnnnnnnnnnnnnnnnnnnnnnnnnnnnnnnnnnnnnnnnnnnnnnnnnnnnnnnnnnnnnnnnnnnnnnnnnnnnnnnnnnnnnnnnnnnnnnnnnnnnnnnnnnnnnnnnnnnnnnnnnnnnnnnnnnnnnnnnnnnnnnnnnnnnnnnnnnnnnnnnnnnnnnnnnnnnnnnnnnnnnnnnnnnnnnnnnnnnnnnnnnnnnnnnnnnnnnnnnnnnnnnnnnnnnnnnnnnnnnnnnnnnnnnnnnnnnnnnnnnnnnnnnnnnnnnnnnnnnnnnnnnnnnnnnnnnnnnnnnnnnnnnnnnnnnnnnnnnnnnnnnnnnnnnnnnnnnnnnnnnnnnnnnnnnnnnnnnnnnnnnnnnnnnnnnnnnnnnnnnnnnnnnnnnnnnnnnnnnnnnnnnnnnnnnnnnnnnnnnnnnnnnnnnnnnnnnnnnnnnnnnnnnnnnnnnnnnnnnnnnnnnnnnnnnnnnnnnnnnnnnnnnnnnnnnnnnnnnnnnnnnnnnnnnnnnnnnnnnnnnnnnnnnnnnnnnnnnnnnnnnnnnnnnnnnnnnnnnnnnnnnnnnnnnnnnnnnnnnnnnnnnnnnnnnnnnnnnnnnnnnnnnnnnnnnnnnnnnnnnnnnnnnnnnnnnnnnnnnnnnnnnnnnnnnnnnnnnnnnnnnnnnnnnnnnnnnnnnnnnnnnnnnnnnnnnnnnnnnnnnnnnnnnnnnnnnnnnnnnnnnnnnnnnnnnnnnnnnnnnnnnnnnnnnnnnnnnnnnnnnnnnnnnnnnnnnnnnnnnnnnnnnnnnnnnnnnnnnnnnnnnnnnnnnnnnnnnnnnnnnnnnnnnnnnnnnnnnnnnnnnnnnnnnnnnnnnnnnnnnnnnnnnnnnnnnnnnnnnnnnnnnnnnnnnnnnnnnnnnnnnnnnnnnnnnnnnnnnnnnnnnnnnnnnnnnnnnnnnnnnnnnnnnnnnnnnnnnnnnnnnnnnnnnnnnnnnnnnnnnnnnnnnnnnnnnnnnnnnnnnnnnnnnnnnnnnnnnnnnnnnnnnnnnnnnnnnnnnnnnnnnnnnnnnnnnnnnnnnnnnnnnnnnnnnnnnnnnnnnnnnnnnnnnnnnnnnnnnnnnnnnnnnnnnnnnnnnnnnnnnnnnnnnnnnnnnnnnnnnnnnnnnnnnnnnnnnnnnnnnnnnnnnnnnnnnnnnnnnnnnnnnnnnnnnnnnnnnnnnnnnnnnnnnnnnnnnnnnnnnnnnnnnnnnnnnnnnnnnnnnnnnnnnnnnnnnnnnnnnnnnnnnnnnnnnnnnnnnnnnnnnnnnnnnnnnnnnnnnnnnnnnnnnnnnnnnnnnnnnnnnnnnnnnnnnnnnnnnnnnnnnnnnnnnnnnnnnnnnnnnnnnnnnnnnnnnnnnnnnnnnnnnnnnnnnnnnnnnnnnnnnnnnnnnnnnnnnnnnnnnnnnnnnnnnnnnnnnnnnnnnnnnnnnnnnnnnnnnnnnnnnnnnnnnnnnnnnnnnnnnnnnnnnnnnnnnnnnnnnnnnnnnnnnnnnnnnnnnnnnnnnnnnnnnnnnnnnnnnnnnnnnnnnnnnnnnnnnnnnnnnnnnnnnnnnnnnnnnnnnnnnnnnnnnnnnnnnnnnnnnnnnnnnnnnnnnnnnnnnnnnnnnnnnnnnnnnnnnnnnnnnnnnnnnnnnnnnnnnnnnnnnnnnnnnnnnnnnnnnnnnnnnnnnnnnnnnnnnnnnnnnnnnnnnnnnnnnnnnnnnnnnnnnnnnnnnnnnnnnnnnnnnnnnnnnnnnnnnnnnnnnnnnnnnnnnnnnnnnnnnnnnnnnnnnnnnnnnnnnnnnnnnnnnnnnnnnnnnnnnnnnnnnnnnnnnnnnnnnnnnnnnnnnnnnnnnnnnnnnnnnnnnnnnnnnnnnnnnnnnnnnnnnnnnnnnnnnnnnnnnnnnnnnnnnnnnnnnnnnnnnnnnnnnnnnnnnnnnnnnnnnnnnnnnnnnnnnnnnnnnnnnnnnnnnnnnnnnnnnnnnnnnnnnnnnnnnnnnnnnnnnnnnnnnnnnnnnnnnnnnnnnnnnnnnnnnnnnnnnnnnnnnnnnnnnnnnnnnnnnnnnnnnnnnnnnnnnnnnnnnnnnnnnnnnnnnnnnnnnnnnnnnnnnnnnnnnnnnnnnnnnnnnnnnnnnnnnnnnnnnnnnnnnnnnnnnnnnnnnnnnnnnnnnnnnnnnnnnnnnnnnnnnnnnnnnnnnnnnnnnnnnnnnnnnnnnnnnnnnnnnnnnnnnnnnnnnnnnnnnnnnnnnnnnnnnnnnnnnnnnnnnnnnnnnnnnnnnnnnnnnnnnnnnnnnnnnnnnnnnnnnnnnnnnnnnnnnnnnnnnnnnnnnnnnnnnnnnnnnnnnnnnnnnnnnnnnnnnnnnnnnnnnnnnnnnnnnnnnnnnnnnnnnnnnnnnnnnnnnnnnnnnnnnnnnnnnnnnnnnnnnnnnnnnnnnnnnnnnnnnnnnnnnnnnnnnnnnnnnnnnnnnnnnnnnnnnnnnnnnnnnnnnnnnnnnnnnnnnnnnnnnnnnnnnnnnnnnnnnnnnnnnnnnnnnnnnnnnnnnnnnnnnnnnnnnnnnnnnnnnnnnnnnnnnnnnnnnnnnnnnnnnnnnnnnnnnnnnnnnnnnnnnnnnnnnnnnnnnnnnnnnnnnnnnnnnnnnnnnnnnnnnnnnnnnnnnnnnnnnnnnnnnnnnnnnnnnnnnnnnnnnnnnnnnnnnnnnnnnnnnnnnnnnnnnnnnnnnnnnnnnnnnnnnnnnnnnnnnnnnnnnnnnnnnnnnnnnnnnnnnnnnnnnnnnnnnnnnnnnnnnnnnnnnnnnnnnnnnnnnnnnnnnnnnnnnnnnnnnnnnnnnnnnnnnnnnnnnnnnnnnnnnnnnnnnnnnnnnnnnnnnnnnnnnnnnnnnnnnnnnnnnnnnnnnnnnnnnnnnnnnnnnnnnnnnnnnnnnnnnnnnnnnnnnnnnnnnnnnnnnnnnnnnnnnnnnnnnnnnnnnnnnnnnnnnnnnnnnnnnnnnnnnnnnnnnnnnnnnnnnnnnnnnnnnnnnnnnnnnnnnnnnnnnnnnnnnnnnnnnnnnnnnnnnnnnnnnnnnnnnnnnnnnnnnnnnnnnnnnnnnnnnnnnnnnnnnnnnnnnnnnnnnnnnnnnnnnnnnnnnnnnnnnnnnnnnnnnnnnnnnnnnnnnnnnnnnnnnnnnnnnnnnnnnnnnnnnnnnnnnnnnnnnnnnnnnnnnnnnnnnnnnnnnnnnnnnnnnnnnnnnnnnnnnnnnnnnnnnnnnnnnnnnnnnnnnnnnnnnnnnnnnnnnnnnnnnnnnnnnnnnnnnnnnnnnnnnnnnnnnnnnnnnnnnnnnnnnnnnnnnnnnnnnnnnnnnnnnnnnnnnnnnnnnnnnnnnnnnnnnnnnnnnnnnnnnnnnnnnnnnnnnnnnnnnnnnnnnnnnnnnnnnnnnnnnnnnnnnnnnnnnnnnnnnnnnnnnnnnnnnnnnnnnnnnnnnnnnnnnnnnnnnnnnnnnnnnnnnnnnnnnnnnnnnnnnnnnnnnnnnnnnnnnnnnnnnnnnnnnnnnnnnnnnnnnnnnnnnnnnnnnnnnnnnnnnnnnnnnnnnnnnnnnnnnnnnnnnnnnnnnnnnnnnnnnnnnnnnnnnnnnnnnnnnnnnnnnnnnnnnnnnnnnnnnnnnnnnnnnnnnnnnnnnnnnnnnnnnnnnnnnnnnnnnnnnnnnnnnnnnnnnnnnnnnnnnnnnnnnnnnnnnnnnnnnnnnnnnnnnnnnnnnnnnnnnnnnnnnnnnnnnnnnnnnnnnnnnnnnnnnnnnnnnnnnnnnnnnnnnnnnnnnnnnnnnnnnnnnnnnnnnnnnnnnnnnnnnnnnnnnnnnnnnnnnnnnnnnnnnnnnnnnnnnnnnnnnnnnnnnnnnnnnnnnnnnnnnnnnnnnnnnnnnnnnnnnnnnnnnnnnnnnnnnnnnnnnnnnnnnnnnnnnnnnnnnnnnnnnnnnnnnnnnnnnnnnnnnnnnnnnnnnnnnnnnnnnnnnnnnnnnnnnnnnnnnnnnnnnnnnnnnnnnnnnnnnnnnnnnnnnnnnnnnnnnnnnnnnnnnnnnnnnnnnnnnnnnnnnnnnnnnnnnnnnnnnnnnnnnnnnnnnnnnnnnnnnnnnnnnnnnnnnnnnnnnnnnnnnnnnnnnnnnnnnnnnnnnnnnnnnnnnnnnnnnnnnnnnnnnnnnnnnnnnnnnnnnnnnnnnnnnnnnnnnnnnnnnnnnnnnnnnnnnnnnnnnnnnnnnnnnnnnnnnnnnnnnnnnnnnnnnnnnnnnnnnnnnnnnnnnnnnnnnnnnnnnnnnnnnnnnnnnnnnnnnnnnnnnnnnnnnnnnnnnnnnnnnnnnnnnnnnnnnnnnnnnnnnnnnnnnnnnnnnnnnnnnnnnnnnnnnnnnnnnnnnnnnnnnnnnnnnnnnnnnnnnnnnnnnnnnnnnnnnnnnnnnnnnnnnnnnnnnnnnnnnnnnnnnnnnnnnnnnnnnnnnnnnnnnnnnnnnnnnnnnnnnnnnnnnnnnnnnnnnnnnnnnnnnnnnnnnnnnnnnnnnnnnnnnnnnnnnnnnnnnnnnnnnnnnnnnnnnnnnnnnnnnnnnnnnnnnnnnnnnnnnnnnnnnnnnnnnnnnnnnnnnnnnnnnnnnnnnnnnnnnnnnnnnnnnnnnnnnnnnnnnnnnnnnnnnnnnnnnnnnnnnnnnnnnnnnnnnnnnnnnnnnnnnnnnnnnnnnnnnnnnnnnnnnnnnnnnnnnnnnnnnnnnnnnnnnnnnnnnnnnnnnnnnnnnnnnnnnnnnnnnnnnnnnnnnnnnnnnnnnnnnnnnnnnnnnnnnnnnnnnnnnnnnnnnnnnnnnnnnnnnnnnnnnnnnnnnnnnnnnnnnnnnnnnnnnnnnnnnnnnnnnnnnnnnnnnnnnnnnnnnnnnnnnnnnnnnnnnnnnnnnnnnnnnnnnnnnnnnnnnnnnnnnnnnnnnnnnnnnnnnnnnnnnnnnnnnnnnnnnnnnnnnnnnnnnnnnnnnnnnnnnnnnnnnnnnnnnnnnnnnnnnnnnnnnnnnnnnnnnnnnnnnnnnnnnnnnnnnnnnnnnnnnnnnnnnnnnnnnnnnnnnnnnnnnnnnnnnnnnnnnnnnnnnnnnnnnnnnnnnnnnnnnnnnnnnnnnnnnnnnnnnnnnnnnnnnnnnnnnnnnnnnnnnnnnnnnnnnnnnnnnnnnnnnnnnnnnnnnnnnnnnnnnnnnnnnnnnnnnnnnnnnnnnnnnnnnnnnnnnnnnnnnnnnnnnnnnnnnnnnnnnnnnnnnnnnnnnnnnnnnnnnnnnnnnnnnnnnnnnnnnnnnnnnnnnnnnnnnnnnnnnnnnnnnnnnnnnnnnnnnnnnnnnnnnnnnnnnnnnnnnnnnnnnnnnnnnnnnnnnnnnnnnnnnnnnnnnnnnnnnnnnnnnnnnnnnnnnnnnnnnnnnnnnnnnnnnnnnnnnnnnnnnnnnnnnnnnnnnnnnnnnnnnnnnnnnnnnnnnnnnnnnnnnnnnnnnnnnnnnnnnnnnnnnnnnnnnnnnnnnnnnnnnnnnnnnnnnnnnnnnnnnnnnnnnnnnnnnnnnnnnnnnnnnnnnnnnnnnnnnnnnnnnnnnnnnnnnnnnnnnnnnnnnnnnnnnnnnnnnnnnnnnnnnnnnnnnnnnnnnnnnnnnnnnnnnnnnnnnnnnnnnnnnnnnnnnnnnnnnnnnnnnnnnnnnnnnnnnnnnnnnnnnnnnnnnnnnnnnnnnnnnnnnnnnnnnnnnnnnnnnnnnnnnnnnnnnnnnnnnnnnnnnnnnnnnnnnnnnnnnnnnnnnnnnnnnnnnnnnnnnnnnnnnnnnnnnnnnnnnnnnnnnnnnnnnnnnnnnnnnnnnnnnnnnnnnnnnnnnnnnnnnnnnnnnnnnnnnnnnnnnnnnnnnnnnnnnnnnnnnnnnnnnnnnnnnnnnnnnnnnnnnnnnnnnnnnnnnnnnnnnnnnnnnnnnnnnnnnnnnnnnnnnnnnnnnnnnnnnnnnnnnnnnnnnnnnnnnnnnnnnnnnnnnnnnnnnnnnnnnnnnnnnnnnnnnnnnnnnnnnnnnnnnnnnnnnnnnnnnnnnnnnnnnnnnnnnnnnnnnnnnnnnnnnnnnnnnnnnnnnnnnnnnnnnnnnnnnnnnnnnnnnnnnnnnnnnnnnnnnnnnnnnnnnnnnnnnnnnnnnnnnnnnnnnnnnnnnnnnnnnnnnnnnnnnnnnnnnnnnnnnnnnnnnnnnnnnnnnnnnnnnnnnnnnnnnnnnnnnnnnnnnnnnnnnnnnnnnnnnnnnnnnnnnnnnnnnnnnnnnnnnnnnnnnnnnnnnnnnnnnnnnnnnnnnnnnnnnnnnnnnnnnnnnnnnnnnnnnnnnnnnnnnnnnnnnnnnnnnnnnnnnnnnnnnnnnnnnnnnnnnnnnnnnnnnnnnnnnnnnnnnnnnnnnnnnnnnnnnnnnnnnnnnnnnnnnnnnnnnnnnnnnnnnnnnnnnnnnnnnnnnnnnnnnnnnnnnnnnnnnnnnnnnnnnnnnnnnnnnnnnnnnnnnnnnnnnnnnnnnnnnnnnnnnnnnnnnnnnnnnnnnnnnnnnnnnnnnnnnnnnnnnnnnnnnnnnnnnnnnnnnnnnnnnnnnnnnnnnnnnnnnnnnnnnnnnnnnnnnnnnnnnnnnnnnnnnnnnnnnnnnnnnnnnnnnnnnnnnnnnnnnnnnnnnnnnnnnnnnnnnnnnnnnnnnnnnnnnnnnnnnnnnnnnnnnnnnnnnnnnnnnnnnnnnnnnnnnnnnnnnnnnnnnnnnnnnnnnnnnnnnnnnnnnnnnnnnnnnnnnnnnnnnnnnnnnnnnnnnnnnnnnnnnnnnnnnnnnnnnnnnnnnnnnnnnnnnnnnnnnnnnnnnnnnnnnnnnnnnnnnnnnnnnnnnnnnnnnnnnnnnnnnnnnnnnnnnnnnnnnnnnnnnnnnnnnnnnnnnnnnnnnnnnnnnnnnnnnnnnnnnnnnnnnnnnnnnnnnnnnnnnnnnnnnnnnnnnnnnnnnnnnnnnnnnnnnnnnnnnnnnnnnnnnnnnnnnnnnnnnnnnnnnnnnnnnnnnnnnnnnnnnnnnnnnnnnnnnnnnnnnnnnnnnnnnnnnnnnnnnnnnnnnnnnnnnnnnnnnnnnnnnnnnnnnnnnnnnnnnnnnnnnnnnnnnnnnnnnnnnnnnnnnnnnnnnnnnnnnnnnnnnnnnnnnnnnnnnnnnnnnnnnnnnnnnnnnnnnnnnnnnnnnnnnnnnnnnnnnnnnnnnnnnnnnnnnnnnnnnnnnnnnnnnnnnnnnnnnnnnnnnnnnnnnnnnnnnnnnnnnnnnnnnnnnnnnnnnnnnnnnnnnnnnnnnnnnnnnnnnnnnnnnnnnnnnnnnnnnnnnnnnnnnnnnnnnnnnnnnnnnnnnnnnnnnnnnnnnnnnnnnnnnnnnnnnnnnnnnnnnnnnnnnnnnnnnnnnnnnnnnnnnnnnnnnnnnnnnnnnnnnnnnnnnnnnnnnnnnnnnnnnnnnnnnnnnnnnnnnnnnnnnnnnnnnnnnnnnnnnnnnnnnnnnnnnnnnnnnnnnnnnnnnnnnnnnnnnnnnnnnnnnnnnnnnnnnnnnnnnnnnnnnnnnnnnnnnnnnnnnnnnnnnnnnnnnnnnnnnnnnnnnnnnnnnnnnnnnnnnnnnnnnnnnnnnnnnnnnnnnnnnnnnnnnnnnnnnnnnnnnnnnnnnnnnnnnnnnnnnnnnnnnnnnnnnnnnnnnnnnnnnnnnnnnnnnnnnnnnnnnnnnnnnnnnnnnnnnnnnnnnnnnnnnnnnnnnnnnnnnnnnnnnnnnnnnnnnnnnnnnnnnnnnnnnnnnnnnnnnnnnnnnnnnnnnnnnnnnnnnnnnnnnnnnnnnnnnnnnnnnnnnnnnnnnnnnnnnnnnnnnnnnnnnnnnnnnnnnnnnnnnnnnnnnnnnnnnnnnnnnnnnnnnnnnnnnnnnnnnnnnnnnnnnnnnnnnnnnnnnnnnnnnnnnnnnnnnnnnnnnnnnnnnnnnnnnnnnnnnnnnnnnnnnnnnnnnnnnnnnnnnnnnnnnnnnnnnnnnnnnnnnnnnnnnnnnnnnnnnnnnnnnnnnnnnnnnnnnnnnnnnnnnnnnnnnnnnnnnnnnnnnnnnnnnnnnnnnnnnnnnnnnnnnnnnnnnnnnnnnnnnnnnnnnnnnnnnnnnnnnnnnnnnnnnnnnnnnnnnnnnnnnnnnnnnnnnnnnnnnnnnnnnnnnnnnnnnnnnnnnnnnnnnnnnnnnnnnnnnnnnnnnnnnnnnnnnnnnnnnnnnnnnnnnnnnnnnnnnnnnnnnnnnnnnnnnnnnnnnnnnnnnnnnnnnnnnnnnnnnnnnnnnnnnnnnnnnnnnnnnnnnnnnnnnnnnnnnnnnnnnnnnnnnnnnnnnnnnnnnnnnnnnnnnnnnnnnnnnnnnnnnnnnnnnnnnnnnnnnnnnnnnnnnnnnnnnnnnnnnnnnnnnnnnnnnnnnnnnnnnnnnnnnnnnnnnnnnnnnnnnnnnnnnnnnnnnnnnnnnnnnnnnnnnnnnnnnnnnnnnnnnnnnnnnnnnnnnnnnnnnnnnnnnnnnnnnnnnnnnnnnnnnnnnnnnnnnnnnnnnnnnnnnnnnnnnnnnnnnnnnnnnnnnnnnnnnnnnnnnnnnnnnnnnnnnnnnnnnnnnnnnnnnnnnnnnnnnnnnnnnnnnnnnnnnnnnnnnnnnnnnnnnnnnnnnnnnnnnnnnnnnnnnnnnnnnnnnnnnnnnnnnnnnnnnnnnnnnnnnnnnnnnnnnnnnnnnnnnnnnnnnnnnnnnnnnnnnnnnnnnnnnnnnnnnnnnnnnnnnnnnnnnnnnnnnnnnnnnnnnnnnnnnnnnnnnnnnnnnnnnnnnnnnnnnnnnnnnnnnnnnnnnnnnnnnnnnnnnnnnnnnnnnnnnnnnnnnnnnnnnnnnnnnnnnnnnnnnnnnnnnnnnnnnnnnnnnnnnnnnnnnnnnnnnnnnnnnnnnnnnnnnnnnnnnnnnnnnnnnnnnnnnnnnnnnnnnnnnnnnnnnnnnnnnnnnnnnnnnnnnnnnnnnnnnnnnnnnnnnnnnnnnnnnnnnnnnnnnnnnnnnnnnnnnnnnnnnnnnnnnnnnnnnnnnnnnnnnnnnnnnnnnnnnnnnnnnnnnnnnnnnnnnnnnnnnnnnnnnnnnnnnnnnnnnnnnnnnnnnnnnnnnnnnnnnnnnnnnnnnnnnnnnnnnnnnnnnnnnnnnnnnnnnnnnnnnnnnnnnnnnnnnnnnnnnnnnnnnnnnnnnnnnnnnnnnnnnnnnnnnnnnnnnnnnnnnnnnnnnnnnnnnnnnnnnnnnnnnnnnnnnnnnnnnnnnnnnnnnnnnnnnnnnnnnnnnnnnnnnnnnnnnnnnnnnnnnnnnnnnnnnnnnnnnnnnnnnnnnnnnnnnnnnnnnnnnnnnnnnnnnnnnnnnnnnnnnnnnnnnnnnnnnnnnnnnnnnnnnnnnnnnnnnnnnnnnnnnnnnnnnnnnnnnnnnnnnnnnnnnnnnnnnnnnnnnnnnnnnnnnnnnnnnnnnnnnnnnnnnnnnnnnnnnnnnnnnnnnnnnnnnnnnnnnnnnnnnnnnnnnnnnnnnnnnnnnnnnnnnnnnnnnnnnnnnnnnnnnnnnnnnnnnnnnnnnnnnnnnnnnnnnnnnnnnnnnnnnnnnnnnnnnnnnnnnnnnnnnnnnnnnnnnnnnnnnnnnnnnnnnnnnnnnnnnnnnnnnnnnnnnnnnnnnnnnnnnnnnnnnnnnnnnnnnnnnnnnnnnnnnnnnnnnnnnnnnnnnnnnnnnnnnnnnnnnnnnnnnnnnnnnnnnnnnnnnnnnnnnnnnnnnnnnnnnnnnnnnnnnnnnnnnnnnnnnnnnnnnnnnnnnnnnnnnnnnnnnnnnnnnnnnnnnnnnnnnnnnnnnnnnnnnnnnnnnnnnnnnnnnnnnnnnnnnnnnnnnnnnnnnnnnnnnnnnnnnnnnnnnnnnnnnnnnnnnnnnnnnnnnnnnnnnnnnnnnnnnnnnnnnnnnnnnnnnnnnnnnnnnnnnnnnnnnnnnnnnnnnnnnnnnnnnnnnnnnnnnnnnnnnnnnnnnnnnnnnnnnnnnnnnnnnnnnnnnnnnnnnnnnnnnnnnnnnnnnnnnnnnnnnnnnnnnnnnnnnnnnnnnnnnnnnnnnnnnnnnnnnnnnnnnnnnnnnnnnnnnnnnnnnnnnnnnnnnnnnnnnnnnnnnnnnnnnnnnnnnnnnnnnnnnnnnnnnnnnnnnnnnnnnnnnnnnnnnnnnnnnnnnnnnnnnnnnnnnnnnnnnnnnnnnnnnnnnnnnnnnnnnnnnnnnnnnnnnnnnnnnnnnnnnnnnnnnnnnnnnnnnnnnnnnnnnnnnnnnnnnnnnnnnnnnnnnnnnnnnnnnnnnnnnnnnnnnnnnnnnnnnnnnnnnnnnnnnnnnnnnnnnnnnnnnnnnnnnnnnnnnnnnnnnnnnnnnnnnnnnnnnnnnnnnnnnnnnnnnnnnnnnnnnnnnnnnnnnnnnnnnnnnnnnnnnnnnnnnnnnnnnnnnnnnnnnnnnnnnnnnnnnnnnnnnnnnnnnnnnnnnnnnnnnnnnnnnnnnnnnnnnnnnnnnnnnnnnnnnnnnnnnnnnnnnnnnnnnnnnnnnnnnnnnnnnnnnnnnnnnnnnnnnnnnnnnnnnnnnnnnnnnnnnnnnnnnnnnnnnnnnnnnnnnnnnnnnnnnnnnnnnnnnnnnnnnnnnnnnnnnnnnnnnnnnnnnnnnnnnnnnnnnnnnnnnnnnnnnnnnnnnnnnnnnnnnnnnnnnnnnnnnnnnnnnnnnnnnnnnnnnnnnnnnnnnnnnnnnnnnnnnnnnnnnnnnnnnnnnnnnnnnnnnnnnnnnnnnnnnnnnnnnnnnnnnnnnnnnnnnnnnnnnnnnnnnnnnnnnnnnnnnnnnnnnnnnnnnnnnnnnnnnnnnnnnnnnnnnnnnnnnnnnnnnnnnnnnnnnnnnnnnnnnnnnnnnnnnnnnnnnnnnnnnnnnnnnnnnnnnnnnnnnnnnnnnnnnnnnnnnnnnnnnnnnnnnnnnnnnnnnnnnnnnnnnnnnnnnnnnnnnnnnnnnnnnnnnnnnnnnnnnnnnnnnnnnnnnnnnnnnnnnnnnnnnnnnnnnnnnnnnnnnnnnnnnnnnnnnnnnnnnnnnnnnnnnnnnnnnnnnnnnnnnnnnnnnnnnnnnnnnnnnnnnnnnnnnnnnnnnnnnnnnnnnnnnnnnnnnnnnnnnnnnnnnnnnnnnnnnnnnnnnnnnnnnnnnnnnnnnnnnnnnnnnnnnnnnnnnnnnnnnnnnnnnnnnnnnnnnnnnnnnnnnnnnnnnnnnnnnnnnnnnnnnnnnnnnnnnnnnnnnnnnnnnnnnnnnnnnnnnnnnnnnnnnnnnnnnnnnnnnnnnnnnnnnnnnnnnnnnnnnnnnnnnnnnnnnnnnnnnnnnnnnnnnnnnnnnnnnnnnnnnnnnnnnnnnnnnnnnnnnnnnnnnnnnnnnnnnnnnnnnnnnnnnnnnnnnnnnnnnnnnnnnnnnnnnnnnnnnnnnnnnnnnnnnnnnnnnnnnnnnnnnnnnnnnnnnnnnnnnnnnnnnnnnnnnnnnnnnnnnnnnnnnnnnnnnnnnnnnnnnnnnnnnnnnnnnnnnnnnnnnnnnnnnnnnnnnnnnnnnnnnnnnnnnnnnnnnnnnnnnnnnnnnnnnnnnnnnnnnnnnnnnnnnnnnnnnnnnnnnnnnnnnnnnnnnnnnnnnnnnnnnnnnnnnnnnnnnnnnnnnnnnnnnnnnnnnnnnnnnnnnnnnnnnnnnnnnnnnnnnnnnnnnnnnnnnnnnnnnnnnnnnnnnnnnnnnnnnnnnnnnnnnnnnnnnnnnnnnnnnnnnnnnnnnnnnnnnnnnnnnnnnnnnnnnnnnnnnnnnnnnnnnnnnnnnnnnnnnnnnnnnnnnnnnnnnnnnnnnnnnnnnnnnnnnnnnnnnnnnnnnnnnnnnnnnnnnnnnnnnnnnnnnnnnnnnnnnnnnnnnnnnnnnnnnnnnnnnnnnnnnnnnnnnnnnnnnnnnnnnnnnnnnnnnnnnnnnnnnnnnnnnnnnnnnnnnnnnnnnnnnnnnnnnnnnnnnnnnnnnnnnnnnnnnnnnnnnnnnnnnnnnnnnnnnnnnnnnnnnnnnnnnnnnnnnnnnnnnnnnnnnnnnnnnnnnnnnnnnnnnnnnnnnnnnnnnnnnnnnnnnnnnnnnnnnnnnnnnnnnnnnnnnnnnnnnnnnnnnnnnnnnnnnnnnnnnnnnnnnnnnnnnnnnnnnnnnnnnnnnnnnnnnnnnnnnnnnnnnnnnnnnnnnnnnnnnnnnnnnnnnnnnnnnnnnnnnnnnnnnnnnnnnnnnnnnnnnnnnnnnnnnnnnnnnnnnnnnnnnnnnnnnnnnnnnnnnnnnnnnnnnnnnnnnnnnnnnnnnnnnnnnnnnnnnnnnnnnnnnnnnnnnnnnnnnnnnnnnnnnnnnnnnnnnnnnnnnnnnnnnnnnnnnnnnnnnnnnnnnnnnnnnnnnnnnnnnnnnnnnnnnnnnnnnnnnnnnnnnnnnnnnnnnnnnnnnnnnnnnnnnnnnnnnnnnnnnnnnnnnnnnnnnnnnnnnnnnnnnnnnnnnnnnnnnnnnnnnnnnnnnnnnnnnnnnnnnnnnnnnnnnnnnnnnnnnnnnnnnnnnnnnnnnnnnnnnnnnnnnnnnnnnnnnnnnnnnnnnnnnnnnnnnnnnnnnnnnnnnnnnnnnnnnnnnnnnnnnnnnnnnnnnnnnnnnnnnnnnnnnnnnnnnnnnnnnnnnnnnnnnnnnnnnnnnnnnnnnnnnnnnnnnnnnnnnnnnnnnnnnnnnnnnnnnnnnnnnnnnnnnnnnnnnnnnnnnnnnnnnnnnnnnnnnnnnnnnnnnnnnnnnnnnnnnnnnnnnnnnnnnnnnnnnnnnnnnnnnnnnnnnnnnnnnnnnnnnnnnnnnnnnnnnnnnnnnnnnnnnnnnnnnnnnnnnnnnnnnnnnnnnnnnnnnnnnnnnnnnnnnnnnnnnnnnnnnnnnnnnnnnnnnnnnnnnnnnnnnnnnnnnnnnnnnnnnnnnnnnnnnnnnnnnnnnnnnnnnnnnnnnnnnnnnnnnnnnnnnnnnnnnnnnnnnnnnnnnnnnnnnnnnnnnnnnnnnnnnnnnnnnnnnnnnnnnnnnnnnnnnnnnnnnnnnnnnnnnnnnnnnnnnnnnnnnnnnnnnnnnnnnnnnnnnnnnnnnnnnnnnnnnnnnnnnnnnnnnnnnnnnnnnnnnnnnnnnnnnnnnnnnnnnnnnnnnnnnnnnnnnnnnnnnnnnnnnnnnnnnnnnnnnnnnnnnnnnnnnnnnnnnnnnnnnnnnnnnnnnnnnnnnnnnnnnnnnnnnnnnnnnnnnnnnnnnnnnnnnnnnnnnnnnnnnnnnnnnnnnnnnnnnnnnnnnnnnnnnnnnnnnnnnnnnnnnnnnnnnnnnnnnnnnnnnnnnnnnnnnnnnnnnnnnnnnnnnnnnnnnnnnnnnnnnnnnnnnnnnnnnnnnnnnnnnnnnnnnnnnnnnnnnnnnnnnnnnnnnnnnnnnnnnnnnnnnnnnnnnnnnnnnnnnnnnnnnnnnnnnnnnnnnnnnnnnnnnnnnnnnnnnnnnnnnnnnnnnnnnnnnnnnnnnnnnnnnnnnnnnnnnnnnnnnnnnnnnnnnnnnnnnnnnnnnnnnnnnnnnnnnnnnnnnnnnnnnnnnnnnnnnnnnnnnnnnnnnnnnnnnnnnnnnnnnnnnnnnnnnnnnnnnnnnnnnnnnnnnnnnnnnnnnnnnnnnnnnnnnnnnnnnnnnnnnnnnnnnnnnnnnnnnnnnnnnnnnnnnnnnnnnnnnnnnnnnnnnnnnnnnnnnnnnnnnnnnnnnnnnnnnnnnnnnnnnnnnnnnnnnnnnnnnnnnnnnnnnnnnnnnnnnnnnnnnnnnnnnnnnnnnnnnnnnnnnnnnnnnnnnnnnnnnnnnnnnnnnnnnnnnnnnnnnnnnnnnnnnnnnnnnnnnnnnnnnnnnnnnnnnnnnnnnnnnnnnnnnnnnnnnnnnnnnnnnnnnnnnnnnnnnnnnnnnnnnnnnnnnnnnnnnnnnnnnnnnnnnnnnnnnnnnnnnnnnnnnnnnnnnnnnnnnnnnnnnnnnnnnnnnnnnnnnnnnnnnnnnnnnnnnnnnnnnnnnnnnnnnnnnnnnnnnnnnnnnnnnnnnnnnnnnnnnnnnnnnnnnnnnnnnnnnnnnnnnnnnnnnnnnnnnnnnnnnnnnnnnnnnnnnnnnnnnnnnnnnnnnnnnnnnnnnnnnnnnnnnnnnnnnnnnnnnnnnnnnnnnnnnnnnnnnnnnnnnnnnnnnnnnnnnnnnnnnnnnnnnnnnnnnnnnnnnnnnnnnnnnnnnnnnnnnnnnnnnnnnnnnnnnnnnnnnnnnnnnnnnnnnnnnnnnnnnnnnnnnnnnnnnnnnnnnnnnnnnnnnnnnnnnnnnnnnnnnnnnnnnnnnnnnnnnnnnnnnnnnnnnnnnnnnnnnnnnnnnnnnnnnnnnnnnnnnnnnnnnnnnnnnnnnnnnnnnnnnnnnnnnnnnnnnnnnnnnnnnnnnnnnnnnnnnnnnnnnnnnnnnnnnnnnnnnnnnnnnnnnnnnnnnnnnnnnnnnnnnnnnnnnnnnnnnnnnnnnnnnnnnnnnnnnnnnnnnnnnnnnnnnnnnnnnnnnnnnnnnnnnnnnnnnnnnnnnnnnnnnnnnnnnnnnnnnnnnnnnnnnnnnnnnnnnnnnnnnnnnnnnnnnnnnnnnnnnnnnnnnnnnnnnnnnnnnnnnnnnnnnnnnnnnnnnnnnnnnnnnnnnnnnnnnnnnnnnnnnnnnnnnnnnnnnnnnnnnnnnnnnnnnnnnnnnnnnnnnnnnnnnnnnnnnnnnnnnnnnnnnnnnnnnnnnnnnnnnnnnnnnnnnnnnnnnnnnnnnnnnnnnnnnnnnnnnnnnnnnnnnnnnnnnnnnnnnnnnnnnnnnnnnnnnnnnnnnnnnnnnnnnnnnnnnnnnnnnnnnnnnnnnnnnnnnnnnnnnnnnnnnnnnnnnnnnnnnnnnnnnnnnnnnnnnnnnnnnnnnnnnnnnnnnnnnnnnnnnnnnnnnnnnnnnnnnnnnnnnnnnnnnnnnnnnnnnnnnnnnnnnnnnnnnnnnnnnnnnnnnnnnnnnnnnnnnnnnnnnnnnnnnnnnnnnnnnnnnnnnnnnnnnnnnnnnnnnnnnnnnnnnnnnnnnnnnnnnnnnnnnnnnnnnnnnnnnnnnnnnnnnnnnnnnnnnnnnnnnnnnnnnnnnnnnnnnnnnnnnnnnnnnnnnnnnnnnnnnnnnnnnnnnnnnnnnnnnnnnnnnnnnnnnnnnnnnnnnnnnnnnnnnnnnnnnnnnnnnnnnnnnnnnnnnnnnnnnnnnnnnnnnnnnnnnnnnnnnnnnnnnnnnnnnnnnnnnnnnnnnnnnnnnnnnnnnnnnnnnnnnnnnnnnnnnnnnnnnnnnnnnnnnnnnnnnnnnnnnnnnnnnnnnnnnnnnnnnnnnnnnnnnnnnnnnnnnnnnnnnnnnnnnnnnnnnnnnnnnnnnnnnnnnnnnnnnnnnnnnnnnnnnnnnnnnnnnnnnnnnnnnnnnnnnnnnnnnnnnnnnnnnnnnnnnnnnnnnnnnnnnnnnnnnnnnnnnnnnnnnnnnnnnnnnnnnnnnnnnnnnnnnnnnnnnnnnnnnnnnnnnnnnnnnnnnnnnnnnnnnnnnnnnnnnnnnnnnnnnnnnnnnnnnnnnnnnnnnnnnnnnnnnnnnnnnnnnnnnnnnnnnnnnnnnnnnnnnnnnnnnnnnnnnnnnnnnnnnnnnnnnnnnnnnnnnnnnnnnnnnnnnnnnnnnnnnnnnnnnnnnnnnnnnnnnnnnnnnnnnnnnnnnnnnnnnnnnnnnnnnnnnnnnnnnnnnnnnnnnnnnnnnnnnnnnnnnnnnnnnnnnnnnnnnnnnnnnnnnnnnnnnnnnnnnnnnnnnnnnnnnnnnnnnnnnnnnnnnnnnnnnnnnnnnnnnnnnnnnnnnnnnnnnnnnnnnnnnnnnnnnnnnnnnnnnnnnnnnnnnnnnnnnnnnnnnnnnnnnnnnnnnnnnnnnnnnnnnnnnnnnnnnnnnnnnnnnnnnnnnnnnnnnnnnnnnnnnnnnnnnnnnnnnnnnnnnnnnnnnnnnnnnnnnnnnnnnnnnnnnnnnnnnnnnnnnnnnnnnnnnnnnnnnnnnnnnnnnnnnnnnnnnnnnnnnnnnnnnnnnnnnnnnnnnnnnnnnnnnnnnnnnnnnnnnnnnnnnnnnnnnnnnnnnnnnnnnnnnnnnnnnnnnnnnnnnnnnnnnnnnnnnnnnnnnnnnnnnnnnnnnnnnnnnnnnnnnnnnnnnnnnnnnnnnnnnnnnnnnnnnnnnnnnnnnnnnnnnnnnnnnnnnnnnnnnnnnnnnnnnnnnnnnnnnnnnnnnnnnnnnnnnnnnnnnnnnnnnnnnnnnnnnnnnnnnnnnnnnnnnnnnnnnnnnnnnnnnnnnnnnnnnnnnnnnnnnnnnnnnnnnnnnnnnnnnnnnnnnnnnnnnnnnnnnnnnnnnnnnnnnnnnnnnnnnnnnnnnnnnnnnnnnnnnnnnnnnnnnnnnnnnnnnnnnnnnnnnnnnnnnnnnnnnnnnnnnnnnnnnnnnnnnnnnnnnnnnnnnnnnnnnnnnnnnnnnnnnnnnnnnnnnnnnnnnnnnnnnnnnnnnnnnnnnnnnnnnnnnnnnnnnnnnnnnnnnnnnnnnnnnnnnnnnnnnnnnnnnnnnnnnnnnnnnnnnnnnnnnnnnnnnnnnnnnnnnnnnnnnnnnnnnnnnnnnnnnnnnnnnnnnnnnnnnnnnnnnnnnnnnnnnnnnnnnnnnnnnnnnnnnnnnnnnnnnnnnnnnnnnnnnnnnnnnnnnnnnnnnnnnnnnnnnnnnnnnnnnnnnnnnnnnnnnnnnnnnnnnnnnnnnnnnnnnnnnnnnnnnnnnnnnnnnnnnnnnnnnnnnnnnnnnnnnnnnnnnnnnnnnnnnnnnnnnnnnnnnnnnnnnnnnnnnnnnnnnnnnnnnnnnnnnnnnnnnnnnnnnnnnnnnnnnnnnnnnnnnnnnnnnnnnnnnnnnnnnnnnnnnnnnnnnnnnnnnnnnnnnnnnnnnnnnnnnnnnnnnnnnnnnnnnnnnnnnnnnnnnnnnnnnnnnnnnnnnnnnnnnnnnnnnnnnnnnnnnnnnnnnnnnnnnnnnnnnnnnnnnnnnnnnnnnnnnnnnnnnnnnnnnnnnnnnnnnnnnnnnnnnnnnnnnnnnnnnnnnnnnnnnnnnnnnnnnnnnnnnnnnnnnnnnnnnnnnnnnnnnnnnnnnnnnnnnnnnnnnnnnnnnnnnnnnnnnnnnnnnnnnnnnnnnnnnnnnnnnnnnnnnnnnnnnnnnnnnnnnnnnnnnnnnnnnnnnnnnnnnnnnnnnnnnnnnnnnnnnnnnnnnnnnnnnnnnnnnnnnnnnnnnnnnnnnnnnnnnnnnnnnnnnnnnnnnnnnnnnnnnnnnnnnnnnnnnnnnnnnnnnnnnnnnnnnnnnnnnnnnnnnnnnnnnnnnnnnnnnnnnnnnnnnnnnnnnnnnnnnnnnnnnnnnnnnnnnnnnnnnnnnnnnnnnnnnnnnnnnnnnnnnnnnnnnnnnnnnnnnnnnnnnnnnnnnnnnnnnnnnnnnnnnnnnnnnnnnnnnnnnnnnnnnnnnnnnnnnnnnnnnnnnnnnnnnnnnnnnnnnnnnnnnnnnnnnnnnnnnnnnnnnnnnnnnnnnnnnnnnnnnnnnnnnnnnnnnnnnnnnnnnnnnnnnnnnnnnnnnnnnnnnnnnnnnnnnnnnnnnnnnnnnnnnnnnnnnnnnnnnnnnnnnnnnnnnnnnnnnnnnnnnnnnnnnnnnnnnnnnnnnnnnnnnnnnnnnnnnnnnnnnnnnnnnnnnnnnnnnnnnnnnnnnnnnnnnnnnnnnnnnnnnnnnnnnnnnnnnnnnnnnnnnnnnnnnnnnnnnnnnnnnnnnnnnnnnnnnnnnnnnnnnnnnnnnnnnnnnnnnnnnnnnnnnnnnnnnnnnnnnnnnnnnnnnnnnnnnnnnnnnnnnnnnnnnnnnnnnnnnnnnnnnnnnnnnnnnnnnnnnnnnnnnnnnnnnnnnnnnnnnnnnnnnnnnnnnnnnnnnnnnnnnnnnnnnnnnnnnnnnnnnnnnnnnnnnnnnnnnnnnnnnnnnnnnnnnnnnnnnnnnnnnnnnnnnnnnnnnnnnnnnnnnnnnnnnnnnnnnnnnnnnnnnnnnnnnnnnnnnnnnnnnnnnnnnnnnnnnnnnnnnnnnnnnnnnnnnnnnnnnnnnnnnnnnnnnnnnnnnnnnnnnnnnnnnnnnnnnnnnnnnnnnnnnnnnnnnnnnnnnnnnnnnnnnnnnnnnnnnnnnnnnnnnnnnnnnnnnnnnnnnnnnnnnnnnnnnnnnnnnnnnnnnnnnnnnnnnnnnnnnnnnnnnnnnnnnnnnnnnnnnnnnnnnnnnnnnnnnnnnnnnnnnnnnnnnnnnnnnnnnnnnnnnnnnnnnnnnnnnnnnnnnnnnnnnnnnnnnnnnnnnnnnnnnnnnnnnnnnnnnnnnnnnnnnnnnnnnnnnnnnnnnnnnnnnnnnnnnnnnnnnnnnnnnnnnnnnnnnnnnnnnnnnnnnnnnnnnnnnnnnnnnnnnnnnnnnnnnnnnnnnnnnnnnnnnnnnnnnnnnnnnnnnnnnnnnnnnnnnnnnnnnnnnnnnnnnnnnnnnnnnnnnnnnnnnnnnnnnnnnnnnnnnnnnnnnnnnnnnnnnnnnnnnnnnnnnnnnnnnnnnnnnnnnnnnnnnnnnnnnnnnnnnnnnnnnnnnnnnnnnnnnnnnnnnnnnnnnnnnnnnnnnnnnnnnnnnnnnnnnnnnnnnnnnnnnnnnnnnnnnnnnnnnnnnnnnnnnnnnnnnnnnnnnnnnnnnnnnnnnnnnnnnnnnnnnnnnnnnnnnnnnnnnnnnnnnnnnnnnnnnnnnnnnnnnnnnnnnnnnnnnnnnnnnnnnnnnnnnnnnnnnnnnnnnnnnnnnnnnnnnnnnnnnnnnnnnnnnnnnnnnnnnnnnnnnnnnnnnnnnnnnnnnnnnnnnnnnnnnnnnnnnnnnnnnnnnnnnnnnnnnnnnnnnnnnnnnnnnnnnnnnnnnnnnnnnnnnnnnnnnnnnnnnnnnnnnnnnnnnnnnnnnnnnnnnnnnnnnnnnnnnnnnnnnnnnnnnnnnnnnnnnnnnnnnnnnnnnnnnnnnnnnnnnnnnnnnnnnnnnnnnnnnnnnnnnnnnnnnnnnnnnnnnnnnnnnnnnnnnnnnnnnnnnnnnnnnnnnnnnnnnnnnnnnnnnnnnnnnnnnnnnnnnnnnnnnnnnnnnnnnnnnnnnnnnnnnnnnnnnnnnnnnnnnnnnnnnnnnnnnnnnnnnnnnnnnnnnnnnnnnnnnnnnnnnnnnnnnnnnnnnnnnnnnnnnnnnnnnnnnnnnnnnnnnnnnnnnnnnnnnnnnnnnnnnnnnnnnnnnnnnnnnnnnnnnnnnnnnnnnnnnnnnnnnnnnnnnnnnnnnnnnnnnnnnnnnnnnnnnnnnnnnnnnnnnnnnnnnnnnnnnnnnnnnnnnnnnnnnnnnnnnnnnnnnnnnnnnnnnnnnnnnnnnnnnnnnnnnnnnnnnnnnnnnnnnnnnnnnnnnnnnnnnnnnnnnnnnnnnnnnnnnnnnnnnnnnnnnnnnnnnnnnnnnnnnnnnnnnnnnnnnnnnnnnnnnnnnnnnnnnnnnnnnnnnnnnnnnnnnnnnnnnnnnnnnnnnnnnnnnnnnnnnnnnnnnnnnnnnnnnnnnnnnnnnnnnnnnnnnnnnnnnnnnnnnnnnnnnnnnnnnnnnnnnnnnnnnnnnnnnnnnnnnnnnnnnnnnnnnnnnnnnnnnnnnnnnnnnnnnnnnnnnnnnnnnnnnnnnnnnnnnnnnnnnnnnnnnnnnnnnnnnnnnnnnnnnnnnnnnnnnnnnnnnnnnnnnnnnnnnnnnnnnnnnnnnnnnnnnnnnnnnnnnnnnnnnnnnnnnnnnnnnnnnnnnnnnnnnnnnnnnnnnnnnnnnnnnnnnnnnnnnnnnnnnnnnnnnnnnnnnnnnnnnnnnnnnnnnnnnnnnnnnnnnnnnnnnnnnnnnnnnnnnnnnnnnnnnnnnnnnnnnnnnnnnnnnnnnnnnnnnnnnnnnnnnnnnnnnnnnnnnnnnnnnnnnnnnnnnnnnnnnnnnnnnnnnnnnnnnnnnnnnnnnnnnnnnnnnnnnnnnnnnnnnnnnnnnnnnnnnnnnnnnnnnnnnnnnnnnnnnnnnnnnnnnnnnnnnnnnnnnnnnnnnnnnnnnnnnnnnnnnnnnnnnnnnnnnnnnnnnnnnnnnnnnnnnnnnnnnnnnnnnnnnnnnnnnnnnnnnnnnnnnnnnnnnnnnnnnnnnnnnnnnnnnnnnnnnnnnnnnnnnnnnnnnnnnnnnnnnnnnnnnnnnnnnnnnnnnnnnnnnnnnnnnnnnnnnnnnnnnnnnnnnnnnnnnnnnnnnnnnnnnnnnnnnnnnnnnnnnnnnnnnnnnnnnnnnnnnnnnnnnnnnnnnnnnnnnnnnnnnnnnnnnnnnnnnnnnnnnnnnnnnnnnnnnnnnnnnnnnnnnnnnnnnnnnnnnnnnnnnnnnnnnnnnnnnnnnnnnnnnnnnnnnnnnnnnnnnnnnnnnnnnnnnnnnnnnnnnnnnnnnnnnnnnnnnnnnnnnnnnnnnnnnnnnnnnnnnnnnnnnnnnnnnnnnnnnnnnnnnnnnnnnnnnnnnnnnnnnnnnnnnnnnnnnnnnnnnnnnnnnnnnnnnnnnnnnnnnnnnnnnnnnnnnnnnnnnnnnnnnnnnnnnnnnnnnnnnnnnnnnnnnnnnnnnnnnnnnnnnnnnnnnnnnnnnnnnnnnnnnnnnnnnnnnnnnnnnnnnnnnnnnnnnnnnnnnnnnnnnnnnnnnnnnnnnnnnnnnnnnnnnnnnnnnnnnnnnnnnnnnnnnnnnnnnnnnnnnnnnnnnnnnnnnnnnnnnnnnnnnnnnnnnnnnnnnnnnnnnnnnnnnnnnnnnnnnnnnnnnnnnnnnnnnnnnnnnnnnnnnnnnnnnnnnnnnnnnnnnnnnnnnnnnnnnnnnnnnnnnnnnnnnnnnnnnnnnnnnnnnnnnnnnnnnnnnnnnnnnnnnnnnnnnnnnnnnnnnnnnnnnnnnnnnnnnnnnnnnnnnnnnnnnnnnnnnnnnnnnnnnnnnnnnnnnnnnnnnnnnnnnnnnnnnnnnnnnnnnnnnnnnnnnnnnnnnnnnnnnnnnnnnnnnnnnnnnnnnnnnnnnnnnnnnnnnnnnnnnnnnnnnnnnnnnnnnnnnnnnnnnnnnnnnnnnnnnnnnnnnnnnnnnnnnnnnnnnnnnnnnnnnnnnnnnnnnnnnnnnnnnnnnnnnnnnnnnnnnnnnnnnnnnnnnnnnnnnnnnnnnnnnnnnnnnnnnnnnnnnnnnnnnnnnnnnnnnnnnnnnnnnnnnnnnnnnnnnnnnnnnnnnnnnnnnnnnnnnnnnnnnnnnnnnnnnnnnnnnnnnnnnnnnnnnnnnnnnnnnnnnnnnnnnnnnnnnnnnnnnnnnnnnnnnnnnnnnnnnnnnnnnnnnnnnnnnnnnnnnnnnnnnnnnnnnnnnnnnnnnnnnnnnnnnnnnnnnnnnnnnnnnnnnnnnnnnnnnnnnnnnnnnnnnnnnnnnnnnnnnnnnnnnnnnnnnnnnnnnnnnnnnnnnnnnnnnnnnnnnnnnnnnnnnnnnnnnnnnnnnnnnnnnnnnnnnnnnnnnnnnnnnnnnnnnnnnnnnnnnnnnnnnnnnnnnnnnnnnnnnnnnnnnnnnnnnnnnnnnnnnnnnnnnnnnnnnnnnnnnnnnnnnnnnnnnnnnnnnnnnnnnnnnnnnnnnnnnnnnnnnnnnnnnnnnnnnnnnnnnnnnnnnnnnnnnnnnnnnnnnnnnnnnnnnnnnnnnnnnnnnnnnnnnnnnnnnnnnnnnnnnnnnnnnnnnnnnnnnnnnnnnnnnnnnnnnnnnnnnnnnnnnnnnnnnnnnnnnnnnnnnnnnnnnnnnnnnnnnnnnnnnnnnnnnnnnnnnnnnnnnnnnnnnnnnnnnnnnnnnnnnnnnnnnnnnnnnnnnnnnnnnnnnnnnnnnnnnnnnnnnnnnnnnnnnnnnnnnnnnnnnnnnnnnnnnnnnnnnnnnnnnnnnnnnnnnnnnnnnnnnnnnnnnnnnnnnnnnnnnnnnnnnnnnnnnnnnnnnnnnnnnnnnnnnnnnnnnnnnnnnnnnnnnnnnnnnnnnnnnnnnnnnnnnnnnnnnnnnnnnnnnnnnnnnnnnnnnnnnnnnnnnnnnnnnnnnnnnnnnnnnnnnnnnnnnnnnnnnnnnnnnnnnnnnnnnnnnnnnnnnnnnnnnnnnnnnnnnnnnnnnnnnnnnnnnnnnnnnnnnnnnnnnnnnnnnnnnnnnnnnnnnnnnnnnnnnnnnnnnnnnnnnnnnnnnnnnnnnnnnnnnnnnnnnnnnnnnnnnnnnnnnnnnnnnnnnnnnnnnnnnnnnnnnnnnnnnnnnnnnnnnnnnnnnnnnnnnnnnnnnnnnnnnnnnnnnnnnnnnnnnnnnnnnnnnnnnnnnnnnnnnnnnnnnnnnnnnnnnnnnnnnnnnnnnnnnnnnnnnnnnnnnnnnnnnnnnnnnnnnnnnnnnnnnnnnnnnnnnnnnnnnnnnnnnnnnnnnnnnnnnnnnnnnnnnnnnnnnnnnnnnnnnnnnnnnnnnnnnnnnnnnnnnnnnnnnnnnnnnnnnnnnnnnnnnnnnnnnnnnnnnnnnnnnnnnnnnnnnnnnnnnnnnnnnnnnnnnnnnnnnnnnnnnnnnnnnnnnnnnnnnnnnnnnnnnnnnnnnnnnnnnnnnnnnnnnnnnnnnnnnnnnnnnnnnnnnnnnnnnnnnnnnnnnnnnnnnnnnnnnnnnnnnnnnnnnnnnnnnnnnnnnnnnnnnnnnnnnnnnnnnnnnnnnnnnnnnnnnnnnnnnnnnnnnnnnnnnnnnnnnnnnnnnnnnnnnnnnnnnnnnnnnnnnnnnnnnnnnnnnnnnnnnnnnnnnnnnnnnnnnnnnnnnnnnnnnnnnnnnnnnnnnnnnnnnnnnnnnnnnnnnnnnnnnnnnnnnnnnnnnnnnnnnnnnnnnnnnnnnnnnnnnnnnnnnnnnnnnnnnnnnnnnnnnnnnnnnnnnnnnnnnnnnnnnnnnnnnnnnnnnnnnnnnnnnnnnnnnnnnnnnnnnnnnnnnnnnnnnnnnnnnnnnnnnnnnnnnnnnnnnnnnnnnnnnnnnnnnnnnnnnnnnnnnnnnnnnnnnnnnnnnnnnnnnnnnnnnnnnnnnnnnnnnnnnnnnnnnnnnnnnnnnnnnnnnnnnnnnnnnnnnnnnnnnnnnnnnnnnnnnnnnnnnnnnnnnnnnnnnnnnnnnnnnnnnnnnnnnnnnnnnnnnnnnnnnnnnnnnnnnnnnnnnnnnnnnnnnnnnnnnnnnnnnnnnnnnnnnnnnnnnnnnnnnnnnnnnnnnnnnnnnnnnnnnnnnnnnnnnnnnnnnnnnnnnnnnnnnnnnnnnnnnnnnnnnnnnnnnnnnnnnnnnnnnnnnnnnnnnnnnnnnnnnnnnnnnnnnnnnnnnnnnnnnnnnnnnnnnnnnnnnnnnnnnnnnnnnnnnnnnnnnnnnnnnnnnnnnnnnnnnnnnnnnnnnnnnnnnnnnnnnnnnnnnnnnnnnnnnnnnnnnnnnnnnnnnnnnnnnnnnnnnnnnnnnnnnnnnnnnnnnnnnnnnnnnnnnnnnnnnnnnnnnnnnnnnnnnnnnnnnnnnnnnnnnnnnnnnnnnnnnnnnnnnnnnnnnnnnnnnnnnnnnnnnnnnnnnnnnnnnnnnnnnnnnnnnnnnnnnnnnnnnnnnnnnnnnnnnnnnnnnnnnnnnnnnnnnnnnnnnnnnnnnnnnnnnnnnnnnnnnnnnnnccgtcattctgagcgtcagcgaagaatccagtccgtgattcttaatagattagggatgcacaggatgatgaagatgaaaaagggattaggttttagggttcaaaaaggttgctaactaactgcggattaaagagttggaacaccggattcatccggtcgtaggtgccagattcatctggcacaatgttcttccgaccacccaactctgcccaccagcacccaaacccgcgcccagaccgtcattctgagcgtcagcgaagaatccaggccgtgattcttaatagattagggatgcacaggatgatgaagatgaaaaagggattaggttttagggttcaaaaaggttgctaactaactgcggaataaagagttggaacaccggattcatccggtcgtaggtgccagattcatctggcacaatgtacctctgaccacccaactccgcccaccagcacccaaacccgcgccaacccgtcattctgaacgaagtgaagaatccaggccgtggaaaaagggcttttactatccatccctcttcgctctttaggcagaaaacctgtgcccatgagtgtcatcctggagcaacagcgataggatccagtccctgcagttttacaggccttgtgcgcagcaaaacgctaaaacccacaaccccattatatagaacgagtcccttgaaaaagacccgcaaaaccctaaacctttgtgaaccttatgcttgcctttgaaacataagcgatactaagggcggcaaccaagggcgtacacttaaagtgtgcttacgagaccacataagcccgcaatagcggtattgttcgagcaggcagccaattcacatagtctggtttgccaaaagaacattccttatcaataaggcctggattcttcgctgacgctcagaatgacgggctggtctgggtttgggaggtgaaaaggcgagatggagacctggagacggggagactgtacttcagtagaaagtaaaaagttgtcagttttatggcagtatgcgcagcgaaatcccaaaaccttaaaatctgcgttatcggcgtaatctgcgtgacactctatccgcgtaaaccaaaaaacccgggagacaagctcccgggtccattcttatacctgtatcgccaggaatcagttcttggctttcacatagtagaatttcatgtcggctggagcctgggtccactcggttccggtccagtttccttccagcagtatgtagccgctgtaaggatcgttggagccatatatgtcgtaggcggtggcgccggcaacggggttccagttgagtttgatgttgtttccatccttggtgatggtgaccacaggtgcttccagtccttccgtgtaggcttcgaagtcgctcaggaagcgcggtgagatctgcatggttgcgttgaattgacccgccaggcaggtgatgttcacaggaacagtatgcaccgcagtgttggcatagtctgtattgacgaaagtgcgcattacggcgctgccggaggggtcggtgacattgatgttctgggcagtggcaggataactttgaaacacggtgtcatccacattcacgttcatcaccttgatcagctttgcctggtcggcgctggtgaggcttgccagggtgcgaacttcgggaaccaccacgttgtttgaggaagtggcggcgccggggtcggctttgggcacaaactgcaggagtcccgaatacaaggtcagggaaccgctgatgccggtgatgccgtcgtagaggttgtaggtgctggtgataattccagccaagtcatcaatgacgatggcggcggtggcgtcctggatatacttggtgttgcgattggcgttttgataggtgagcacagcttctcccaccaggcgataaatgtcactggtgtttacaggtttagtgcgcagttcggcgatgtcctgcacatcgatggggaagttgtaaacctttgtggcaaccgtgcttgagatcataccttccgctgtggcatacgccttcaccgtggtgttttgagaaacgttgaagggagccagatacaaagcaccattctggatggggtcgctgccgtcggtggtgtagtagatgtcggcaccgtcagttgcacaggtgatgctgacgttaaacggggcataataggtgcctgaatcaggagaaatctcaggcagttccaccacttcttcaccgggtgcgaagatatgccagcccaaattggtaatcgtatcaatcggatacacgtcccattcggcggcgagggtggggaagccagcgtcggggttttccgtcactccacccgtaacggcggctttgcgcactaaagttttgtccagggtgctataaccgccgtctgcagtccaagctgtgccgggatcttcaccgatggtgccaaagatgtccacataaacttcatcttcgcccacaattttcagcaaagcaagggcatcgttaccattgaagtttgtggttgcgctgttaatggtttttaaagcctgcagcgctgcacccgcttgactgtggacaagcacataaacgctgccatggttcagaattgtgccggattcgaaggtttcggtgctggttggggtggtgcctccattggcaaaaagcttaaccttgtaatttgccaaatccactgcagctccggtgccgttgaagatctcgatggctttgttgttgctgctgccttcgatatattcggagaagaagaggtctgtggcatattggtctcccgagggcgggattgccgttccgcttacgggcagattctcagtgcttgctcccggtgtttcgtggacgatgtttttgctatactgtcccaccacgcttgcattcatgcgcacataaatcgttccattgaagttgttgggcaaggtgagttcatcagtccagtttccggttccggtttcgctgagttcgaaggggctttccacctccacttcaatattggccaatgcgcccgtagcgctgaggctataggattgaaccgcggagggactgccaatcgtttgttcaaaagcatccaggcttgcaacaatgttgaaggtcacatcgggagggaaggtttcgccttccacgcggatgctcaccggagcagcgccggagctggtgtgaacaatactgccggcgtgttcgccaagttcggaactgacgaggcgcacatagatcttgtcatcaaaagtggcgggaacctgaattgggtttccccagccttgttctgcatcataggacacttcaaaaccggtgggagcggtgatggtgatgggtcccaccaggttttcgccgctcaggttataataggaaatttcttccgaaggggttccggcaatgtttgccaaaggatccggctcaccagaaacgtggatgaaacggggttccggggtttcgctgctccagaggagtgcccaatcgttcgtcacacggatgccgtcaaaaatggcatagggagtgtttgcggtttgcctgatggcaattgcgccaattccggtggaaccgatatcggcctcattggtaatagggctcaaagttggagtcggctcgttgggaccgatgacggggttgatccagccggtgacgatatcgtttgtggttccgggcacgaactcatacttcaaaaccacaagataggtggttcccggtgcgtagtcataatctgtataaacaacatttgccccggcattcgattgttttgtgaggccaaaacgaatattgtcgttggcgtctttgcttacaaagaatttggctttaaaatcactggtgctgttggcagccataaagtgatagacatagtctccgtttccggtgctggcatcggtcacgttaatcaggaaagaggtgtaaacttctccgcttgtttggggcacaaaagctctgtttacgtcttcaccatttccaagagtttgacccgcataaccgctggaggggggatagtttggatagatgaggttgatgtctaccacggtgggagaattgttacctgctccgctatgagctgtccagccgttttcaaccaaggtggtgccgacttcatatacaaagttttcttccatgagaaggacgggctcttccggctcttccggttcataaaccgtgccgctcactgccatattaacatctgatgcgccggtgctgctgtgggtgatgtttccggaatattcgccggcggttgtgccaatcaggcgcacataaaccgaaccgttgtagctggatgagagggaaaggctgccgctgtagctgctgccatcgctggaaatttcaaagccggcgggagctgccacgctgatattcgcagtgaggttgctgccggaaaggctgtaagtttgagccagggaagggctgcccacctcagtgctaaaagctgtgaggctgccgcttacggaaataatgggtgtgggggttccgccgctataaccggtccagctcagattatcgattacaagctgtctgtaattacttccagttcctgtagtactcttgattgaaataactacatctcctgggatattcacgttgttaaccgtaaaagtgtggatggtgtcatcagcgcctgaagtgccaccaaaggtttgagaatcggcgacccaatcaccattgacataaagagcaacttggcgatcgcccgcgcctgtgaaagctttccgcatttgcaccgaaaaatcgccaattccgccggggatagaatttgaataaacttcgctttcttttcctaaacttctcagaagcaatcctttgtcatcaattggataactttgttccccagagcagtgaacatagttccaagtgatgttgttatctcccacatagttgccgttaaaataattgcttccggacaacgtgtggttctcaaaagtttccaaaccttgagcccaaacaatgccaagggcaaagatgaggctaaaggcgataagtagttttttgaacattttcatctccttgcttaggttctgataatctcatggcgcggcttttgaggcctgccgccgtttataaaacatcgtaaaataggtccggcatctggcacagagccggatatgataaattataagtcaaagcggctcttttacaagcagccacattttccctatttaggtcaaaatccaccggaggggtttatccgtcaatagaattctggcattttttaggcaaatagcggggctttattttctatcctgcctaaattatggattgcgcgcgcgtgggatgcggattatcatttatgatatgagaaaaatcaattataaggaaaaggaaacacaatgaagggacttggccgggggtggcgaggatggataaaatatttcttgaagataaggagatggtacgacaatgtacattctcattatgtttgccttggcgcctggcttcacatcttacaaatactagaaaattgatgataaaatatatatggaggagagctcaatgtataatttgcttgaacaagattgggtgagggtgctctaccgcagcggagaacctaagctaatctcgctatcgagactgcatcgggatgcggataaattgcatcttgcctacagtaatcccatggaccggctggcggttttccgctttcttctcgctttgggctattggtgttttgccaatacgaaccaaacaccggcacgagataaacccatacctgaagcatggctgtcctggctggaggagaacaagcagtatttgaaactttatggtgacggtcccaggatgtatcaggacccgggcgttaaacgcacacgtcccatcaccgacttgctgcacgaaattcccacgggaaacaatctttcgcatttcaaacacaccttggactatgtctccggcttgtgcctgccctgctgcatacaaggattgctgcgtttccccatttatgcaacctcgggattgccacaactcaaggccagcattaacggcatgcccccattttatgccctgccatgggggaacactctggcagaaactctttacctgaattgggagccacgcgaattgatgggaaccccggcctgggttttcaacaccgttgaccccgaagacggccctgtgccactcttggagggtcttacttcacttgccaggcgctgtgtattacatgaccccatacccggagatggcgcctgttccgcatgtggcgaccgaagcggaagcttggtatattcctgtggttacgacacggctggtgttgttgccaatcccatgtgggaagacccgcacgtatgctacgatgtcaaaaaaaccaaagcaaacaaggcgttgaatttaatctctgaaaaaccaatgatgcaggatagaaactggcaacgtgcattcactggttcttccaagttggagtccggcgatgaaagcatcaatctgctctgcattggagtatcagttaaccaagccgtcataaatgacgtgtgggagtccaccataagaattccgccccgggaagccggaaaagaccccaaaagcataccgaattggacttggattaaccgtcgacttgttggtggatatgaaagaaacagattgtattgggccgataaatcagtttccggaaaacccagggctccgctcagtgaatcgctcatcagcgcagtttctccgcatattcttcattatgcgattcaggagacgggtggttttttgccggataacggtgaattgcccaaatcggtacagattgagtatagaaacatgctgaaagctgttgccaaatcccaggcaccggctgtcacaatagaggatgccatcgcgtccaagtttgtgcataatcagcgtccacagcttgagcaagccaaagcttccaagcaggataaaaaggaggaccaagttgattgaaacatccacagctcaattcatcaaaagaattgcagaactgaagtctggagacctgggtcggctgagacaattgagaggttgtgacctgcatgagaatctggacgggttcgacctgttcaccggcctgtggtggacattgagaaaaaactcgccccgggcgccccgacgtgagattgcctggctcgttaccaaactgtatgcgcagttcccattctctcaagaggacgggctaaccttgcctgtaatccttggacgtatttacaggactctggcaacgcaaaaggaaaaacgaatcttcgccatgaggacggatgccattctgcaagcgcaggcaaaccagttggaacaccccttaagctgggccctgcggatgcttgccctgtatggctacgcttcgctggattggattcaacttaccgacgacctttcggtttggcatgaaatagtgcgacaccgatggacggaggcatttctaacacaatcatcaaaggacaaaaacaaggagaattaaaatgttaatcgaaatgcacatgattcaaaaccacagcccggcaaatctcaaccgggacgaccttggcgcgcccaagacctgttatttcggcggagtgctacgttcacgcatttccagccaatgcatcaaacgcagcatcagaaccagcgatgattttcagactctgcagggcggggttcgcacacgcaggctggtggaacttatccagctggaagctggggacacagattgcaggaaaagagcacaggaaattctgacctattgcggatttaaacatgaaaaagacaacagcaaaatgctgattttcatgtccagagacaaggtgaaataccttgccgagattatcttggatgaatccctggaaatagcagacgctgcccagaaggttgccgatgtgattacccaggccacgtgttcccccgatattgcgctttttggaaggatgttggaacctgaaacaagcaagactaaatggagagatacaacagtggaggcagccatgcaggttgcacacgccctttccacacacgccgcccgtccggaaatcgattattatgtggcggcagatgacgttaagggagaagatgccggtgccggctttgttgacgaagcgatgtttgcatccgcctgcttctataaatatttctccattgattgggaccaactggttaaaaatttgaaaggcaacgaagaactcgccgcacaaacagttggggcatttatcaagtctgctgcgctcaccaatcccagcggcaaacaaaacagtttcgcagcccataacccgcccgatggcattttggtggaattcaaggatacacccgtcagttatgccaatgctttcgttcgtcccgtaaagcttaccgccgaatcggacttggtggaactcagcataggccaactcgccaactatgttaaagatgtaagcgaagcatattatcccggccacatggaaggcaacgcattttggttctctcccaacggacgccatcccttgttaccacaagacggggacatacaagccgagcaagttggacaactggaagaactgataaagaaaacggttcataaatgcggttatgagtgggaagccatcaagcaaaaaaaagtagaaggctgatatgagcgccaacaccctattcctaagactggagggaccacttcaatcctggggcgggcatgaggcgaaattttccattcgccgcacttctgatgctcccaccaaatcaggagtctttggcttgctttgcgccgcactgggaattggcagagtcgaagcaggtgaaagctgcctgcccgaactggcgaacttacgcatgggagtgcgcatagacaggctcggtgtccgctggtgggattaccacaccgtgaacgctgggattccgatgcttaaatctgggctagaggcgtctgaagacctcagcgatgtgggcaaagccagggcagaccgactgcttaaaaaagaactgagtttcgacaaacgcgggttgctcagccgtcgcgaatatctggcggatgccagttttctggtggccttgcagggtgaaccttcaacagttcaaaaactggcggaagctctgcaaaaacctgtctggacactatatctgggcagaaagacctgcacaccatcacgccctgtgggagagcatacccccggtaaatatgcgagccttgaggaagcattgttggccatacccgtgcaggtgagggataaacacgaaaccctgccccagtccctccaatgtgttctggactggattccggcttatgatggtgaacccgctccggattgcgcggaaatccactacgacctacccatgtcttttgaccctccccggcatttgccgagatttgtgattcgccgtgaactgcccttaagtgtagatatcgaaacacaacaggttatcattggaagaccctggcgtccggcacgcagtagggccgattacacaaacactcaatataagagagtccgcgcagaacgtctggtgatggatgtcgggctatgcatggtatgcaaggcgcctgccacaacagtgcaacacgtaaactatcgtcgcactggagggagggaagagcctgaagatttgcgcgccctgtgtcggctgtgccacgacgcatgcaccatgctggaatatggcagcggcatgaccatggaccgcatagacccgtgtgaccccgcctggcgtaaccgcatcataagcaaacgcaatgaaatcatcgaattccgctcgctggaacaacgcagacgaaagcttgaccccaaggaggaaaacggatgatgtatctttctcaattactcatagataccggtggaaatccggacagactcagaccgggacgttcgtggctcaacaatatttacaacgtccaccgcaggctttccatggcctttcccatgcggcaacgaaaagatggtgacccccggttcctgcagccttttaacccggctgactttgagcgtcaccgctttctgttcagggtggacaacaacatcgacggagaggaaaccagagccatggttctggtccagtcatcaatactgccggattggaactacgccttccaaaacgccaccggctttttggcggctcctcctcaggtaaaagaatacaccccaaatttttcccccggacagcagctgcgcttccgcatcctcatcaacgccagcgtaaagcgcaaaatcgaagaaatgaaagacggggactccggaagagttaagacggggaaagtgctgcataagcgtgttgccttcacttgggatgctgatgtttccccttccgatgcacttgccgaatggttcgccaaaaaggcgtccaaactggggtttacgccaattaaaacagagctggttaagcttggctggatatatggctccaaacctgaaccgcgaggtgaaagaccacgaagagaaaatgaataccgccccctgaaatatcgttctgcactgctggaaggatatcttaaagtggatgagccggagttattcaagaagactttggtcacgggaattggcagtgcaaaaagcatgggatttgggctactttccgtaattcccacacaagatgcgtaacaaagacctgcgctccatcccaaagatgagagaccgcatcacctacctgtatgtggaacatgcaaaggtggataaaaaacataaatccatagcctttcatgatgccatgggttccacacaggtgccatgtgctggactggctcttttgatgctcgggcccggcgtatccattactcatgccgccataatggtgttggccgaatgtggttgtcttgttgcctgggtgggtgaacaaggcgttcggttttatgcttcaggcgccggcaccacccgcagttctgcaaacctgatgcgtcaagctgccgcatgggctaatcaggataaacatatgaaaatagtgcgcacgatgtacgagatgaggttcatggaaaaactggacacctcatatacccttgcccagattaggggtaaggagggtgcgagagtgcgagacacatatttcaggttgtccaaagaatatggagtcaccatgaaggccagagaataccaaagagacaattggattaaaacagaccctgtcaaccgtgcaatttccgtggcaaactcgtgcctatacggaatatgtcatgctgcaatagtggctgcgggttattctactgccttgggctttatccatacgggaaaacaactctcgttcgtatacgatattgcagacctttataagatggaaacttcagtgcccgctgcctttatggcaacagctgaaggaagtgacagccttgaccggagaacgcgaatagcctgtcgtgaccaattccatcaatttggtttgctgaaaaaaatcgtcgccgacatccatgcccttttcgacattttggaaactccggatgatgaacccgacctggtggatatcgatgccgcagcacccggtgggctgtggaacccggataaaagtataagtccaggcgggcaatcatggggtttggattcacaaggaactgaagatgatggttctgattcttgaaaatgttccaatctcactccgtggtgaaatcacccgttggttgcttgaaataaaagcaggcgtatttgtcggcaacgtgtcagctctggtcagagaaaagatatgggataaagtcaggtcagattgtgccggcggcacttgcctcatggtcttcagtaaacattgcgaacaaggctttgacataaagttttggggcgctgcaggaaaaattgtcacagaatgggaaggtttaaaacttatgactaaacatccgtaaacgatacttgacatagctccaacagcagaaaaccctttatttacatagtgtattccccacgtgtgtgggggtgaaccgacaaatggtaaagccattttttctgtaggtaagtattccccacgtgtgtgggggtgaaccgactttatcgaattttttgagagccattatttagtattccccacgtgtgtgggggtgaaccgtatgacccaatgaccacgagccaggagttgaagtattccccacgtgtgtgggggtgaaccgacagaagcgttatcaataccaataattctgccgtattccccacgtgtgtgggggtgaaccggcaagacgggagcttatgtgcttgtctgtcgtgtattccccacgtgtgtgggggtgaaccggcaggatgacgggcaggtgatggatatatatggtattccccacgtgtgtgggggtgaaccggaactggaaatcgaagccatccaagccaacctgtattccccacgtgtgtgggggtgaaccgcaaagcattgcggaaatcaaggcgctggacttgtattccccacgtgtgtgggggtgaaccgaacgcaacaaaataagccagcacgcgccttgtgtattccccacgtgtgtgggggtgaaccgccagtatctccctcagctgcccatacttaattgtattccccacgtgtgtgggggtgaaccggtccttaggggtgcgcaagtaaggcaggattggtattccccacgtgtgtgggggtgaaccggatcaggtggacgtgaaagcgctgttgaagctgtattccccacgtgtgtgggggtgaaccaagcaagaaactgagcgggacgcagctcaaggcgtattccccacgtgtgtgggggtgaaccgataagagaccgttgctgtcagacctgagagaagtattccccacgtgtgtgggggtgaaccgaagcatttgatacgtcacctcataggcaggcagtattccccacgtgtgtgggggtgaaccgtgggttcactacctgaaagaaaagaacaaagagtattccccacgtgtgtgggggtgaaccggtgtccgggctatagccctctttggtgatgctgtattccccacgtgtgtgggggtgaaccgcgttcggctccttcggtccccgtggcggcttggtattccccacgtgtgtgggggtgaaccgctggcataattaagtttgtgctgttccgatatgtattccccacgtgtgtgggggtgaaccgatttggagccgcagacgccggatgcgggtgcggtattccccacgtgtgtgggggtgaaccgctgcctccctcgcttgccaaggccagggcggggtatttccccacgtgtgtgggggtgaaccgcagggctcgaccaatgagcaagaccaagcagagtattccccacgtgtgtgggggtgaaccgaactgtatggggacggatacgccctcaagcacgtattccccacgtgtgtgggggtgaaccggaaatccgccaggattatacgctgaccagtgggtattccccacgtgtgtgggggtgaaccgaaaaagaaaagaaaaagaagagctgcgctcaagtattccccacgtgtgtgggggtgaaccgtggctgaacggggattggaatgataacttgccgtattccccacgtgtgtgggggtgaaccggacgccccgccttgggcaaattggctggcgaggtattccccacgtgtgtgggggtgaaccggcgagggtggtgatgcgggccgcggcgttgcggtattccccacgttgtgggggtgaaccgaggtaaatgaaggtggaaacctataccgcaagtgtgccccactctcgtgtggctcttcaaggcattcccccaaaaaagtggggaattgtagttgtagcagtatgtttatcagatagatagcttatatttctgtccattaatttgtgttttcggatgcaaatcgggttgtctatgcaca

SEQ ID NO: 497 - DNA, 105710 bp, Artificial Sequence
  Synthetic Oligonucleotide
  misc_feature (1)..(93034): n is a, c, g, or t
nnnnnnnnnnnnnnnnnnnnnnnnnnnnnnnnnnnnnnnnnnnnnnnnnnnnnnnnnnnnnnnnnnnnnnnnnnnnnnnnnnnnnnnnnnnnnnnnnnnnnnnnnnnnnnnnnnnnnnnnnnnnnnnnnnnnnnnnnnnnnnnnnnnnnnnnnnnnnnnnnnnnnnnnnnnnnnnnnnnnnnnnnnnnnnnnnnnnnnnnnnnnnnnnnnnnnnnnnnnnnnnnnnnnnnnnnnnnnnnnnnnnnnnnnnnnnnnnnnnnnnnnnnnnnnnnnnnnnnnnnnnnnnnnnnnnnnnnnnnnnnnnnnnnnnnnnnnnnnnnnnnnnnnnnnnnnnnnnnnnnnnnnnnnnnnnnnnnnnnnnnnnnnnnnnnnnnnnnnnnnnnnnnnnnnnnnnnnnnnnnnnnnnnnnnnnnnnnnnnnnnnnnnnnnnnnnnnnnnnnnnnnnnnnnnnnnnnnnnnnnnnnnnnnnnnnnnnnnnnnnnnnnnnnnnnnnnnnnnnnnnnnnnnnnnnnnnnnnnnnnnnnnnnnnnnnnnnnnnnnnnnnnnnnnnnnnnnnnnnnnnnnnnnnnnnnnnnnnnnnnnnnnnnnnnnnnnnnnnnnnnnnnnnnnnnnnnnnnnnnnnnnnnnnnnnnnnnnnnnnnnnnnnnnnnnnnnnnnnnnnnnnnnnnnnnnnnnnnnnnnnnnnnnnnnnnnnnnnnnnnnnnnnnnnnnnnnnnnnnnnnnnnnnnnnnnnnnnnnnnnnnnnnnnnnnnnnnnnnnnnnnnnnnnnnnnnnnnnnnnnnnnnnnnnnnnnnnnnnnnnnnnnnnnnnnnnnnnnnnnnnnnnnnnnnnnnnnnnnnnnnnnnnnnnnnnnnnnnnnnnnnnnnnnnnnnnnnnnnnnnnnnnnnnnnnnnnnnnnnnnnnnnnnnnnnnnnnnnnnnnnnnnnnnnnnnnnnnnnnnnnnnnnnnnnnnnnnnnnnnnnnnnnnnnnnnnnnnnnnnnnnnnnnnnnnnnnnnnnnnnnnnnnnnnnnnnnnnnnnnnnnnnnnnnnnnnnnnnnnnnnnnnnnnnnnnnnnnnnnnnnnnnnnnnnnnnnnnnnnnnnnnnnnnnnnnnnnnnnnnnnnnnnnnnnnnnnnnnnnnnnnnnnnnnnnnnnnnnnnnnnnnnnnnnnnnnnnnnnnnnnnnnnnnnnnnnnnnnnnnnnnnnnnnnnnnnnnnnnnnnnnnnnnnnnnnnnnnnnnnnnnnnnnnnnnnnnnnnnnnnnnnnnnnnnnnnnnnnnnnnnnnnnnnnnnnnnnnnnnnnnnnnnnnnnnnnnnnnnnnnnnnnnnnnnnnnnnnnnnnnnnnnnnnnnnnnnnnnnnnnnnnnnnnnnnnnnnnnnnnnnnnnnnnnnnnnnnnnnnnnnnnnnnnnnnnnnnnnnnnnnnnnnnnnnnnnnnnnnnnnnnnnnnnnnnnnnnnnnnnnnnnnnnnnnnnnnnnnnnnnnnnnnnnnnnnnnnnnnnnnnnnnnnnnnnnnnnnnnnnnnnnnnnnnnnnnnnnnnnnnnnnnnnnnnnnnnnnnnnnnnnnnnnnnnnnnnnnnnnnnnnnnnnnnnnnnnnnnnnnnnnnnnnnnnnnnnnnnnnnnnnnnnnnnnnnnnnnnnnnnnnnnnnnnnnnnnnnnnnnnnnnnnnnnnnnnnnnnnnnnnnnnnnnnnnnnnnnnnnnnnnnnnnnnnnnnnnnnnnnnnnnnnnnnnnnnnnnnnnnnnnnnnnnnnnnnnnnnnnnnnnnnnnnnnnnnnnnnnnnnnnnnnnnnnnnnnnnnnnnnnnnnnnnnnnnnnnnnnnnnnnnnnnnnnnnnnnnnnnnnnnnnnnnnnnnnnnnnnnnnnnnnnnnnnnnnnnnnnnnnnnnnnnnnnnnnnnnnnnnnnnnnnnnnnnnnnnnnnnnnnnnnnnnnnnnnnnnnnnnnnnnnnnnnnnnnnnnnnnnnnnnnnnnnnnnnnnnnnnnnnnnnnnnnnnnnnnnnnnnnnnnnnnnnnnnnnnnnnnnnnnnnnnnnnnnnnnnnnnnnnnnnnnnnnnnnnnnnnnnnnnnnnnnnnnnnnnnnnnnnnnnnnnnnnnnnnnnnnnnnnnnnnnnnnnnnnnnnnnnnnnnnnnnnnnnnnnnnnnnnnnnnnnnnnnnnnnnnnnnnnnnnnnnnnnnnnnnnnnnnnnnnnnnnnnnnnnnnnnnnnnnnnnnnnnnnnnnnnnnnnnnnnnnnnnnnnnnnnnnnnnnnnnnnnnnnnnnnnnnnnnnnnnnnnnnnnnnnnnnnnnnnnnnnnnnnnnnnnnnnnnnnnnnnnnnnnnnnnnnnnnnnnnnnnnnnnnnnnnnnnnnnnnnnnnnnnnnnnnnnnnnnnnnnnnnnnnnnnnnnnnnnnnnnnnnnnnnnnnnnnnnnnnnnnnnnnnnnnnnnnnnnnnnnnnnnnnnnnnnnnnnnnnnnnnnnnnnnnnnnnnnnnnnnnnnnnnnnnnnnnnnnnnnnnnnnnnnnnnnnnnnnnnnnnnnnnnnnnnnnnnnnnnnnnnnnnnnnnnnnnnnnnnnnnnnnnnnnnnnnnnnnnnnnnnnnnnnnnnnnnnnnnnnnnnnnnnnnnnnnnnnnnnnnnnnnnnnnnnnnnnnnnnnnnnnnnnnnnnnnnnnnnnnnnnnnnnnnnnnnnnnnnnnnnnnnnnnnnnnnnnnnnnnnnnnnnnnnnnnnnnnnnnnnnnnnnnnnnnnnnnnnnnnnnnnnnnnnnnnnnnnnnnnnnnnnnnnnnnnnnnnnnnnnnnnnnnnnnnnnnnnnnnnnnnnnnnnnnnnnnnnnnnnnnnnnnnnnnnnnnnnnnnnnnnnnnnnnnnnnnnnnnnnnnnnnnnnnnnnnnnnnnnnnnnnnnnnnnnnnnnnnnnnnnnnnnnnnnnnnnnnnnnnnnnnnnnnnnnnnnnnnnnnnnnnnnnnnnnnnnnnnnnnnnnnnnnnnnnnnnnnnnnnnnnnnnnnnnnnnnnnnnnnnnnnnnnnnnnnnnnnnnnnnnnnnnnnnnnnnnnnnnnnnnnnnnnnnnnnnnnnnnnnnnnnnnnnnnnnnnnnnnnnnnnnnnnnnnnnnnnnnnnnnnnnnnnnnnnnnnnnnnnnnnnnnnnnnnnnnnnnnnnnnnnnnnnnnnnnnnnnnnnnnnnnnnnnnnnnnnnnnnnnnnnnnnnnnnnnnnnnnnnnnnnnnnnnnnnnnnnnnnnnnnnnnnnnnnnnnnnnnnnnnnnnnnnnnnnnnnnnnnnnnnnnnnnnnnnnnnnnnnnnnnnnnnnnnnnnnnnnnnnnnnnnnnnnnnnnnnnnnnnnnnnnnnnnnnnnnnnnnnnnnnnnnnnnnnnnnnnnnnnnnnnnnnnnnnnnnnnnnnnnnnnnnnnnnnnnnnnnnnnnnnnnnnnnnnnnnnnnnnnnnnnnnnnnnnnnnnnnnnnnnnnnnnnnnnnnnnnnnnnnnnnnnnnnnnnnnnnnnnnnnnnnnnnnnnnnnnnnnnnnnnnnnnnnnnnnnnnnnnnnnnnnnnnnnnnnnnnnnnnnnnnnnnnnnnnnnnnnnnnnnnnnnnnnnnnnnnnnnnnnnnnnnnnnnnnnnnnnnnnnnnnnnnnnnnnnnnnnnnnnnnnnnnnnnnnnnnnnnnnnnnnnnnnnnnnnnnnnnnnnnnnnnnnnnnnnnnnnnnnnnnnnnnnnnnnnnnnnnnnnnnnnnnnnnnnnnnnnnnnnnnnnnnnnnnnnnnnnnnnnnnnnnnnnnnnnnnnnnnnnnnnnnnnnnnnnnnnnnnnnnnnnnnnnnnnnnnnnnnnnnnnnnnnnnnnnnnnnnnnnnnnnnnnnnnnnnnnnnnnnnnnnnnnnnnnnnnnnnnnnnnnnnnnnnnnnnnnnnnnnnnnnnnnnnnnnnnnnnnnnnnnnnnnnnnnnnnnnnnnnnnnnnnnnnnnnnnnnnnnnnnnnnnnnnnnnnnnnnnnnnnnnnnnnnnnnnnnnnnnnnnnnnnnnnnnnnnnnnnnnnnnnnnnnnnnnnnnnnnnnnnnnnnnnnnnnnnnnnnnnnnnnnnnnnnnnnnnnnnnnnnnnnnnnnnnnnnnnnnnnnnnnnnnnnnnnnnnnnnnnnnnnnnnnnnnnnnnnnnnnnnnnnnnnnnnnnnnnnnnnnnnnnnnnnnnnnnnnnnnnnnnnnnnnnnnnnnnnnnnnnnnnnnnnnnnnnnnnnnnnnnnnnnnnnnnnnnnnnnnnnnnnnnnnnnnnnnnnnnnnnnnnnnnnnnnnnnnnnnnnnnnnnnnnnnnnnnnnnnnnnnnnnnnnnnnnnnnnnnnnnnnnnnnnnnnnnnnnnnnnnnnnnnnnnnnnnnnnnnnnnnnnnnnnnnnnnnnnnnnnnnnnnnnnnnnnnnnnnnnnnnnnnnnnnnnnnnnnnnnnnnnnnnnnnnnnnnnnnnnnnnnnnnnnnnnnnnnnnnnnnnnnnnnnnnnnnnnnnnnnnnnnnnnnnnnnnnnnnnnnnnnnnnnnnnnnnnnnnnnnnnnnnnnnnnnnnnnnnnnnnnnnnnnnnnnnnnnnnnnnnnnnnnnnnnnnnnnnnnnnnnnnnnnnnnnnnnnnnnnnnnnnnnnnnnnnnnnnnnnnnnnnnnnnnnnnnnnnnnnnnnnnnnnnnnnnnnnnnnnnnnnnnnnnnnnnnnnnnnnnnnnnnnnnnnnnnnnnnnnnnnnnnnnnnnnnnnnnnnnnnnnnnnnnnnnnnnnnnnnnnnnnnnnnnnnnnnnnnnnnnnnnnnnnnnnnnnnnnnnnnnnnnnnnnnnnnnnnnnnnnnnnnnnnnnnnnnnnnnnnnnnnnnnnnnnnnnnnnnnnnnnnnnnnnnnnnnnnnnnnnnnnnnnnnnnnnnnnnnnnnnnnnnnnnnnnnnnnnnnnnnnnnnnnnnnnnnnnnnnnnnnnnnnnnnnnnnnnnnnnnnnnnnnnnnnnnnnnnnnnnnnnnnnnnnnnnnnnnnnnnnnnnnnnnnnnnnnnnnnnnnnnnnnnnnnnnnnnnnnnnnnnnnnnnnnnnnnnnnnnnnnnnnnnnnnnnnnnnnnnnnnnnnnnnnnnnnnnnnnnnnnnnnnnnnnnnnnnnnnnnnnnnnnnnnnnnnnnnnnnnnnnnnnnnnnnnnnnnnnnnnnnnnnnnnnnnnnnnnnnnnnnnnnnnnnnnnnnnnnnnnnnnnnnnnnnnnnnnnnnnnnnnnnnnnnnnnnnnnnnnnnnnnnnnnnnnnnnnnnnnnnnnnnnnnnnnnnnnnnnnnnnnnnnnnnnnnnnnnnnnnnnnnnnnnnnnnnnnnnnnnnnnnnnnnnnnnnnnnnnnnnnnnnnnnnnnnnnnnnnnnnnnnnnnnnnnnnnnnnnnnnnnnnnnnnnnnnnnnnnnnnnnnnnnnnnnnnnnnnnnnnnnnnnnnnnnnnnnnnnnnnnnnnnnnnnnnnnnnnnnnnnnnnnnnnnnnnnnnnnnnnnnnnnnnnnnnnnnnnnnnnnnnnnnnnnnnnnnnnnnnnnnnnnnnnnnnnnnnnnnnnnnnnnnnnnnnnnnnnnnnnnnnnnnnnnnnnnnnnnnnnnnnnnnnnnnnnnnnnnnnnnnnnnnnnnnnnnnnnnnnnnnnnnnnnnnnnnnnnnnnnnnnnnnnnnnnnnnnnnnnnnnnnnnnnnnnnnnnnnnnnnnnnnnnnnnnnnnnnnnnnnnnnnnnnnnnnnnnnnnnnnnnnnnnnnnnnnnnnnnnnnnnnnnnnnnnnnnnnnnnnnnnnnnnnnnnnnnnnnnnnnnnnnnnnnnnnnnnnnnnnnnnnnnnnnnnnnnnnnnnnnnnnnnnnnnnnnnnnnnnnnnnnnnnnnnnnnnnnnnnnnnnnnnnnnnnnnnnnnnnnnnnnnnnnnnnnnnnnnnnnnnnnnnnnnnnnnnnnnnnnnnnnnnnnnnnnnnnnnnnnnnnnnnnnnnnnnnnnnnnnnnnnnnnnnnnnnnnnnnnnnnnnnnnnnnnnnnnnnnnnnnnnnnnnnnnnnnnnnnnnnnnnnnnnnnnnnnnnnnnnnnnnnnnnnnnnnnnnnnnnnnnnnnnnnnnnnnnnnnnnnnnnnnnnnnnnnnnnnnnnnnnnnnnnnnnnnnnnnnnnnnnnnnnnnnnnnnnnnnnnnnnnnnnnnnnnnnnnnnnnnnnnnnnnnnnnnnnnnnnnnnnnnnnnnnnnnnnnnnnnnnnnnnnnnnnnnnnnnnnnnnnnnnnnnnnnnnnnnnnnnnnnnnnnnnnnnnnnnnnnnnnnnnnnnnnnnnnnnnnnnnnnnnnnnnnnnnnnnnnnnnnnnnnnnnnnnnnnnnnnnnnnnnnnnnnnnnnnnnnnnnnnnnnnnnnnnnnnnnnnnnnnnnnnnnnnnnnnnnnnnnnnnnnnnnnnnnnnnnnnnnnnnnnnnnnnnnnnnnnnnnnnnnnnnnnnnnnnnnnnnnnnnnnnnnnnnnnnnnnnnnnnnnnnnnnnnnnnnnnnnnnnnnnnnnnnnnnnnnnnnnnnnnnnnnnnnnnnnnnnnnnnnnnnnnnnnnnnnnnnnnnnnnnnnnnnnnnnnnnnnnnnnnnnnnnnnnnnnnnnnnnnnnnnnnnnnnnnnnnnnnnnnnnnnnnnnnnnnnnnnnnnnnnnnnnnnnnnnnnnnnnnnnnnnnnnnnnnnnnnnnnnnnnnnnnnnnnnnnnnnnnnnnnnnnnnnnnnnnnnnnnnnnnnnnnnnnnnnnnnnnnnnnnnnnnnnnnnnnnnnnnnnnnnnnnnnnnnnnnnnnnnnnnnnnnnnnnnnnnnnnnnnnnnnnnnnnnnnnnnnnnnnnnnnnnnnnnnnnnnnnnnnnnnnnnnnnnnnnnnnnnnnnnnnnnnnnnnnnnnnnnnnnnnnnnnnnnnnnnnnnnnnnnnnnnnnnnnnnnnnnnnnnnnnnnnnnnnnnnnnnnnnnnnnnnnnnnnnnnnnnnnnnnnnnnnnnnnnnnnnnnnnnnnnnnnnnnnnnnnnnnnnnnnnnnnnnnnnnnnnnnnnnnnnnnnnnnnnnnnnnnnnnnnnnnnnnnnnnnnnnnnnnnnnnnnnnnnnnnnnnnnnnnnnnnnnnnnnnnnnnnnnnnnnnnnnnnnnnnnnnnnnnnnnnnnnnnnnnnnnnnnnnnnnnnnnnnnnnnnnnnnnnnnnnnnnnnnnnnnnnnnnnnnnnnnnnnnnnnnnnnnnnnnnnnnnnnnnnnnnnnnnnnnnnnnnnnnnnnnnnnnnnnnnnnnnnnnnnnnnnnnnnnnnnnnnnnnnnnnnnnnnnnnnnnnnnnnnnnnnnnnnnnnnnnnnnnnnnnnnnnnnnnnnnnnnnnnnnnnnnnnnnnnnnnnnnnnnnnnnnnnnnnnnnnnnnnnnnnnnnnnnnnnnnnnnnnnnnnnnnnnnnnnnnnnnnnnnnnnnnnnnnnnnnnnnnnnnnnnnnnnnnnnnnnnnnnnnnnnnnnnnnnnnnnnnnnnnnnnnnnnnnnnnnnnnnnnnnnnnnnnnnnnnnnnnnnnnnnnnnnnnnnnnnnnnnnnnnnnnnnnnnnnnnnnnnnnnnnnnnnnnnnnnnnnnnnnnnnnnnnnnnnnnnnnnnnnnnnnnnnnnnnnnnnnnnnnnnnnnnnnnnnnnnnnnnnnnnnnnnnnnnnnnnnnnnnnnnnnnnnnnnnnnnnnnnnnnnnnnnnnnnnnnnnnnnnnnnnnnnnnnnnnnnnnnnnnnnnnnnnnnnnnnnnnnnnnnnnnnnnnnnnnnnnnnnnnnnnnnnnnnnnnnnnnnnnnnnnnnnnnnnnnnnnnnnnnnnnnnnnnnnnnnnnnnnnnnnnnnnnnnnnnnnnnnnnnnnnnnnnnnnnnnnnnnnnnnnnnnnnnnnnnnnnnnnnnnnnnnnnnnnnnnnnnnnnnnnnnnnnnnnnnnnnnnnnnnnnnnnnnnnnnnnnnnnnnnnnnnnnnnnnnnnnnnnnnnnnnnnnnnnnnnnnnnnnnnnnnnnnnnnnnnnnnnnnnnnnnnnnnnnnnnnnnnnnnnnnnnnnnnnnnnnnnnnnnnnnnnnnnnnnnnnnnnnnnnnnnnnnnnnnnnnnnnnnnnnnnnnnnnnnnnnnnnnnnnnnnnnnnnnnnnnnnnnnnnnnnnnnnnnnnnnnnnnnnnnnnnnnnnnnnnnnnnnnnnnnnnnnnnnnnnnnnnnnnnnnnnnnnnnnnnnnnnnnnnnnnnnnnnnnnnnnnnnnnnnnnnnnnnnnnnnnnnnnnnnnnnnnnnnnnnnnnnnnnnnnnnnnnnnnnnnnnnnnnnnnnnnnnnnnnnnnnnnnnnnnnnnnnnnnnnnnnnnnnnnnnnnnnnnnnnnnnnnnnnnnnnnnnnnnnnnnnnnnnnnnnnnnnnnnnnnnnnnnnnnnnnnnnnnnnnnnnnnnnnnnnnnnnnnnnnnnnnnnnnnnnnnnnnnnnnnnnnnnnnnnnnnnnnnnnnnnnnnnnnnnnnnnnnnnnnnnnnnnnnnnnnnnnnnnnnnnnnnnnnnnnnnnnnnnnnnnnnnnnnnnnnnnnnnnnnnnnnnnnnnnnnnnnnnnnnnnnnnnnnnnnnnnnnnnnnnnnnnnnnnnnnnnnnnnnnnnnnnnnnnnnnnnnnnnnnnnnnnnnnnnnnnnnnnnnnnnnnnnnnnnnnnnnnnnnnnnnnnnnnnnnnnnnnnnnnnnnnnnnnnnnnnnnnnnnnnnnnnnnnnnnnnnnnnnnnnnnnnnnnnnnnnnnnnnnnnnnnnnnnnnnnnnnnnnnnnnnnnnnnnnnnnnnnnnnnnnnnnnnnnnnnnnnnnnnnnnnnnnnnnnnnnnnnnnnnnnnnnnnnnnnnnnnnnnnnnnnnnnnnnnnnnnnnnnnnnnnnnnnnnnnnnnnnnnnnnnnnnnnnnnnnnnnnnnnnnnnnnnnnnnnnnnnnnnnnnnnnnnnnnnnnnnnnnnnnnnnnnnnnnnnnnnnnnnnnnnnnnnnnnnnnnnnnnnnnnnnnnnnnnnnnnnnnnnnnnnnnnnnnnnnnnnnnnnnnnnnnnnnnnnnnnnnnnnnnnnnnnnnnnnnnnnnnnnnnnnnnnnnnnnnnnnnnnnnnnnnnnnnnnnnnnnnnnnnnnnnnnnnnnnnnnnnnnnnnnnnnnnnnnnnnnnnnnnnnnnnnnnnnnnnnnnnnnnnnnnnnnnnnnnnnnnnnnnnnnnnnnnnnnnnnnnnnnnnnnnnnnnnnnnnnnnnnnnnnnnnnnnnnnnnnnnnnnnnnnnnnnnnnnnnnnnnnnnnnnnnnnnnnnnnnnnnnnnnnnnnnnnnnnnnnnnnnnnnnnnnnnnnnnnnnnnnnnnnnnnnnnnnnnnnnnnnnnnnnnnnnnnnnnnnnnnnnnnnnnnnnnnnnnnnnnnnnnnnnnnnnnnnnnnnnnnnnnnnnnnnnnnnnnnnnnnnnnnnnnnnnnnnnnnnnnnnnnnnnnnnnnnnnnnnnnnnnnnnnnnnnnnnnnnnnnnnnnnnnnnnnnnnnnnnnnnnnnnnnnnnnnnnnnnnnnnnnnnnnnnnnnnnnnnnnnnnnnnnnnnnnnnnnnnnnnnnnnnnnnnnnnnnnnnnnnnnnnnnnnnnnnnnnnnnnnnnnnnnnnnnnnnnnnnnnnnnnnnnnnnnnnnnnnnnnnnnnnnnnnnnnnnnnnnnnnnnnnnnnnnnnnnnnnnnnnnnnnnnnnnnnnnnnnnnnnnnnnnnnnnnnnnnnnnnnnnnnnnnnnnnnnnnnnnnnnnnnnnnnnnnnnnnnnnnnnnnnnnnnnnnnnnnnnnnnnnnnnnnnnnnnnnnnnnnnnnnnnnnnnnnnnnnnnnnnnnnnnnnnnnnnnnnnnnnnnnnnnnnnnnnnnnnnnnnnnnnnnnnnnnnnnnnnnnnnnnnnnnnnnnnnnnnnnnnnnnnnnnnnnnnnnnnnnnnnnnnnnnnnnnnnnnnnnnnnnnnnnnnnnnnnnnnnnnnnnnnnnnnnnnnnnnnnnnnnnnnnnnnnnnnnnnnnnnnnnnnnnnnnnnnnnnnnnnnnnnnnnnnnnnnnnnnnnnnnnnnnnnnnnnnnnnnnnnnnnnnnnnnnnnnnnnnnnnnnnnnnnnnnnnnnnnnnnnnnnnnnnnnnnnnnnnnnnnnnnnnnnnnnnnnnnnnnnnnnnnnnnnnnnnnnnnnnnnnnnnnnnnnnnnnnnnnnnnnnnnnnnnnnnnnnnnnnnnnnnnnnnnnnnnnnnnnnnnnnnnnnnnnnnnnnnnnnnnnnnnnnnnnnnnnnnnnnnnnnnnnnnnnnnnnnnnnnnnnnnnnnnnnnnnnnnnnnnnnnnnnnnnnnnnnnnnnnnnnnnnnnnnnnnnnnnnnnnnnnnnnnnnnnnnnnnnnnnnnnnnnnnnnnnnnnnnnnnnnnnnnnnnnnnnnnnnnnnnnnnnnnnnnnnnnnnnnnnnnnnnnnnnnnnnnnnnnnnnnnnnnnnnnnnnnnnnnnnnnnnnnnnnnnnnnnnnnnnnnnnnnnnnnnnnnnnnnnnnnnnnnnnnnnnnnnnnnnnnnnnnnnnnnnnnnnnnnnnnnnnnnnnnnnnnnnnnnnnnnnnnnnnnnnnnnnnnnnnnnnnnnnnnnnnnnnnnnnnnnnnnnnnnnnnnnnnnnnnnnnnnnnnnnnnnnnnnnnnnnnnnnnnnnnnnnnnnnnnnnnnnnnnnnnnnnnnnnnnnnnnnnnnnnnnnnnnnnnnnnnnnnnnnnnnnnnnnnnnnnnnnnnnnnnnnnnnnnnnnnnnnnnnnnnnnnnnnnnnnnnnnnnnnnnnnnnnnnnnnnnnnnnnnnnnnnnnnnnnnnnnnnnnnnnnnnnnnnnnnnnnnnnnnnnnnnnnnnnnnnnnnnnnnnnnnnnnnnnnnnnnnnnnnnnnnnnnnnnnnnnnnnnnnnnnnnnnnnnnnnnnnnnnnnnnnnnnnnnnnnnnnnnnnnnnnnnnnnnnnnnnnnnnnnnnnnnnnnnnnnnnnnnnnnnnnnnnnnnnnnnnnnnnnnnnnnnnnnnnnnnnnnnnnnnnnnnnnnnnnnnnnnnnnnnnnnnnnnnnnnnnnnnnnnnnnnnnnnnnnnnnnnnnnnnnnnnnnnnnnnnnnnnnnnnnnnnnnnnnnnnnnnnnnnnnnnnnnnnnnnnnnnnnnnnnnnnnnnnnnnnnnnnnnnnnnnnnnnnnnnnnnnnnnnnnnnnnnnnnnnnnnnnnnnnnnnnnnnnnnnnnnnnnnnnnnnnnnnnnnnnnnnnnnnnnnnnnnnnnnnnnnnnnnnnnnnnnnnnnnnnnnnnnnnnnnnnnnnnnnnnnnnnnnnnnnnnnnnnnnnnnnnnnnnnnnnnnnnnnnnnnnnnnnnnnnnnnnnnnnnnnnnnnnnnnnnnnnnnnnnnnnnnnnnnnnnnnnnnnnnnnnnnnnnnnnnnnnnnnnnnnnnnnnnnnnnnnnnnnnnnnnnnnnnnnnnnnnnnnnnnnnnnnnnnnnnnnnnnnnnnnnnnnnnnnnnnnnnnnnnnnnnnnnnnnnnnnnnnnnnnnnnnnnnnnnnnnnnnnnnnnnnnnnnnnnnnnnnnnnnnnnnnnnnnnnnnnnnnnnnnnnnnnnnnnnnnnnnnnnnnnnnnnnnnnnnnnnnnnnnnnnnnnnnnnnnnnnnnnnnnnnnnnnnnnnnnnnnnnnnnnnnnnnnnnnnnnnnnnnnnnnnnnnnnnnnnnnnnnnnnnnnnnnnnnnnnnnnnnnnnnnnnnnnnnnnnnnnnnnnnnnnnnnnnnnnnnnnnnnnnnnnnnnnnnnnnnnnnnnnnnnnnnnnnnnnnnnnnnnnnnnnnnnnnnnnnnnnnnnnnnnnnnnnnnnnnnnnnnnnnnnnnnnnnnnnnnnnnnnnnnnnnnnnnnnnnnnnnnnnnnnnnnnnnnnnnnnnnnnnnnnnnnnnnnnnnnnnnnnnnnnnnnnnnnnnnnnnnnnnnnnnnnnnnnnnnnnnnnnnnnnnnnnnnnnnnnnnnnnnnnnnnnnnnnnnnnnnnnnnnnnnnnnnnnnnnnnnnnnnnnnnnnnnnnnnnnnnnnnnnnnnnnnnnnnnnnnnnnnnnnnnnnnnnnnnnnnnnnnnnnnnnnnnnnnnnnnnnnnnnnnnnnnnnnnnnnnnnnnnnnnnnnnnnnnnnnnnnnnnnnnnnnnnnnnnnnnnnnnnnnnnnnnnnnnnnnnnnnnnnnnnnnnnnnnnnnnnnnnnnnnnnnnnnnnnnnnnnnnnnnnnnnnnnnnnnnnnnnnnnnnnnnnnnnnnnnnnnnnnnnnnnnnnnnnnnnnnnnnnnnnnnnnnnnnnnnnnnnnnnnnnnnnnnnnnnnnnnnnnnnnnnnnnnnnnnnnnnnnnnnnnnnnnnnnnnnnnnnnnnnnnnnnnnnnnnnnnnnnnnnnnnnnnnnnnnnnnnnnnnnnnnnnnnnnnnnnnnnnnnnnnnnnnnnnnnnnnnnnnnnnnnnnnnnnnnnnnnnnnnnnnnnnnnnnnnnnnnnnnnnnnnnnnnnnnnnnnnnnnnnnnnnnnnnnnnnnnnnnnnnnnnnnnnnnnnnnnnnnnnnnnnnnnnnnnnnnnnnnnnnnnnnnnnnnnnnnnnnnnnnnnnnnnnnnnnnnnnnnnnnnnnnnnnnnnnnnnnnnnnnnnnnnnnnnnnnnnnnnnnnnnnnnnnnnnnnnnnnnnnnnnnnnnnnnnnnnnnnnnnnnnnnnnnnnnnnnnnnnnnnnnnnnnnnnnnnnnnnnnnnnnnnnnnnnnnnnnnnnnnnnnnnnnnnnnnnnnnnnnnnnnnnnnnnnnnnnnnnnnnnnnnnnnnnnnnnnnnnnnnnnnnnnnnnnnnnnnnnnnnnnnnnnnnnnnnnnnnnnnnnnnnnnnnnnnnnnnnnnnnnnnnnnnnnnnnnnnnnnnnnnnnnnnnnnnnnnnnnnnnnnnnnnnnnnnnnnnnnnnnnnnnnnnnnnnnnnnnnnnnnnnnnnnnnnnnnnnnnnnnnnnnnnnnnnnnnnnnnnnnnnnnnnnnnnnnnnnnnnnnnnnnnnnnnnnnnnnnnnnnnnnnnnnnnnnnnnnnnnnnnnnnnnnnnnnnnnnnnnnnnnnnnnnnnnnnnnnnnnnnnnnnnnnnnnnnnnnnnnnnnnnnnnnnnnnnnnnnnnnnnnnnnnnnnnnnnnnnnnnnnnnnnnnnnnnnnnnnnnnnnnnnnnnnnnnnnnnnnnnnnnnnnnnnnnnnnnnnnnnnnnnnnnnnnnnnnnnnnnnnnnnnnnnnnnnnnnnnnnnnnnnnnnnnnnnnnnnnnnnnnnnnnnnnnnnnnnnnnnnnnnnnnnnnnnnnnnnnnnnnnnnnnnnnnnnnnnnnnnnnnnnnnnnnnnnnnnnnnnnnnnnnnnnnnnnnnnnnnnnnnnnnnnnnnnnnnnnnnnnnnnnnnnnnnnnnnnnnnnnnnnnnnnnnnnnnnnnnnnnnnnnnnnnnnnnnnnnnnnnnnnnnnnnnnnnnnnnnnnnnnnnnnnnnnnnnnnnnnnnnnnnnnnnnnnnnnnnnnnnnnnnnnnnnnnnnnnnnnnnnnnnnnnnnnnnnnnnnnnnnnnnnnnnnnnnnnnnnnnnnnnnnnnnnnnnnnnnnnnnnnnnnnnnnnnnnnnnnnnnnnnnnnnnnnnnnnnnnnnnnnnnnnnnnnnnnnnnnnnnnnnnnnnnnnnnnnnnnnnnnnnnnnnnnnnnnnnnnnnnnnnnnnnnnnnnnnnnnnnnnnnnnnnnnnnnnnnnnnnnnnnnnnnnnnnnnnnnnnnnnnnnnnnnnnnnnnnnnnnnnnnnnnnnnnnnnnnnnnnnnnnnnnnnnnnnnnnnnnnnnnnnnnnnnnnnnnnnnnnnnnnnnnnnnnnnnnnnnnnnnnnnnnnnnnnnnnnnnnnnnnnnnnnnnnnnnnnnnnnnnnnnnnnnnnnnnnnnnnnnnnnnnnnnnnnnnnnnnnnnnnnnnnnnnnnnnnnnnnnnnnnnnnnnnnnnnnnnnnnnnnnnnnnnnnnnnnnnnnnnnnnnnnnnnnnnnnnnnnnnnnnnnnnnnnnnnnnnnnnnnnnnnnnnnnnnnnnnnnnnnnnnnnnnnnnnnnnnnnnnnnnnnnnnnnnnnnnnnnnnnnnnnnnnnnnnnnnnnnnnnnnnnnnnnnnnnnnnnnnnnnnnnnnnnnnnnnnnnnnnnnnnnnnnnnnnnnnnnnnnnnnnnnnnnnnnnnnnnnnnnnnnnnnnnnnnnnnnnnnnnnnnnnnnnnnnnnnnnnnnnnnnnnnnnnnnnnnnnnnnnnnnnnnnnnnnnnnnnnnnnnnnnnnnnnnnnnnnnnnnnnnnnnnnnnnnnnnnnnnnnnnnnnnnnnnnnnnnnnnnnnnnnnnnnnnnnnnnnnnnnnnnnnnnnnnnnnnnnnnnnnnnnnnnnnnnnnnnnnnnnnnnnnnnnnnnnnnnnnnnnnnnnnnnnnnnnnnnnnnnnnnnnnnnnnnnnnnnnnnnnnnnnnnnnnnnnnnnnnnnnnnnnnnnnnnnnnnnnnnnnnnnnnnnnnnnnnnnnnnnnnnnnnnnnnnnnnnnnnnnnnnnnnnnnnnnnnnnnnnnnnnnnnnnnnnnnnnnnnnnnnnnnnnnnnnnnnnnnnnnnnnnnnnnnnnnnnnnnnnnnnnnnnnnnnnnnnnnnnnnnnnnnnnnnnnnnnnnnnnnnnnnnnnnnnnnnnnnnnnnnnnnnnnnnnnnnnnnnnnnnnnnnnnnnnnnnnnnnnnnnnnnnnnnnnnnnnnnnnnnnnnnnnnnnnnnnnnnnnnnnnnnnnnnnnnnnnnnnnnnnnnnnnnnnnnnnnnnnnnnnnnnnnnnnnnnnnnnnnnnnnnnnnnnnnnnnnnnnnnnnnnnnnnnnnnnnnnnnnnnnnnnnnnnnnnnnnnnnnnnnnnnnnnnnnnnnnnnnnnnnnnnnnnnnnnnnnnnnnnnnnnnnnnnnnnnnnnnnnnnnnnnnnnnnnnnnnnnnnnnnnnnnnnnnnnnnnnnnnnnnnnnnnnnnnnnnnnnnnnnnnnnnnnnnnnnnnnnnnnnnnnnnnnnnnnnnnnnnnnnnnnnnnnnnnnnnnnnnnnnnnnnnnnnnnnnnnnnnnnnnnnnnnnnnnnnnnnnnnnnnnnnnnnnnnnnnnnnnnnnnnnnnnnnnnnnnnnnnnnnnnnnnnnnnnnnnnnnnnnnnnnnnnnnnnnnnnnnnnnnnnnnnnnnnnnnnnnnnnnnnnnnnnnnnnnnnnnnnnnnnnnnnnnnnnnnnnnnnnnnnnnnnnnnnnnnnnnnnnnnnnnnnnnnnnnnnnnnnnnnnnnnnnnnnnnnnnnnnnnnnnnnnnnnnnnnnnnnnnnnnnnnnnnnnnnnnnnnnnnnnnnnnnnnnnnnnnnnnnnnnnnnnnnnnnnnnnnnnnnnnnnnnnnnnnnnnnnnnnnnnnnnnnnnnnnnnnnnnnnnnnnnnnnnnnnnnnnnnnnnnnnnnnnnnnnnnnnnnnnnnnnnnnnnnnnnnnnnnnnnnnnnnnnnnnnnnnnnnnnnnnnnnnnnnnnnnnnnnnnnnnnnnnnnnnnnnnnnnnnnnnnnnnnnnnnnnnnnnnnnnnnnnnnnnnnnnnnnnnnnnnnnnnnnnnnnnnnnnnnnnnnnnnnnnnnnnnnnnnnnnnnnnnnnnnnnnnnnnnnnnnnnnnnnnnnnnnnnnnnnnnnnnnnnnnnnnnnnnnnnnnnnnnnnnnnnnnnnnnnnnnnnnnnnnnnnnnnnnnnnnnnnnnnnnnnnnnnnnnnnnnnnnnnnnnnnnnnnnnnnnnnnnnnnnnnnnnnnnnnnnnnnnnnnnnnnnnnnnnnnnnnnnnnnnnnnnnnnnnnnnnnnnnnnnnnnnnnnnnnnnnnnnnnnnnnnnnnnnnnnnnnnnnnnnnnnnnnnnnnnnnnnnnnnnnnnnnnnnnnnnnnnnnnnnnnnnnnnnnnnnnnnnnnnnnnnnnnnnnnnnnnnnnnnnnnnnnnnnnnnnnnnnnnnnnnnnnnnnnnnnnnnnnnnnnnnnnnnnnnnnnnnnnnnnnnnnnnnnnnnnnnnnnnnnnnnnnnnnnnnnnnnnnnnnnnnnnnnnnnnnnnnnnnnnnnnnnnnnnnnnnnnnnnnnnnnnnnnnnnnnnnnnnnnnnnnnnnnnnnnnnnnnnnnnnnnnnnnnnnnnnnnnnnnnnnnnnnnnnnnnnnnnnnnnnnnnnnnnnnnnnnnnnnnnnnnnnnnnnnnnnnnnnnnnnnnnnnnnnnnnnnnnnnnnnnnnnnnnnnnnnnnnnnnnnnnnnnnnnnnnnnnnnnnnnnnnnnnnnnnnnnnnnnnnnnnnnnnnnnnnnnnnnnnnnnnnnnnnnnnnnnnnnnnnnnnnnnnnnnnnnnnnnnnnnnnnnnnnnnnnnnnnnnnnnnnnnnnnnnnnnnnnnnnnnnnnnnnnnnnnnnnnnnnnnnnnnnnnnnnnnnnnnnnnnnnnnnnnnnnnnnnnnnnnnnnnnnnnnnnnnnnnnnnnnnnnnnnnnnnnnnnnnnnnnnnnnnnnnnnnnnnnnnnnnnnnnnnnnnnnnnnnnnnnnnnnnnnnnnnnnnnnnnnnnnnnnnnnnnnnnnnnnnnnnnnnnnnnnnnnnnnnnnnnnnnnnnnnnnnnnnnnnnnnnnnnnnnnnnnnnnnnnnnnnnnnnnnnnnnnnnnnnnnnnnnnnnnnnnnnnnnnnnnnnnnnnnnnnnnnnnnnnnnnnnnnnnnnnnnnnnnnnnnnnnnnnnnnnnnnnnnnnnnnnnnnnnnnnnnnnnnnnnnnnnnnnnnnnnnnnnnnnnnnnnnnnnnnnnnnnnnnnnnnnnnnnnnnnnnnnnnnnnnnnnnnnnnnnnnnnnnnnnnnnnnnnnnnnnnnnnnnnnnnnnnnnnnnnnnnnnnnnnnnnnnnnnnnnnnnnnnnnnnnnnnnnnnnnnnnnnnnnnnnnnnnnnnnnnnnnnnnnnnnnnnnnnnnnnnnnnnnnnnnnnnnnnnnnnnnnnnnnnnnnnnnnnnnnnnnnnnnnnnnnnnnnnnnnnnnnnnnnnnnnnnnnnnnnnnnnnnnnnnnnnnnnnnnnnnnnnnnnnnnnnnnnnnnnnnnnnnnnnnnnnnnnnnnnnnnnnnnnnnnnnnnnnnnnnnnnnnnnnnnnnnnnnnnnnnnnnnnnnnnnnnnnnnnnnnnnnnnnnnnnnnnnnnnnnnnnnnnnnnnnnnnnnnnnnnnnnnnnnnnnnnnnnnnnnnnnnnnnnnnnnnnnnnnnnnnnnnnnnnnnnnnnnnnnnnnnnnnnnnnnnnnnnnnnnnnnnnnnnnnnnnnnnnnnnnnnnnnnnnnnnnnnnnnnnnnnnnnnnnnnnnnnnnnnnnnnnnnnnnnnnnnnnnnnnnnnnnnnnnnnnnnnnnnnnnnnnnnnnnnnnnnnnnnnnnnnnnnnnnnnnnnnnnnnnnnnnnnnnnnnnnnnnnnnnnnnnnnnnnnnnnnnnnnnnnnnnnnnnnnnnnnnnnnnnnnnnnnnnnnnnnnnnnnnnnnnnnnnnnnnnnnnnnnnnnnnnnnnnnnnnnnnnnnnnnnnnnnnnnnnnnnnnnnnnnnnnnnnnnnnnnnnnnnnnnnnnnnnnnnnnnnnnnnnnnnnnnnnnnnnnnnnnnnnnnnnnnnnnnnnnnnnnnnnnnnnnnnnnnnnnnnnnnnnnnnnnnnnnnnnnnnnnnnnnnnnnnnnnnnnnnnnnnnnnnnnnnnnnnnnnnnnnnnnnnnnnnnnnnnnnnnnnnnnnnnnnnnnnnnnnnnnnnnnnnnnnnnnnnnnnnnnnnnnnnnnnnnnnnnnnnnnnnnnnnnnnnnnnnnnnnnnnnnnnnnnnnnnnnnnnnnnnnnnnnnnnnnnnnnnnnnnnnnnnnnnnnnnnnnnnnnnnnnnnnnnnnnnnnnnnnnnnnnnnnnnnnnnnnnnnnnnnnnnnnnnnnnnnnnnnnnnnnnnnnnnnnnnnnnnnnnnnnnnnnnnnnnnnnnnnnnnnnnnnnnnnnnnnnnnnnnnnnnnnnnnnnnnnnnnnnnnnnnnnnnnnnnnnnnnnnnnnnnnnnnnnnnnnnnnnnnnnnnnnnnnnnnnnnnnnnnnnnnnnnnnnnnnnnnnnnnnnnnnnnnnnnnnnnnnnnnnnnnnnnnnnnnnnnnnnnnnnnnnnnnnnnnnnnnnnnnnnnnnnnnnnnnnnnnnnnnnnnnnnnnnnnnnnnnnnnnnnnnnnnnnnnnnnnnnnnnnnnnnnnnnnnnnnnnnnnnnnnnnnnnnnnnnnnnnnnnnnnnnnnnnnnnnnnnnnnnnnnnnnnnnnnnnnnnnnnnnnnnnnnnnnnnnnnnnnnnnnnnnnnnnnnnnnnnnnnnnnnnnnnnnnnnnnnnnnnnnnnnnnnnnnnnnnnnnnnnnnnnnnnnnnnnnnnnnnnnnnnnnnnnnnnnnnnnnnnnnnnnnnnnnnnnnnnnnnnnnnnnnnnnnnnnnnnnnnnnnnnnnnnnnnnnnnnnnnnnnnnnnnnnnnnnnnnnnnnnnnnnnnnnnnnnnnnnnnnnnnnnnnnnnnnnnnnnnnnnnnnnnnnnnnnnnnnnnnnnnnnnnnnnnnnnnnnnnnnnnnnnnnnnnnnnnnnnnnnnnnnnnnnnnnnnnnnnnnnnnnnnnnnnnnnnnnnnnnnnnnnnnnnnnnnnnnnnnnnnnnnnnnnnnnnnnnnnnnnnnnnnnnnnnnnnnnnnnnnnnnnnnnnnnnnnnnnnnnnnnnnnnnnnnnnnnnnnnnnnnnnnnnnnnnnnnnnnnnnnnnnnnnnnnnnnnnnnnnnnnnnnnnnnnnnnnnnnnnnnnnnnnnnnnnnnnnnnnnnnnnnnnnnnnnnnnnnnnnnnnnnnnnnnnnnnnnnnnnnnnnnnnnnnnnnnnnnnnnnnnnnnnnnnnnnnnnnnnnnnnnnnnnnnnnnnnnnnnnnnnnnnnnnnnnnnnnnnnnnnnnnnnnnnnnnnnnnnnnnnnnnnnnnnnnnnnnnnnnnnnnnnnnnnnnnnnnnnnnnnnnnnnnnnnnnnnnnnnnnnnnnnnnnnnnnnnnnnnnnnnnnnnnnnnnnnnnnnnnnnnnnnnnnnnnnnnnnnnnnnnnnnnnnnnnnnnnnnnnnnnnnnnnnnnnnnnnnnnnnnnnnnnnnnnnnnnnnnnnnnnnnnnnnnnnnnnnnnnnnnnnnnnnnnnnnnnnnnnnnnnnnnnnnnnnnnnnnnnnnnnnnnnnnnnnnnnnnnnnnnnnnnnnnnnnnnnnnnnnnnnnnnnnnnnnnnnnnnnnnnnnnnnnnnnnnnnnnnnnnnnnnnnnnnnnnnnnnnnnnnnnnnnnnnnnnnnnnnnnnnnnnnnnnnnnnnnnnnnnnnnnnnnnnnnnnnnnnnnnnnnnnnnnnnnnnnnnnnnnnnnnnnnnnnnnnnnnnnnnnnnnnnnnnnnnnnnnnnnnnnnnnnnnnnnnnnnnnnnnnnnnnnnnnnnnnnnnnnnnnnnnnnnnnnnnnnnnnnnnnnnnnnnnnnnnnnnnnnnnnnnnnnnnnnnnnnnnnnnnnnnnnnnnnnnnnnnnnnnnnnnnnnnnnnnnnnnnnnnnnnnnnnnnnnnnnnnnnnnnnnnnnnnnnnnnnnnnnnnnnnnnnnnnnnnnnnnnnnnnnnnnnnnnnnnnnnnnnnnnnnnnnnnnnnnnnnnnnnnnnnnnnnnnnnnnnnnnnnnnnnnnnnnnnnnnnnnnnnnnnnnnnnnnnnnnnnnnnnnnnnnnnnnnnnnnnnnnnnnnnnnnnnnnnnnnnnnnnnnnnnnnnnnnnnnnnnnnnnnnnnnnnnnnnnnnnnnnnnnnnnnnnnnnnnnnnnnnnnnnnnnnnnnnnnnnnnnnnnnnnnnnnnnnnnnnnnnnnnnnnnnnnnnnnnnnnnnnnnnnnnnnnnnnnnnnnnnnnnnnnnnnnnnnnnnnnnnnnnnnnnnnnnnnnnnnnnnnnnnnnnnnnnnnnnnnnnnnnnnnnnnnnnnnnnnnnnnnnnnnnnnnnnnnnnnnnnnnnnnnnnnnnnnnnnnnnnnnnnnnnnnnnnnnnnnnnnnnnnnnnnnnnnnnnnnnnnnnnnnnnnnnnnnnnnnnnnnnnnnnnnnnnnnnnnnnnnnnnnnnnnnnnnnnnnnnnnnnnnnnnnnnnnnnnnnnnnnnnnnnnnnnnnnnnnnnnnnnnnnnnnnnnnnnnnnnnnnnnnnnnnnnnnnnnnnnnnnnnnnnnnnnnnnnnnnnnnnnnnnnnnnnnnnnnnnnnnnnnnnnnnnnnnnnnnnnnnnnnnnnnnnnnnnnnnnnnnnnnnnnnnnnnnnnnnnnnnnnnnnnnnnnnnnnnnnnnnnnnnnnnnnnnnnnnnnnnnnnnnnnnnnnnnnnnnnnnnnnnnnnnnnnnnnnnnnnnnnnnnnnnnnnnnnnnnnnnnnnnnnnnnnnnnnnnnnnnnnnnnnnnnnnnnnnnnnnnnnnnnnnnnnnnnnnnnnnnnnnnnnnnnnnnnnnnnnnnnnnnnnnnnnnnnnnnnnnnnnnnnnnnnnnnnnnnnnnnnnnnnnnnnnnnnnnnnnnnnnnnnnnnnnnnnnnnnnnnnnnnnnnnnnnnnnnnnnnnnnnnnnnnnnnnnnnnnnnnnnnnnnnnnnnnnnnnnnnnnnnnnnnnnnnnnnnnnnnnnnnnnnnnnnnnnnnnnnnnnnnnnnnnnnnnnnnnnnnnnnnnnnnnnnnnnnnnnnnnnnnnnnnnnnnnnnnnnnnnnnnnnnnnnnnnnnnnnnnnnnnnnnnnnnnnnnnnnnnnnnnnnnnnnnnnnnnnnnnnnnnnnnnnnnnnnnnnnnnnnnnnnnnnnnnnnnnnnnnnnnnnnnnnnnnnnnnnnnnnnnnnnnnnnnnnnnnnnnnnnnnnnnnnnnnnnnnnnnnnnnnnnnnnnnnnnnnnnnnnnnnnnnnnnnnnnnnnnnnnnnnnnnnnnnnnnnnnnnnnnnnnnnnnnnnnnnnnnnnnnnnnnnnnnnnnnnnnnnnnnnnnnnnnnnnnnnnnnnnnnnnnnnnnnnnnnnnnnnnnnnnnnnnnnnnnnnnnnnnnnnnnnnnnnnnnnnnnnnnnnnnnnnnnnnnnnnnnnnnnnnnnnnnnnnnnnnnnnnnnnnnnnnnnnnnnnnnnnnnnnnnnnnnnnnnnnnnnnnnnnnnnnnnnnnnnnnnnnnnnnnnnnnnnnnnnnnnnnnnnnnnnnnnnnnnnnnnnnnnnnnnnnnnnnnnnnnnnnnnnnnnnnnnnnnnnnnnnnnnnnnnnnnnnnnnnnnnnnnnnnnnnnnnnnnnnnnnnnnnnnnnnnnnnnnnnnnnnnnnnnnnnnnnnnnnnnnnnnnnnnnnnnnnnnnnnnnnnnnnnnnnnnnnnnnnnnnnnnnnnnnnnnnnnnnnnnnnnnnnnnnnnnnnnnnnnnnnnnnnnnnnnnnnnnnnnnnnnnnnnnnnnnnnnnnnnnnnnnnnnnnnnnnnnnnnnnnnnnnnnnnnnnnnnnnnnnnnnnnnnnnnnnnnnnnnnnnnnnnnnnnnnnnnnnnnnnnnnnnnnnnnnnnnnnnnnnnnnnnnnnnnnnnnnnnnnnnnnnnnnnnnnnnnnnnnnnnnnnnnnnnnnnnnnnnnnnnnnnnnnnnnnnnnnnnnnnnnnnnnnnnnnnnnnnnnnnnnnnnnnnnnnnnnnnnnnnnnnnnnnnnnnnnnnnnnnnnnnnnnnnnnnnnnnnnnnnnnnnnnnnnnnnnnnnnnnnnnnnnnnnnnnnnnnnnnnnnnnnnnnnnnnnnnnnnnnnnnnnnnnnnnnnnnnnnnnnnnnnnnnnnnnnnnnnnnnnnnnnnnnnnnnnnnnnnnnnnnnnnnnnnnnnnnnnnnnnnnnnnnnnnnnnnnnnnnnnnnnnnnnnnnnnnnnnnnnnnnnnnnnnnnnnnnnnnnnnnnnnnnnnnnnnnnnnnnnnnnnnnnnnnnnnnnnnnnnnnnnnnnnnnnnnnnnnnnnnnnnnnnnnnnnnnnnnnnnnnnnnnnnnnnnnnnnnnnnnnnnnnnnnnnnnnnnnnnnnnnnnnnnnnnnnnnnnnnnnnnnnnnnnnnnnnnnnnnnnnnnnnnnnnnnnnnnnnnnnnnnnnnnnnnnnnnnnnnnnnnnnnnnnnnnnnnnnnnnnnnnnnnnnnnnnnnnnnnnnnnnnnnnnnnnnnnnnnnnnnnnnnnnnnnnnnnnnnnnnnnnnnnnnnnnnnnnnnnnnnnnnnnnnnnnnnnnnnnnnnnnnnnnnnnnnnnnnnnnnnnnnnnnnnnnnnnnnnnnnnnnnnnnnnnnnnnnnnnnnnnnnnnnnnnnnnnnnnnnnnnnnnnnnnnnnnnnnnnnnnnnnnnnnnnnnnnnnnnnnnnnnnnnnnnnnnnnnnnnnnnnnnnnnnnnnnnnnnnnnnnnnnnnnnnnnnnnnnnnnnnnnnnnnnnnnnnnnnnnnnnnnnnnnnnnnnnnnnnnnnnnnnnnnnnnnnnnnnnnnnnnnnnnnnnnnnnnnnnnnnnnnnnnnnnnnnnnnnnnnnnnnnnnnnnnnnnnnnnnnnnnnnnnnnnnnnnnnnnnnnnnnnnnnnnnnnnnnnnnnnnnnnnnnnnnnnnnnnnnnnnnnnnnnnnnnnnnnnnnnnnnnnnnnnnnnnnnnnnnnnnnnnnnnnnnnnnnnnnnnnnnnnnnnnnnnnnnnnnnnnnnnnnnnnnnnnnnnnnnnnnnnnnnnnnnnnnnnnnnnnnnnnnnnnnnnnnnnnnnnnnnnnnnnnnnnnnnnnnnnnnnnnnnnnnnnnnnnnnnnnnnnnnnnnnnnnnnnnnnnnnnnnnnnnnnnnnnnnnnnnnnnnnnnnnnnnnnnnnnnnnnnnnnnnnnnnnnnnnnnnnnnnnnnnnnnnnnnnnnnnnnnnnnnnnnnnnnnnnnnnnnnnnnnnnnnnnnnnnnnnnnnnnnnnnnnnnnnnnnnnnnnnnnnnnnnnnnnnnnnnnnnnnnnnnnnnnnnnnnnnnnnnnnnnnnnnnnnnnnnnnnnnnnnnnnnnnnnnnnnnnnnnnnnnnnnnnnnnnnnnnnnnnnnnnnnnnnnnnnnnnnnnnnnnnnnnnnnnnnnnnnnnnnnnnnnnnnnnnnnnnnnnnnnnnnnnnnnnnnnnnnnnnnnnnnnnnnnnnnnnnnnnnnnnnnnnnnnnnnnnnnnnnnnnnnnnnnnnnnnnnnnnnnnnnnnnnnnnnnnnnnnnnnnnnnnnnnnnnnnnnnnnnnnnnnnnnnnnnnnnnnnnnnnnnnnnnnnnnnnnnnnnnnnnnnnnnnnnnnnnnnnnnnnnnnnnnnnnnnnnnnnnnnnnnnnnnnnnnnnnnnnnnnnnnnnnnnnnnnnnnnnnnnnnnnnnnnnnnnnnnnnnnnnnnnnnnnnnnnnnnnnnnnnnnnnnnnnnnnnnnnnnnnnnnnnnnnnnnnnnnnnnnnnnnnnnnnnnnnnnnnnnnnnnnnnnnnnnnnnnnnnnnnnnnnnnnnnnnnnnnnnnnnnnnnnnnnnnnnnnnnnnnnnnnnnnnnnnnnnnnnnnnnnnnnnnnnnnnnnnnnnnnnnnnnnnnnnnnnnnnnnnnnnnnnnnnnnnnnnnnnnnnnnnnnnnnnnnnnnnnnnnnnnnnnnnnnnnnnnnnnnnnnnnnnnnnnnnnnnnnnnnnnnnnnnnnnnnnnnnnnnnnnnnnnnnnnnnnnnnnnnnnnnnnnnnnnnnnnnnnnnnnnnnnnnnnnnnnnnnnnnnnnnnnnnnnnnnnnnnnnnnnnnnnnnnnnnnnnnnnnnnnnnnnnnnnnnnnnnnnnnnnnnnnnnnnnnnnnnnnnnnnnnnnnnnnnnnnnnnnnnnnnnnnnnnnnnnnnnnnnnnnnnnnnnnnnnnnnnnnnnnnnnnnnnnnnnnnnnnnnnnnnnnnnnnnnnnnnnnnnnnnnnnnnnnnnnnnnnnnnnnnnnnnnnnnnnnnnnnnnnnnnnnnnnnnnnnnnnnnnnnnnnnnnnnnnnnnnnnnnnnnnnnnnnnnnnnnnnnnnnnnnnnnnnnnnnnnnnnnnnnnnnnnnnnnnnnnnnnnnnnnnnnnnnnnnnnnnnnnnnnnnnnnnnnnnnnnnnnnnnnnnnnnnnnnnnnnnnnnnnnnnnnnnnnnnnnnnnnnnnnnnnnnnnnnnnnnnnnnnnnnnnnnnnnnnnnnnnnnnnnnnnnnnnnnnnnnnnnnnnnnnnnnnnnnnnnnnnnnnnnnnnnnnnnnnnnnnnnnnnnnnnnnnnnnnnnnnnnnnnnnnnnnnnnnnnnnnnnnnnnnnnnnnnnnnnnnnnnnnnnnnnnnnnnnnnnnnnnnnnnnnnnnnnnnnnnnnnnnnnnnnnnnnnnnnnnnnnnnnnnnnnnnnnnnnnnnnnnnnnnnnnnnnnnnnnnnnnnnnnnnnnnnnnnnnnnnnnnnnnnnnnnnnnnnnnnnnnnnnnnnnnnnnnnnnnnnnnnnnnnnnnnnnnnnnnnnnnnnnnnnnnnnnnnnnnnnnnnnnnnnnnnnnnnnnnnnnnnnnnnnnnnnnnnnnnnnnnnnnnnnnnnnnnnnnnnnnnnnnnnnnnnnnnnnnnnnnnnnnnnnnnnnnnnnnnnnnnnnnnnnnnnnnnnnnnnnnnnnnnnnnnnnnnnnnnnnnnnnnnnnnnnnnnnnnnnnnnnnnnnnnnnnnnnnnnnnnnnnnnnnnnnnnnnnnnnnnnnnnnnnnnnnnnnnnnnnnnnnnnnnnnnnnnnnnnnnnnnnnnnnnnnnnnnnnnnnnnnnnnnnnnnnnnnnnnnnnnnnnnnnnnnnnnnnnnnnnnnnnnnnnnnnnnnnnnnnnnnnnnnnnnnnnnnnnnnnnnnnnnnnnnnnnnnnnnnnnnnnnnnnnnnnnnnnnnnnnnnnnnnnnnnnnnnnnnnnnnnnnnnnnnnnnnnnnnnnnnnnnnnnnnnnnnnnnnnnnnnnnnnnnnnnnnnnnnnnnnnnnnnnnnnnnnnnnnnnnnnnnnnnnnnnnnnnnnnnnnnnnnnnnnnnnnnnnnnnnnnnnnnnnnnnnnnnnnnnnnnnnnnnnnnnnnnnnnnnnnnnnnnnnnnnnnnnnnnnnnnnnnnnnnnnnnnnnnnnnnnnnnnnnnnnnnnnnnnnnnnnnnnnnnnnnnnnnnnnnnnnnnnnnnnnnnnnnnnnnnnnnnnnnnnnnnnnnnnnnnnnnnnnnnnnnnnnnnnnnnnnnnnnnnnnnnnnnnnnnnnnnnnnnnnnnnnnnnnnnnnnnnnnnnnnnnnnnnnnnnnnnnnnnnnnnnnnnnnnnnnnnnnnnnnnnnnnnnnnnnnnnnnnnnnnnnnnnnnnnnnnnnnnnnnnnnnnnnnnnnnnnnnnnnnnnnnnnnnnnnnnnnnnnnnnnnnnnnnnnnnnnnnnnnnnnnnnnnnnnnnnnnnnnnnnnnnnnnnnnnnnnnnnnnnnnnnnnnnnnnnnnnnnnnnnnnnnnnnnnnnnnnnnnnnnnnnnnnnnnnnnnnnnnnnnnnnnnnnnnnnnnnnnnnnnnnnnnnnnnnnnnnnnnnnnnnnnnnnnnnnnnnnnnnnnnnnnnnnnnnnnnnnnnnnnnnnnnnnnnnnnnnnnnnnnnnnnnnnnnnnnnnnnnnnnnnnnnnnnnnnnnnnnnnnnnnnnnnnnnnnnnnnnnnnnnnnnnnnnnnnnnnnnnnnnnnnnnnnnnnnnnnnnnnnnnnnnnnnnnnnnnnnnnnnnnnnnnnnnnnnnnnnnnnnnnnnnnnnnnnnnnnnnnnnnnnnnnnnnnnnnnnnnnnnnnnnnnnnnnnnnnnnnnnnnnnnnnnnnnnnnnnnnnnnnnnnnnnnnnnnnnnnnnnnnnnnnnnnnnnnnnnnnnnnnnnnnnnnnnnnnnnnnnnnnnnnnnnnnnnnnnnnnnnnnnnnnnnnnnnnnnnnnnnnnnnnnnnnnnnnnnnnnnnnnnnnnnnnnnnnnnnnnnnnnnnnnnnnnnnnnnnnnnnnnnnnnnnnnnnnnnnnnnnnnnnnnnnnnnnnnnnnnnnnnnnnnnnnnnnnnnnnnnnnnnnnnnnnnnnnnnnnnnnnnnnnnnnnnnnnnnnnnnnnnnnnnnnnnnnnnnnnnnnnnnnnnnnnnnnnnnnnnnnnnnnnnnnnnnnnnnnnnnnnnnnnnnnnnnnnnnnnnnnnnnnnnnnnnnnnnnnnnnnnnnnnnnnnnnnnnnnnnnnnnnnnnnnnnnnnnnnnnnnnnnnnnnnnnnnnnnnnnnnnnnnnnnnnnnnnnnnnnnnnnnnnnnnnnnnnnnnnnnnnnnnnnnnnnnnnnnnnnnnnnnnnnnnnnnnnnnnnnnnnnnnnnnnnnnnnnnnnnnnnnnnnnnnnnnnnnnnnnnnnnnnnnnnnnnnnnnnnnnnnnnnnnnnnnnnnnnnnnnnnnnnnnnnnnnnnnnnnnnnnnnnnnnnnnnnnnnnnnnnnnnnnnnnnnnnnnnnnnnnnnnnnnnnnnnnnnnnnnnnnnnnnnnnnnnnnnnnnnnnnnnnnnnnnnnnnnnnnnnnnnnnnnnnnnnnnnnnnnnnnnnnnnnnnnnnnnnnnnnnnnnnnnnnnnnnnnnnnnnnnnnnnnnnnnnnnnnnnnnnnnnnnnnnnnnnnnnnnnnnnnnnnnnnnnnnnnnnnnnnnnnnnnnnnnnnnnnnnnnnnnnnnnnnnnnnnnnnnnnnnnnnnnnnnnnnnnnnnnnnnnnnnnnnnnnnnnnnnnnnnnnnnnnnnnnnnnnnnnnnnnnnnnnnnnnnnnnnnnnnnnnnnnnnnnnnnnnnnnnnnnnnnnnnnnnnnnnnnnnnnnnnnnnnnnnnnnnnnnnnnnnnnnnnnnnnnnnnnnnnnnnnnnnnnnnnnnnnnnnnnnnnnnnnnnnnnnnnnnnnnnnnnnnnnnnnnnnnnnnnnnnnnnnnnnnnnnnnnnnnnnnnnnnnnnnnnnnnnnnnnnnnnnnnnnnnnnnnnnnnnnnnnnnnnnnnnnnnnnnnnnnnnnnnnnnnnnnnnnnnnnnnnnnnnnnnnnnnnnnnnnnnnnnnnnnnnnnnnnnnnnnnnnnnnnnnnnnnnnnnnnnnnnnnnnnnnnnnnnnnnnnnnnnnnnnnnnnnnnnnnnnnnnnnnnnnnnnnnnnnnnnnnnnnnnnnnnnnnnnnnnnnnnnnnnnnnnnnnnnnnnnnnnnnnnnnnnnnnnnnnnnnnnnnnnnnnnnnnnnnnnnnnnnnnnnnnnnnnnnnnnnnnnnnnnnnnnnnnnnnnnnnnnnnnnnnnnnnnnnnnnnnnnnnnnnnnnnnnnnnnnnnnnnnnnnnnnnnnnnnnnnnnnnnnnnnnnnnnnnnnnnnnnnnnnnnnnnnnnnnnnnnnnnnnnnnnnnnnnnnnnnnnnnnnnnnnnnnnnnnnnnnnnnnnnnnnnnnnnnnnnnnnnnnnnnnnnnnnnnnnnnnnnnnnnnnnnnnnnnnnnnnnnnnnnnnnnnnnnnnnnnnnnnnnnnnnnnnnnnnnnnnnnnnnnnnnnnnnnnnnnnnnnnnnnnnnnnnnnnnnnnnnnnnnnnnnnnnnnnnnnnnnnnnnnnnnnnnnnnnnnnnnnnnnnnnnnnnnnnnnnnnnnnnnnnnnnnnnnnnnnnnnnnnnnnnnnnnnnnnnnnnnnnnnnnnnnnnnnnnnnnnnnnnnnnnnnnnnnnnnnnnnnnnnnnnnnnnnnnnnnnnnnnnnnnnnnnnnnnnnnnnnnnnnnnnnnnnnnnnnnnnnnnnnnnnnnnnnnnnnnnnnnnnnnnnnnnnnnnnnnnnnnnnnnnnnnnnnnnnnnnnnnnnnnnnnnnnnnnnnnnnnnnnnnnnnnnnnnnnnnnnnnnnnnnnnnnnnnnnnnnnnnnnnnnnnnnnnnnnnnnnnnnnnnnnnnnnnnnnnnnnnnnnnnnnnnnnnnnnnnnnnnnnnnnnnnnnnnnnnnnnnnnnnnnnnnnnnnnnnnnnnnnnnnnnnnnnnnnnnnnnnnnnnnnnnnnnnnnnnnnnnnnnnnnnnnnnnnnnnnnnnnnnnnnnnnnnnnnnnnnnnnnnnnnnnnnnnnnnnnnnnnnnnnnnnnnnnnnnnnnnnnnnnnnnnnnnnnnnnnnnnnnnnnnnnnnnnnnnnnnnnnnnnnnnnnnnnnnnnnnnnnnnnnnnnnnnnnnnnnnnnnnnnnnnnnnnnnnnnnnnnnnnnnnnnnnnnnnnnnnnnnnnnnnnnnnnnnnnnnnnnnnnnnnnnnnnnnnnnnnnnnnnnnnnnnnnnnnnnnnnnnnnnnnnnnnnnnnnnnnnnnnnnnnnnnnnnnnnnnnnnnnnnnnnnnnnnnnnnnnnnnnnnnnnnnnnnnnnnnnnnnnnnnnnnnnnnnnnnnnnnnnnnnnnnnnnnnnnnnnnnnnnnnnnnnnnnnnnnnnnnnnnnnnnnnnnnnnnnnnnnnnnnnnnnnnnnnnnnnnnnnnnnnnnnnnnnnnnnnnnnnnnnnnnnnnnnnnnnnnnnnnnnnnnnnnnnnnnnnnnnnnnnnnnnnnnnnnnnnnnnnnnnnnnnnnnnnnnnnnnnnnnnnnnnnnnnnnnnnnnnnnnnnnnnnnnnnnnnnnnnnnnnnnnnnnnnnnnnnnnnnnnnnnnnnnnnnnnnnnnnnnnnnnnnnnnnnnnnnnnnnnnnnnnnnnnnnnnnnnnnnnnnnnnnnnnnnnnnnnnnnnnnnnnnnnnnnnnnnnnnnnnnnnnnnnnnnnnnnnnnnnnnnnnnnnnnnnnnnnnnnnnnnnnnnnnnnnnnnnnnnnnnnnnnnnnnnnnnnnnnnnnnnnnnnnnnnnnnnnnnnnnnnnnnnnnnnnnnnnnnnnnnnnnnnnnnnnnnnnnnnnnnnnnnnnnnnnnnnnnnnnnnnnnnnnnnnnnnnnnnnnnnnnnnnnnnnnnnnnnnnnnnnnnnnnnnnnnnnnnnnnnnnnnnnnnnnnnnnnnnnnnnnnnnnnnnnnnnnnnnnnnnnnnnnnnnnnnnnnnnnnnnnnnnnnnnnnnnnnnnnnnnnnnnnnnnnnnnnnnnnnnnnnnnnnnnnnnnnnnnnnnnnnnnnnnnnnnnnnnnnnnnnnnnnnnnnnnnnnnnnnnnnnnnnnnnnnnnnnnnnnnnnnnnnnnnnnnnnnnnnnnnnnnnnnnnnnnnnnnnnnnnnnnnnnnnnnnnnnnnnnnnnnnnnnnnnnnnnnnnnnnnnnnnnnnnnnnnnnnnnnnnnnnnnnnnnnnnnnnnnnnnnnnnnnnnnnnnnnnnnnnnnnnnnnnnnnnnnnnnnnnnnnnnnnnnnnnnnnnnnnnnnnnnnnnnnnnnnnnnnnnnnnnnnnnnnnnnnnnnnnnnnnnnnnnnnnnnnnnnnnnnnnnnnnnnnnnnnnnnnnnnnnnnnnnnnnnnnnnnnnnnnnnnnnnnnnnnnnnnnnnnnnnnnnnnnnnnnnnnnnnnnnnnnnnnnnnnnnnnnnnnnnnnnnnnnnnnnnnnnnnnnnnnnnnnnnnnnnnnnnnnnnnnnnnnnnnnnnnnnnnnnnnnnnnnnnnnnnnnnnnnnnnnnnnnnnnnnnnnnnnnnnnnnnnnnnnnnnnnnnnnnnnnnnnnnnnnnnnnnnnnnnnnnnnnnnnnnnnnnnnnnnnnnnnnnnnnnnnnnnnnnnnnnnnnnnnnnnnnnnnnnnnnnnnnnnnnnnnnnnnnnnnnnnnnnnnnnnnnnnnnnnnnnnnnnnnnnnnnnnnnnnnnnnnnnnnnnnnnnnnnnnnnnnnnnnnnnnnnnnnnnnnnnnnnnnnnnnnnnnnnnnnnnnnnnnnnnnnnnnnnnnnnnnnnnnnnnnnnnnnnnnnnnnnnnnnnnnnnnnnnnnnnnnnnnnnnnnnnnnnnnnnnnnnnnnnnnnnnnnnnnnnnnnnnnnnnnnnnnnnnnnnnnnnnnnnnnnnnnnnnnnnnnnnnnnnnnnnnnnnnnnnnnnnnnnnnnnnnnnnnnnnnnnnnnnnnnnnnnnnnnnnnnnnnnnnnnnnnnnnnnnnnnnnnnnnnnnnnnnnnnnnnnnnnnnnnnnnnnnnnnnnnnnnnnnnnnnnnnnnnnnnnnnnnnnnnnnnnnnnnnnnnnnnnnnnnnnnnnnnnnnnnnnnnnnnnnnnnnnnnnnnnnnnnnnnnnnnnnnnnnnnnnnnnnnnnnnnnnnnnnnnnnnnnnnnnnnnnnnnnnnnnnnnnnnnnnnnnnnnnnnnnnnnnnnnnnnnnnnnnnnnnnnnnnnnnnnnnnnnnnnnnnnnnnnnnnnnnnnnnnnnnnnnnnnnnnnnnnnnnnnnnnnnnnnnnnnnnnnnnnnnnnnnnnnnnnnnnnnnnnnnnnnnnnnnnnnnnnnnnnnnnnnnnnnnnnnnnnnnnnnnnnnnnnnnnnnnnnnnnnnnnnnnnnnnnnnnnnnnnnnnnnnnnnnnnnnnnnnnnnnnnnnnnnnnnnnnnnnnnnnnnnnnnnnnnnnnnnnnnnnnnnnnnnnnnnnnnnnnnnnnnnnnnnnnnnnnnnnnnnnnnnnnnnnnnnnnnnnnnnnnnnnnnnnnnnnnnnnnnnnnnnnnnnnnnnnnnnnnnnnnnnnnnnnnnnnnnnnnnnnnnnnnnnnnnnnnnnnnnnnnnnnnnnnnnnnnnnnnnnnnnnnnnnnnnnnnnnnnnnnnnnnnnnnnnnnnnnnnnnnnnnnnnnnnnnnnnnnnnnnnnnnnnnnnnnnnnnnnnnnnnnnnnnnnnnnnnnnnnnnnnnnnnnnnnnnnnnnnnnnnnnnnnnnnnnnnnnnnnnnnnnnnnnnnnnnnnnnnnnnnnnnnnnnnnnnnnnnnnnnnnnnnnnnnnnnnnnnnnnnnnnnnnnnnnnnnnnnnnnnnnnnnnnnnnnnnnnnnnnnnnnnnnnnnnnnnnnnnnnnnnnnnnnnnnnnnnnnnnnnnnnnnnnnnnnnnnnnnnnnnnnnnnnnnnnnnnnnnnnnnnnnnnnnnnnnnnnnnnnnnnnnnnnnnnnnnnnnnnnnnnnnnnnnnnnnnnnnnnnnnnnnnnnnnnnnnnnnnnnnnnnnnnnnnnnnnnnnnnnnnnnnnnnnnnnnnnnnnnnnnnnnnnnnnnnnnnnnnnnnnnnnnnnnnnnnnnnnnnnnnnnnnnnnnnnnnnnnnnnnnnnnnnnnnnnnnnnnnnnnnnnnnnnnnnnnnnnnnnnnnnnnnnnnnnnnnnnnnnnnnnnnnnnnnnnnnnnnnnnnnnnnnnnnnnnnnnnnnnnnnnnnnnnnnnnnnnnnnnnnnnnnnnnnnnnnnnnnnnnnnnnnnnnnnnnnnnnnnnnnnnnnnnnnnnnnnnnnnnnnnnnnnnnnnnnnnnnnnnnnnnnnnnnnnnnnnnnnnnnnnnnnnnnnnnnnnnnnnnnnnnnnnnnnnnnnnnnnnnnnnnnnnnnnnnnnnnnnnnnnnnnnnnnnnnnnnnnnnnnnnnnnnnnnnnnnnnnnnnnnnnnnnnnnnnnnnnnnnnnnnnnnnnnnnnnnnnnnnnnnnnnnnnnnnnnnnnnnnnnnnnnnnnnnnnnnnnnnnnnnnnnnnnnnnnnnnnnnnnnnnnnnnnnnnnnnnnnnnnnnnnnnnnnnnnnnnnnnnnnnnnnnnnnnnnnnnnnnnnnnnnnnnnnnnnnnnnnnnnnnnnnnnnnnnnnnnnnnnnnnnnnnnnnnnnnnnnnnnnnnnnnnnnnnnnnnnnnnnnnnnnnnnnnnnnnnnnnnnnnnnnnnnnnnnnnnnnnnnnnnnnnnnnnnnnnnnnnnnnnnnnnnnnnnnnnnnnnnnnnnnnnnnnnnnnnnnnnnnnnnnnnnnnnnnnnnnnnnnnnnnnnnnnnnnnnnnnnnnnnnnnnnnnnnnnnnnnnnnnnnnnnnnnnnnnnnnnnnnnnnnnnnnnnnnnnnnnnnnnnnnnnnnnnnnnnnnnnnnnnnnnnnnnnnnnnnnnnnnnnnnnnnnnnnnnnnnnnnnnnnnnnnnnnnnnnnnnnnnnnnnnnnnnnnnnnnnnnnnnnnnnnnnnnnnnnnnnnnnnnnnnnnnnnnnnnnnnnnnnnnnnnnnnnnnnnnnnnnnnnnnnnnnnnnnnnnnnnnnnnnnnnnnnnnnnnnnnnnnnnnnnnnnnnnnnnnnnnnnnnnnnnnnnnnnnnnnnnnnnnnnnnnnnnnnnnnnnnnnnnnnnnnnnnnnnnnnnnnnnnnnnnnnnnnnnnnnnnnnnnnnnnnnnnnnnnnnnnnnnnnnnnnnnnnnnnnnnnnnnnnnnnnnnnnnnnnnnnnnnnnnnnnnnnnnnnnnnnnnnnnnnnnnnnnnnnnnnnnnnnnnnnnnnnnnnnnnnnnnnnnnnnnnnnnnnnnnnnnnnnnnnnnnnnnnnnnnnnnnnnnnnnnnnnnnnnnnnnnnnnnnnnnnnnnnnnnnnnnnnnnnnnnnnnnnnnnnnnnnnnnnnnnnnnnnnnnnnnnnnnnnnnnnnnnnnnnnnnnnnnnnnnnnnnnnnnnnnnnnnnnnnnnnnnnnnnnnnnnnnnnnnnnnnnnnnnnnnnnnnnnnnnnnnnnnnnnnnnnnnnnnnnnnnnnnnnnnnnnnnnnnnnnnnnnnnnnnnnnnnnnnnnnnnnnnnnnnnnnnnnnnnnnnnnnnnnnnnnnnnnnnnnnnnnnnnnnnnnnnnnnnnnnnnnnnnnnnnnnnnnnnnnnnnnnnnnnnnnnnnnnnnnnnnnnnnnnnnnnnnnnnnnnnnnnnnnnnnnnnnnnnnnnnnnnnnnnnnnnnnnnnnnnnnnnnnnnnnnnnnnnnnnnnnnnnnnnnnnnnnnnnnnnnnnnnnnnnnnnnnnnnnnnnnnnnnnnnnnnnnnnnnnnnnnnnnnnnnnnnnnnnnnnnnnnnnnnnnnnnnnnnnnnnnnnnnnnnnnnnnnnnnnnnnnnnnnnnnnnnnnnnnnnnnnnnnnnnnnnnnnnnnnnnnnnnnnnnnnnnnnnnnnnnnnnnnnnnnnnnnnnnnnnnnnnnnnnnnnnnnnnnnnnnnnnnnnnnnnnnnnnnnnnnnnnnnnnnnnnnnnnnnnnnnnnnnnnnnnnnnnnnnnnnnnnnnnnnnnnnnnnnnnnnnnnnnnnnnnnnnnnnnnnnnnnnnnnnnnnnnnnnnnnnnnnnnnnnnnnnnnnnnnnnnnnnnnnnnnnnnnnnnnnnnnnnnnnnnnnnnnnnnnnnnnnnnnnnnnnnnnnnnnnnnnnnnnnnnnnnnnnnnnnnnnnnnnnnnnnnnnnnnnnnnnnnnnnnnnnnnnnnnnnnnnnnnnnnnnnnnnnnnnnnnnnnnnnnnnnnnnnnnnnnnnnnnnnnnnnnnnnnnnnnnnnnnnnnnnnnnnnnnnnnnnnnnnnnnnnnnnnnnnnnnnnnnnnnnnnnnnnnnnnnnnnnnnnnnnnnnnnnnnnnnnnnnnnnnnnnnnnnnnnnnnnnnnnnnnnnnnnnnnnnnnnnnnnnnnnnnnnnnnnnnnnnnnnnnnnnnnnnnnnnnnnnnnnnnnnnnnnnnnnnnnnnnnnnnnnnnnnnnnnnnnnnnnnnnnnnnnnnnnnnnnnnnnnnnnnnnnnnnnnnnnnnnnnnnnnnnnnnnnnnnnnnnnnnnnnnnnnnnnnnnnnnnnnnnnnnnnnnnnnnnnnnnnnnnnnnnnnnnnnnnnnnnnnnnnnnnnnnnnnnnnnnnnnnnnnnnnnnnnnnnnnnnnnnnnnnnnnnnnnnnnnnnnnnnnnnnnnnnnnnnnnnnnnnnnnnnnnnnnnnnnnnnnnnnnnnnnnnnnnnnnnnnnnnnnnnnnnnnnnnnnnnnnnnnnnnnnnnnnnnnnnnnnnnnnnnnnnnnnnnnnnnnnnnnnnnnnnnnnnnnnnnnnnnnnnnnnnnnnnnnnnnnnnnnnnnnnnnnnnnnnnnnnnnnnnnnnnnnnnnnnnnnnnnnnnnnnnnnnnnnnnnnnnnnnnnnnnnnnnnnnnnnnnnnnnnnnnnnnnnnnnnnnnnnnnnnnnnnnnnnnnnnnnnnnnnnnnnnnnnnnnnnnnnnnnnnnnnnnnnnnnnnnnnnnnnnnnnnnnnnnnnnnnnnnnnnnnnnnnnnnnnnnnnnnnnnnnnnnnnnnnnnnnnnnnnnnnnnnnnnnnnnnnnnnnnnnnnnnnnnnnnnnnnnnnnnnnnnnnnnnnnnnnnnnnnnnnnnnnnnnnnnnnnnnnnnnnnnnnnnnnnnnnnnnnnnnnnnnnnnnnnnnnnnnnnnnnnnnnnnnnnnnnnnnnnnnnnnnnnnnnnnnnnnnnnnnnnnnnnnnnnnnnnnnnnnnnnnnnnnnnnnnnnnnnnnnnnnnnnnnnnnnnnnnnnnnnnnnnnnnnnnnnnnnnnnnnnnnnnnnnnnnnnnnnnnnnnnnnnnnnnnnnnnnnnnnnnnnnnnnnnnnnnnnnnnnnnnnnnnnnnnnnnnnnnnnnnnnnnnnnnnnnnnnnnnnnnnnnnnnnnnnnnnnnnnnnnnnnnnnnnnnnnnnnnnnnnnnnnnnnnnnnnnnnnnnnnnnnnnnnnnnnnnnnnnnnnnnnnnnnnnnnnnnnnnnnnnnnnnnnnnnnnnnnnnnnnnnnnnnnnnnnnnnnnnnnnnnnnnnnnnnnnnnnnnnnnnnnnnnnnnnnnnnnnnnnnnnnnnnnnnnnnnnnnnnnnnnnnnnnnnnnnnnnnnnnnnnnnnnnnnnnnnnnnnnnnnnnnnnnnnnnnnnnnnnnnnnnnnnnnnnnnnnnnnnnnnnnnnnnnnnnnnnnnnnnnnnnnnnnnnnnnnnnnnnnnnnnnnnnnnnnnnnnnnnnnnnnnnnnnnnnnnnnnnnnnnnnnnnnnnnnnnnnnnnnnnnnnnnnnnnnnnnnnnnnnnnnnnnnnnnnnnnnnnnnnnnnnnnnnnnnnnnnnnnnnnnnnnnnnnnnnnnnnnnnnnnnnnnnnnnnnnnnnnnnnnnnnnnnnnnnnnnnnnnnnnnnnnnnnnnnnnnnnnnnnnnnnnnnnnnnnnnnnnnnnnnnnnnnnnnnnnnnnnnnnnnnnnnnnnnnnnnnnnnnnnnnnnnnnnnnnnnnnnnnnnnnnnnnnnnnnnnnnnnnnnnnnnnnnnnnnnnnnnnnnnnnnnnnnnnnnnnnnnnnnnnnnnnnnnnnnnnnnnnnnnnnnnnnnnnnnnnnnnnnnnnnnnnnnnnnnnnnnnnnnnnnnnnnnnnnnnnnnnnnnnnnnnnnnnnnnnnnnnnnnnnnnnnnnnnnnnnnnnnnnnnnnnnnnnnnnnnnnnnnnnnnnnnnnnnnnnnnnnnnnnnnnnnnnnnnnnnnnnnnnnnnnnnnnnnnnnnnnnnnnnnnnnnnnnnnnnnnnnnnnnnnnnnnnnnnnnnnnnnnnnnnnnnnnnnnnnnnnnnnnnnnnnnnnnnnnnnnnnnnnnnnnnnnnnnnnnnnnnnnnnnnnnnnnnnnnnnnnnnnnnnnnnnnnnnnnnnnnnnnnnnnnnnnnnnnnnnnnnnnnnnnnnnnnnnnnnnnnnnnnnnnnnnnnnnnnnnnnnnnnnnnnnnnnnnnnnnnnnnnnnnnnnnnnnnnnnnnnnnnnnnnnnnnnnnnnnnnnnnnnnnnnnnnnnnnnnnnnnnnnnnnnnnnnnnnnnnnnnnnnnnnnnnnnnnnnnnnnnnnnnnnnnnnnnnnnnnnnnnnnnnnnnnnnnnnnnnnnnnnnnnnnnnnnnnnnnnnnnnnnnnnnnnnnnnnnnnnnnnnnnnnnnnnnnnnnnnnnnnnnnnnnnnnnnnnnnnnnnnnnnnnnnnnnnnnnnnnnnnnnnnnnnnnnnnnnnnnnnnnnnnnnnnnnnnnnnnnnnnnnnnnnnnnnnnnnnnnnnnnnnnnnnnnnnnnnnnnnnnnnnnnnnnnnnnnnnnnnnnnnnnnnnnnnnnnnnnnnnnnnnnnnnnnnnnnnnnnnnnnnnnnnnnnnnnnnnnnnnnnnnnnnnnnnnnnnnnnnnnnnnnnnnnnnnnnnnnnnnnnnnnnnnnnnnnnnnnnnnnnnnnnnnnnnnnnnnnnnnnnnnnnnnnnnnnnnnnnnnnnnnnnnnnnnnnnnnnnnnnnnnnnnnnnnnnnnnnnnnnnnnnnnnnnnnnnnnnnnnnnnnnnnnnnnnnnnnnnnnnnnnnnnnnnnnnnnnnnnnnnnnnnnnnnnnnnnnnnnnnnnnnnnnnnnnnnnnnnnnnnnnnnnnnnnnnnnnnnnnnnnnnnnnnnnnnnnnnnnnnnnnnnnnnnnnnnnnnnnnnnnnnnnnnnnnnnnnnnnnnnnnnnnnnnnnnnnnnnnnnnnnnnnnnnnnnnnnnnnnnnnnnnnnnnnnnnnnnnnnnnnnnnnnnnnnnnnnnnnnnnnnnnnnnnnnnnnnnnnnnnnnnnnnnnnnnnnnnnnnnnnnnnnnnnnnnnnnnnnnnnnnnnnnnnnnnnnnnnnnnnnnnnnnnnnnnnnnnnnnnnnnnnnnnnnnnnnnnnnnnnnnnnnnnnnnnnnnnnnnnnnnnnnnnnnnnnnnnnnnnnnnnnnnnnnnnnnnnnnnnnnnnnnnnnnnnnnnnnnnnnnnnnnnnnnnnnnnnnnnnnnnnnnnnnnnnnnnnnnnnnnnnnnnnnnnnnnnnnnnnnnnnnnnnnnnnnnnnnnnnnnnnnnnnnnnnnnnnnnnnnnnnnnnnnnnnnnnnnnnnnnnnnnnnnnnnnnnnnnnnnnnnnnnnnnnnnnnnnnnnnnnnnnnnnnnnnnnnnnnnnnnnnnnnnnnnnnnnnnnnnnnnnnnnnnnnnnnnnnnnnnnnnnnnnnnnnnnnnnnnnnnnnnnnnnnnnnnnnnnnnnnnnnnnnnnnnnnnnnnnnnnnnnnnnnnnnnnnnnnnnnnnnnnnnnnnnnnnnnnnnnnnnnnnnnnnnnnnnnnnnnnnnnnnnnnnnnnnnnnnnnnnnnnnnnnnnnnnnnnnnnnnnnnnnnnnnnnnnnnnnnnnnnnnnnnnnnnnnnnnnnnnnnnnnnnnnnnnnnnnnnnnnnnnnnnnnnnnnnnnnnnnnnnnnnnnnnnnnnnnnnnnnnnnnnnnnnnnnnnnnnnnnnnnnnnnnnnnnnnnnnnnnnnnnnnnnnnnnnnnnnnnnnnnnnnnnnnnnnnnnnnnnnnnnnnnnnnnnnnnnnnnnnnnnnnnnnnnnnnnnnnnnnnnnnnnnnnnnnnnnnnnnnnnnnnnnnnnnnnnnnnnnnnnnnnnnnnnnnnnnnnnnnnnnnnnnnnnnnnnnnnnnnnnnnnnnnnnnnnnnnnnnnnnnnnnnnnnnnnnnnnnnnnnnnnnnnnnnnnnnnnnnnnnnnnnnnnnnnnnnnnnnnnnnnnnnnnnnnnnnnnnnnnnnnnnnnnnnnnnnnnnnnnnnnnnnnnnnnnnnnnnnnnnnnnnnnnnnnnnnnnnnnnnnnnnnnnnnnnnnnnnnnnnnnnnnnnnnnnnnnnnnnnnnnnnnnnnnnnnnnnnnnnnnnnnnnnnnnnnnnnnnnnnnnnnnnnnnnnnnnnnnnnnnnnnnnnnnnnnnnnnnnnnnnnnnnnnnnnnnnnnnnnnnnnnnnnnnnnnnnnnnnnnnnnnnnnnnnnnnnnnnnnnnnnnnnnnnnnnnnnnnnnnnnnnnnnnnnnnnnnnnnnnnnnnnnnnnnnnnnnnnnnnnnnnnnnnnnnnnnnnnnnnnnnnnnnnnnnnnnnnnnnnnnnnnnnnnnnnnnnnnnnnnnnnnnnnnnnnnnnnnnnnnnnnnnnnnnnnnnnnnnnnnnnnnnnnnnnnnnnnnnnnnnnnnnnnnnnnnnnnnnnnnnnnnnnnnnnnnnnnnnnnnnnnnnnnnnnnnnnnnnnnnnnnnnnnnnnnnnnnnnnnnnnnnnnnnnnnnnnnnnnnnnnnnnnnnnnnnnnnnnnnnnnnnnnnnnnnnnnnnnnnnnnnnnnnnnnnnnnnnnnnnnnnnnnnnnnnnnnnnnnnnnnnnnnnnnnnnnnnnnnnnnnnnnnnnnnnnnnnnnnnnnnnnnnnnnnnnnnnnnnnnnnnnnnnnnnnnnnnnnnnnnnnnnnnnnnnnnnnnnnnnnnnnnnnnnnnnnnnnnnnnnnnnnnnnnnnnnnnnnnnnnnnnnnnnnnnnnnnnnnnnnnnnnnnnnnnnnnnnnnnnnnnnnnnnnnnnnnnnnnnnnnnnnnnnnnnnnnnnnnnnnnnnnnnnnnnnnnnnnnnnnnnnnnnnnnnnnnnnnnnnnnnnnnnnnnnnnnnnnnnnnnnnnnnnnnnnnnnnnnnnnnnnnnnnnnnnnnnnnnnnnnnnnnnnnnnnnnnnnnnnnnnnnnnnnnnnnnnnnnnnnnnnnnnnnnnnnnnnnnnnnnnnnnnnnnnnnnnnnnnnnnnnnnnnnnnnnnnnnnnnnnnnnnnnnnnnnnnnnnnnnnnnnnnnnnnnnnnnnnnnnnnnnnnnnnnnnnnnnnnnnnnnnnnnnnnnnnnnnnnnnnnnnnnnnnnnnnnnnnnnnnnnnnnnnnnnnnnnnnnnnnnnnnnnnnnnnnnnnnnnnnnnnnnnnnnnnnnnnnnnnnnnnnnnnnnnnnnnnnnnnnnnnnnnnnnnnnnnnnnnnnnnnnnnnnnnnnnnnnnnnnnnnnnnnnnnnnnnnnnnnnnnnnnnnnnnnnnnnnnnnnnnnnnnnnnnnnnnnnnnnnnnnnnnnnnnnnnnnnnnnnnnnnnnnnnnnnnnnnnnnnnnnnnnnnnnnnnnnnnnnnnnnnnnnnnnnnnnnnnnnnnnnnnnnnnnnnnnnnnnnnnnnnnnnnnnnnnnnnnnnnnnnnnnnnnnnnnnnnnnnnnnnnnnnnnnnnnnnnnnnnnnnnnnnnnnnnnnnnnnnnnnnnnnnnnnnnnnnnnnnnnnnnnnnnnnnnnnnnnnnnnnnnnnnnnnnnnnnnnnnnnnnnnnnnnnnnnnnnnnnnnnnnnnnnnnnnnnnnnnnnnnnnnnnnnnnnnnnnnnnnnnnnnnnnnnnnnnnnnnnnnnnnnnnnnnnnnnnnnnnnnnnnnnnnnnnnnnnnnnnnnnnnnnnnnnnnnnnnnnnnnnnnnnnnnnnnnnnnnnnnnnnnnnnnnnnnnnnnnnnnnnnnnnnnnnnnnnnnnnnnnnnnnnnnnnnnnnnnnnnnnnnnnnnnnnnnnnnnnnnnnnnnnnnnnnnnnnnnnnnnnnnnnnnnnnnnnnnnnnnnnnnnnnnnnnnnnnnnnnnnnnnnnnnnnnnnnnnnnnnnnnnnnnnnnnnnnnnnnnnnnnnnnnnnnnnnnnnnnnnnnnnnnnnnnnnnnnnnnnnnnnnnnnnnnnnnnnnnnnnnnnnnnnnnnnnnnnnnnnnnnnnnnnnnnnnnnnnnnnnnnnnnnnnnnnnnnnnnnnnnnnnnnnnnnnnnnnnnnnnnnnnnnnnnnnnnnnnnnnnnnnnnnnnnnnnnnnnnnnnnnnnnnnnnnnnnnnnnnnnnnnnnnnnnnnnnnnnnnnnnnnnnnnnnnnnnnnnnnnnnnnnnnnnnnnnnnnnnnnnnnnnnnnnnnnnnnnnnnnnnnnnnnnnnnnnnnnnnnnnnnnnnnnnnnnnnnnnnnnnnnnnnnnnnnnnnnnnnnnnnnnnnnnnnnnnnnnnnnnnnnnnnnnnnnnnnnnnnnnnnnnnnnnnnnnnnnnnnnnnnnnnnnnnnnnnnnnnnnnnnnnnnnnnnnnnnnnnnnnnnnnnnnnnnnnnnnnnnnnnnnnnnnnnnnnnnnnnnnnnnnnnnnnnnnnnnnnnnnnnnnnnnnnnnnnnnnnnnnnnnnnnnnnnnnnnnnnnnnnnnnnnnnnnnnnnnnnnnnnnnnnnnnnnnnnnnnnnnnnnnnnnnnnnnnnnnnnnnnnnnnnnnnnnnnnnnnnnnnnnnnnnnnnnnnnnnnnnnnnnnnnnnnnnnnnnnnnnnnnnnnnnnnnnnnnnnnnnnnnnnnnnnnnnnnnnnnnnnnnnnnnnnnnnnnnnnnnnnnnnnnnnnnnnnnnnnnnnnnnnnnnnnnnnnnnnnnnnnnnnnnnnnnnnnnnnnnnnnnnnnnnnnnnnnnnnnnnnnnnnnnnnnnnnnnnnnnnnnnnnnnnnnnnnnnnnnnnnnnnnnnnnnnnnnnnnnnnnnnnnnnnnnnnnnnnnnnnnnnnnnnnnnnnnnnnnnnnnnnnnnnnnnnnnnnnnnnnnnnnnnnnnnnnnnnnnnnnnnnnnnnnnnnnnnnnnnnnnnnnnnnnnnnnnnnnnnnnnnnnnnnnnnnnnnnnnnnnnnnnnnnnnnnnnnnnnnnnnnnnnnnnnnnnnnnnnnnnnnnnnnnnnnnnnnnnnnnnnnnnnnnnnnnnnnnnnnnnnnnnnnnnnnnnnnnnnnnnnnnnnnnnnnnnnnnnnnnnnnnnnnnnnnnnnnnnnnnnnnnnnnnnnnnnnnnnnnnnnnnnnnnnnnnnnnnnnnnnnnnnnnnnnnnnnnnnnnnnnnnnnnnnnnnnnnnnnnnnnnnnnnnnnnnnnnnnnnnnnnnnnnnnnnnnnnnnnnnnnnnnnnnnnnnnnnnnnnnnnnnnnnnnnnnnnnnnnnnnnnnnnnnnnnnnnnnnnnnnnnnnnnnnnnnnnnnnnnnnnnnnnnnnnnnnnnnnnnnnnnnnnnnnnnnnnnnnnnnnnnnnnnnnnnnnnnnnnnnnnnnnnnnnnnnnnnnnnnnnnnnnnnnnnnnnnnnnnnnnnnnnnnnnnnnnnnnnnnnnnnnnnnnnnnnnnnnnnnnnnnnnnnnnnnnnnnnnnnnnnnnnnnnnnnnnnnnnnnnnnnnnnnnnnnnnnnnnnnnnnnnnnnnnnnnnnnnnnnnnnnnnnnnnnnnnnnnnnnnnnnnnnnnnnnnnnnnnnnnnnnnnnnnnnnnnnnnnnnnnnnnnnnnnnnnnnnnnnnnnnnnnnnnnnnnnnnnnnnnnnnnnnnnnnnnnnnnnnnnnnnnnnnnnnnnnnnnnnnnnnnnnnnnnnnnnnnnnnnnnnnnnnnnnnnnnnnnnnnnnnnnnnnnnnnnnnnnnnnnnnnnnnnnnnnnnnnnnnnnnnnnnnnnnnnnnnnnnnnnnnnnnnnnnnnnnnnnnnnnnnnnnnnnnnnnnnnnnnnnnnnnnnnnnnnnnnnnnnnnnnnnnnnnnnnnnnnnnnnnnnnnnnnnnnnnnnnnnnnnnnnnnnnnnnnnnnnnnnnnnnnnnnnnnnnnnnnnnnnnnnnnnnnnnnnnnnnnnnnnnnnnnnnnnnnnnnnnnnnnnnnnnnnnnnnnnnnnnnnnnnnnnnnnnnnnnnnnnnnnnnnnnnnnnnnnnnnnnnnnnnnnnnnnnnnnnnnnnnnnnnnnnnnnnnnnnnnnnnnnnnnnnnnnnnnnnnnnnnnnnnnnnnnnnnnnnnnnnnnnnnnnnnnnnnnnnnnnnnnnnnnnnnnnnnnnnnnnnnnnnnnnnnnnnnnnnnnnnnnnnnnnnnnnnnnnnnnnnnnnnnnnnnnnnnnnnnnnnnnnnnnnnnnnnnnnnnnnnnnnnnnnnnnnnnnnnnnnnnnnnnnnnnnnnnnnnnnnnnnnnnnnnnnnnnnnnnnnnnnnnnnnnnnnnnnnnnnnnnnnnnnnnnnnnnnnnnnnnnnnnnnnnnnnnnnnnnnnnnnnnnnnnnnnnnnnnnnnnnnnnnnnnnnnnnnnnnnnnnnnnnnnnnnnnnnnnnnnnnnnnnnnnnnnnnnnnnnnnnnnnnnnnnnnnnnnnnnnnnnnnnnnnnnnnnnnnnnnnnnnnnnnnnnnnnnnnnnnnnnnnnnnnnnnnnnnnnnnnnnnnnnnnnnnnnnnnnnnnnnnnnnnnnnnnnnnnnnnnnnnnnnnnnnnnnnnnnnnnnnnnnnnnnnnnnnnnnnnnnnnnnnnnnnnnnnnnnnnnnnnnnnnnnnnnnnnnnnnnnnnnnnnnnnnnnnnnnnnnnnnnnnnnnnnnnnnnnnnnnnnnnnnnnnnnnnnnnnnnnnnnnnnnnnnnnnnnnnnnnnnnnnnnnnnnnnnnnnnnnnnnnnnnnnnnnnnnnnnnnnnnnnnnnnnnnnnnnnnnnnnnnnnnnnnnnnnnnnnnnnnnnnnnnnnnnnnnnnnnnnnnnnnnnnnnnnnnnnnnnnnnnnnnnnnnnnnnnnnnnnnnnnnnnnnnnnnnnnnnnnnnnnnnnnnnnnnnnnnnnnnnnnnnnnnnnnnnnnnnnnnnnnnnnnnnnnnnnnnnnnnnnnnnnnnnnnnnnnnnnnnnnnnnnnnnnnnnnnnnnnnnnnnnnnnnnnnnnnnnnnnnnnnnnnnnnnnnnnnnnnnnnnnnnnnnnnnnnnnnnnnnnnnnnnnnnnnnnnnnnnnnnnnnnnnnnnnnnnnnnnnnnnnnnnnnnnnnnnnnnnnnnnnnnnnnnnnnnnnnnnnnnnnnnnnnnnnnnnnnnnnnnnnnnnnnnnnnnnnnnnnnnnnnnnnnnnnnnnnnnnnnnnnnnnnnnnnnnnnnnnnnnnnnnnnnnnnnnnnnnnnnnnnnnnnnnnnnnnnnnnnnnnnnnnnnnnnnnnnnnnnnnnnnnnnnnnnnnnnnnnnnnnnnnnnnnnnnnnnnnnnnnnnnnnnnnnnnnnnnnnnnnnnnnnnnnnnnnnnnnnnnnnnnnnnnnnnnnnnnnnnnnnnnnnnnnnnnnnnnnnnnnnnnnnnnnnnnnnnnnnnnnnnnnnnnnnnnnnnnnnnnnnnnnnnnnnnnnnnnnnnnnnnnnnnnnnnnnnnnnnnnnnnnnnnnnnnnnnnnnnnnnnnnnnnnnnnnnnnnnnnnnnnnnnnnnnnnnnnnnnnnnnnnnnnnnnnnnnnnnnnnnnnnnnnnnnnnnnnnnnnnnnnnnnnnnnnnnnnnnnnnnnnnnnnnnnnnnnnnnnnnnnnnnnnnnnnnnnnnnnnnnnnnnnnnnnnnnnnnnnnnnnnnnnnnnnnnnnnnnnnnnnnnnnnnnnnnnnnnnnnnnnnnnnnnnnnnnnnnnnnnnnnnnnnnnnnnnnnnnnnnnnnnnnnnnnnnnnnnnnnnnnnnnnnnnnnnnnnnnnnnnnnnnnnnnnnnnnnnnnnnnnnnnnnnnnnnnnnnnnnnnnnnnnnnnnnnnnnnnnnnnnnnnnnnnnnnnnnnnnnnnnnnnnnnnnnnnnnnnnnnnnnnnnnnnnnnnnnnnnnnnnnnnnnnnnnnnnnnnnnnnnnnnnnnnnnnnnnnnnnnnnnnnnnnnnnnnnnnnnnnnnnnnnnnnnnnnnnnnnnnnnnnnnnnnnnnnnnnnnnnnnnnnnnnnnnnnnnnnnnnnnnnnnnnnnnnnnnnnnnnnnnnnnnnnnnnnnnnnnnnnnnnnnnnnnnnnnnnnnnnnnnnnnnnnnnnnnnnnnnnnnnnnnnnnnnnnnnnnnnnnnnnnnnnnnnnnnnnnnnnnnnnnnnnnnnnnnnnnnnnnnnnnnnnnnnnnnnnnnnnnnnnnnnnnnnnnnnnnnnnnnnnnnnnnnnnnnnnnnnnnnnnnnnnnnnnnnnnnnnnnnnnnnnnnnnnnnnnnnnnnnnnnnnnnnnnnnnnnnnnnnnnnnnnnnnnnnnnnnnnnnnnnnnnnnnnnnnnnnnnnnnnnnnnnnnnnnnnnnnnnnnnnnnnnnnnnnnnnnnnnnnnnnnnnnnnnnnnnnnnnnnnnnnnnnnnnnnnnnnnnnnnnnnnnnnnnnnnnnnnnnnnnnnnnnnnnnnnnnnnnnnnnnnnnnnnnnnnnnnnnnnnnnnnnnnnnnnnnnnnnnnnnnnnnnnnnnnnnnnnnnnnnnnnnnnnnnnnnnnnnnnnnnnnnnnnnnnnnnnnnnnnnnnnnnnnnnnnnnnnnnnnnnnnnnnnnnnnnnnnnnnnnnnnnnnnnnnnnnnnnnnnnnnnnnnnnnnnnnnnnnnnnnnnnnnnnnnnnnnnnnnnnnnnnnnnnnnnnnnnnnnnnnnnnnnnnnnnnnnnnnnnnnnnnnnnnnnnnnnnnnnnnnnnnnnnnnnnnnnnnnnnnnnnnnnnnnnnnnnnnnnnnnnnnnnnnnnnnnnnnnnnnnnnnnnnnnnnnnnnnnnnnnnnnnnnnnnnnnnnnnnnnnnnnnnnnnnnnnnnnnnnnnnnnnnnnnnnnnnnnnnnnnnnnnnnnnnnnnnnnnnnnnnnnnnnnnnnnnnnnnnnnnnnnnnnnnnnnnnnnnnnnnnnnnnnnnnnnnnnnnnnnnnnnnnnnnnnnnnnnnnnnnnnnnnnnnnnnnnnnnnnnnnnnnnnnnnnnnnnnnnnnnnnnnnnnnnnnnnnnnnnnnnnnnnnnnnnnnnnnnnnnnnnnnnnnnnnnnnnnnnnnnnnnnnnnnnnnnnnnnnnnnnnnnnnnnnnnnnnnnnnnnnnnnnnnnnnnnnnnnnnnnnnnnnnnnnnnnnnnnnnnnnnnnnnnnnnnnnnnnnnnnnnnnnnnnnnnnnnnnnnnnnnnnnnnnnnnnnnnnnnnnnnnnnnnnnnnnnnnnnnnnnnnnnnnnnnnnnnnnnnnnnnnnnnnnnnnnnnnnnnnnnnnnnnnnnnnnnnnnnnnnnnnnnnnnnnnnnnnnnnnnnnnnnnnnnnnnnnnnnnnnnnnnnnnnnnnnnnnnnnnnnnnnnnnnnnnnnnnnnnnnnnnnnnnnnnnnnnnnnnnnnnnnnnnnnnnnnnnnnnnnnnnnnnnnnnnnnnnnnnnnnnnnnnnnnnnnnnnnnnnnnnnnnnnnnnnnnnnnnnnnnnnnnnnnnnnnnnnnnnnnnnnnnnnnnnnnnnnnnnnnnnnnnnnnnnnnnnnnnnnnnnnnnnnnnnnnnnnnnnnnnnnnnnnnnnnnnnnnnnnnnnnnnnnnnnnnnnnnnnnnnnnnnnnnnnnnnnnnnnnnnnnnnnnnnnnnnnnnnnnnnnnnnnnnnnnnnnnnnnnnnnnnnnnnnnnnnnnnnnnnnnnnnnnnnnnnnnnnnnnnnnnnnnnnnnnnnnnnnnnnnnnnnnnnnnnnnnnnnnnnnnnnnnnnnnnnnnnnnnnnnnnnnnnnnnnnnnnnnnnnnnnnnnnnnnnnnnnnnnnnnnnnnnnnnnnnnnnnnnnnnnnnnnnnnnnnnnnnnnnnnnnnnnnnnnnnnnnnnnnnnnnnnnnnnnnnnnnnnnnnnnnnnnnnnnnnnnnnnnnnnnnnnnnnnnnnnnnnnnnnnnnnnnnnnnnnnnnnnnnnnnnnnnnnnnnnnnnnnnnnnnnnnnnnnnnnnnnnnnnnnnnnnnnnnnnnnnnnnnnnnnnnnnnnnnnnnnnnnnnnnnnnnnnnnnnnnnnnnnnnnnnnnnnnnnnnnnnnnnnnnnnnnnnnnnnnnnnnnnnnnnnnnnnnnnnnnnnnnnnnnnnnnnnnnnnnnnnnnnnnnnnnnnnnnnnnnnnnnnnnnnnnnnnnnnnnnnnnnnnnnnnnnnnnnnnnnnnnnnnnnnnnnnnnnnnnnnnnnnnnnnnnnnnnnnnnnnnnnnnnnnnnnnnnnnnnnnnnnnnnnnnnnnnnnnnnnnnnnnnnnnnnnnnnnnnnnnnnnnnnnnnnnnnnnnnnnnnnnnnnnnnnnnnnnnnnnnnnnnnnnnnnnnnnnnnnnnnnnnnnnnnnnnnnnnnnnnnnnnnnnnnnnnnnnnnnnnnnnnnnnnnnnnnnnnnnnnnnnnnnnnnnnnnnnnnnnnnnnnnnnnnnnnnnnnnnnnnnnnnnnnnnnnnnnnnnnnnnnnnnnnnnnnnnnnnnnnnnnnnnnnnnnnnnnnnnnnnnnnnnnnnnnnnnnnnnnnnnnnnnnnnnnnnnnnnnnnnnnnnnnnnnnnnnnnnnnnnnnnnnnnnnnnnnnnnnnnnnnnnnnnnnnnnnnnnnnnnnnnnnnnnnnnnnnnnnnnnnnnnnnnnnnnnnnnnnnnnnnnnnnnnnnnnnnnnnnnnnnnnnnnnnnnnnnnnnnnnnnnnnnnnnnnnnnnnnnnnnnnnnnnnnnnnnnnnnnnnnnnnnnnnnnnnnnnnnnnnnnnnnnnnnnnnnnnnnnnnnnnnnnnnnnnnnnnnnnnnnnnnnnnnnnnnnnnnnnnnnnnnnnnnnnnnnnnnnnnnnnnnnnnnnnnnnnnnnnnnnnnnnnnnnnnnnnnnnnnnnnnnnnnnnnnnnnnnnnnnnnnnnnnnnnnnnnnnnnnnnnnnnnnnnnnnnnnnnnnnnnnnnnnnnnnnnnnnnnnnnnnnnnnnnnnnnnnnnnnnnnnnnnnnnnnnnnnnnnnnnnnnnnnnnnnnnnnnnnnnnnnnnnnnnnnnnnnnnnnnnnnnnnnnnnnnnnnnnnnnnnnnnnnnnnnnnnnnnnnnnnnnnnnnnnnnnnnnnnnnnnnnnnnnnnnnnnnnnnnnnnnnnnnnnnnnnnnnnnnnnnnnnnnnnnnnnnnnnnnnnnnnnnnnnnnnnnnnnnnnnnnnnnnnnnnnnnnnnnnnnnnnnnnnnnnnnnnnnnnnnnnnnnnnnnnnnnnnnnnnnnnnnnnnnnnnnnnnnnnnnnnnnnnnnnnnnnnnnnnnnnnnnnnnnnnnnnnnnnnnnnnnnnnnnnnnnnnnnnnnnnnnnnnnnnnnnnnnnnnnnnnnnnnnnnnnnnnnnnnnnnnnnnnnnnnnnnnnnnnnnnnnnnnnnnnnnnnnnnnnnnnnnnnnnnnnnnnnnnnnnnnnnnnnnnnnnnnnnnnnnnnnnnnnnnnnnnnnnnnnnnnnnnnnnnnnnnnnnnnnnnnnnnnnnnnnnnnnnnnnnnnnnnnnnnnnnnnnnnnnnnnnnnnnnnnnnnnnnnnnnnnnnnnnnnnnnnnnnnnnnnnnnnnnnnnnnnnnnnnnnnnnnnnnnnnnnnnnnnnnnnnnnnnnnnnnnnnnnnnnnnnnnnnnnnnnnnnnnnnnnnnnnnnnnnnnnnnnnnnnnnnnnnnnnnnnnnnnnnnnnnnnnnnnnnnnnnnnnnnnnnnnnnnnnnnnnnnnnnnnnnnnnnnnnnnnnnnnnnnnnnnnnnnnnnnnnnnnnnnnnnnnnnnnnnnnnnnnnnnnnnnnnnnnnnnnnnnnnnnnnnnnnnnnnnnnnnnnnnnnnnnnnnnnnnnnnnnnnnnnnnnnnnnnnnnnnnnnnnnnnnnnnnnnnnnnnnnnnnnnnnnnnnnnnnnnnnnnnnnnnnnnnnnnnnnnnnnnnnnnnnnnnnnnnnnnnnnnnnnnnnnnnnnnnnnnnnnnnnnnnnnnnnnnnnnnnnnnnnnnnnnnnnnnnnnnnnnnnnnnnnnnnnnnnnnnnnnnnnnnnnnnnnnnnnnnnnnnnnnnnnnnnnnnnnnnnnnnnnnnnnnnnnnnnnnnnnnnnnnnnnnnnnnnnnnnnnnnnnnnnnnnnnnnnnnnnnnnnnnnnnnnnnnnnnnnnnnnnnnnnnnnnnnnnnnnnnnnnnnnnnnnnnnnnnnnnnnnnnnnnnnnnnnnnnnnnnnnnnnnnnnnnnnnnnnnnnnnnnnnnnnnnnnnnnnnnnnnnnnnnnnnnnnnnnnnnnnnnnnnnnnnnnnnnnnnnnnnnnnnnnnnnnnnnnnnnnnnnnnnnnnnnnnnnnnnnnnnnnnnnnnnnnnnnnnnnnnnnnnnnnnnnnnnnnnnnnnnnnnnnnnnnnnnnnnnnnnnnnnnnnnnnnnnnnnnnnnnnnnnnnnnnnnnnnnnnnnnnnnnnnnnnnnnnnnnnnnnnnnnnnnnnnnnnnnnnnnnnnnnnnnnnnnnnnnnnnnnnnnnnnnnnnnnnnnnnnnnnnnnnnnnnnnnnnnnnnnnnnnnnnnnnnnnnnnnnnnnnnnnnnnnnnnnnnnnnnnnnnnnnnnnnnnnnnnnnnnnnnnnnnnnnnnnnnnnnnnnnnnnnnnnnnnnnnnnnnnnnnnnnnnnnnnnnnnnnnnnnnnnnnnnnnnnnnnnnnnnnnnnnnnnnnnnnnnnnnnnnnnnnnnnnnnnnnnnnnnnnnnnnnnnnnnnnnnnnnnnnnnnnnnnnnnnnnnnnnnnnnnnnnnnnnnnnnnnnnnnnnnnnnnnnnnnnnnnnnnnnnnnnnnnnnnnnnnnnnnnnnnnnnnnnnnnnnnnnnnnnnnnnnnnnnnnnnnnnnnnnnnnnnnnnnnnnnnnnnnnnnnnnnnnnnnnnnnnnnnnnnnnnnnnnnnnnnnnnnnnnnnnnnnnnnnnnnnnnnnnnnnnnnnnnnnnnnnnnnnnnnnnnnnnnnnnnnnnnnnnnnnnnnnnnnnnnnnnnnnnnnnnnnnnnnnnnnnnnnnnnnnnnnnnnnnnnnnnnnnnnnnnnnnnnnnnnnnnnnnnnnnnnnnnnnnnnnnnnnnnnnnnnnnnnnnnnnnnnnnnnnnnnnnnnnnnnnnnnnnnnnnnnnnnnnnnnnnnnnnnnnnnnnnnnnnnnnnnnnnnnnnnnnnnnnnnnnnnnnnnnnnnnnnnnnnnnnnnnnnnnnnnnnnnnnnnnnnnnnnnnnnnnnnnnnnnnnnnnnnnnnnnnnnnnnnnnnnnnnnnnnnnnnnnnnnnnnnnnnnnnnnnnnnnnnnnnnnnnnnnnnnnnnnnnnnnnnnnnnnnnnnnnnnnnnnnnnnnnnnnnnnnnnnnnnnnnnnnnnnnnnnnnnnnnnnnnnnnnnnnnnnnnnnnnnnnnnnnnnnnnnnnnnnnnnnnnnnnnnnnnnnnnnnnnnnnnnnnnnnnnnnnnnnnnnnnnnnnnnnnnnnnnnnnnnnnnnnnnnnnnnnnnnnnnnnnnnnnnnnnnnnnnnnnnnnnnnnnnnnnnnnnnnnnnnnnnnnnnnnnnnnnnnnnnnnnnnnnnnnnnnnnnnnnnnnnnnnnnnnnnnnnnnnnnnnnnnnnnnnnnnnnnnnnnnnnnnnnnnnnnnnnnnnnnnnnnnnnnnnnnnnnnnnnnnnnnnnnnnnnnnnnnnnnnnnnnnnnnnnnnnnnnnnnnnnnnnnnnnnnnnnnnnnnnnnnnnnnnnnnnnnnnnnnnnnnnnnnnnnnnnnnnnnnnnnnnnnnnnnnnnnnnnnnnnnnnnnnnnnnnnnnnnnnnnnnnnnnnnnnnnnnnnnnnnnnnnnnnnnnnnnnnnnnnnnnnnnnnnnnnnnnnnnnnnnnnnnnnnnnnnnnnnnnnnnnnnnnnnnnnnnnnnnnnnnnnnnnnnnnnnnnnnnnnnnnnnnnnnnnnnnnnnnnnnnnnnnnnnnnnnnnnnnnnnnnnnnnnnnnnnnnnnnnnnnnnnnnnnnnnnnnnnnnnnnnnnnnnnnnnnnnnnnnnnnnnnnnnnnnnnnnnnnnnnnnnnnnnnnnnnnnnnnnnnnnnnnnnnnnnnnnnnnnnnnnnnnnnnnnnnnnnnnnnnnnnnnnnnnnnnnnnnnnnnnnnnnnnnnnnnnnnnnnnnnnnnnnnnnnnnnnnnnnnnnnnnnnnnnnnnnnnnnnnnnnnnnnnnnnnnnnnnnnnnnnnnnnnnnnnnnnnnnnnnnnnnnnnnnnnnnnnnnnnnnnnnnnnnnnnnnnnnnnnnnnnnnnnnnnnnnnnnnnnnnnnnnnnnnnnnnnnnnnnnnnnnnnnnnnnnnnnnnnnnnnnnnnnnnnnnnnnnnnnnnnnnnnnnnnnnnnnnnnnnnnnnnnnnnnnnnnnnnnnnnnnnnnnnnnnnnnnnnnnnnnnnnnnnnnnnnnnnnnnnnnnnnnnnnnnnnnnnnnnnnnnnnnnnnnnnnnnnnnnnnnnnnnnnnnnnnnnnnnnnnnnnnnnnnnnnnnnnnnnnnnnnnnnnnnnnnnnnnnnnnnnnnnnnnnnnnnnnnnnnnnnnnnnnnnnnnnnnnnnnnnnnnnnnnnnnnnnnnnnnnnnnnnnnnnnnnnnnnnnnnnnnnnnnnnnnnnnnnnnnnnnnnnnnnnnnnnnnnnnnnnnnnnnnnnnnnnnnnnnnnnnnnnnnnnnnnnnnnnnnnnnnnnnnnnnnnnnnnnnnnnnnnnnnnnnnnnnnnnnnnnnnnnnnnnnnnnnnnnnnnnnnnnnnnnnnnnnnnnnnnnnnnnnnnnnnnnnnnnnnnnnnnnnnnnnnnnnnnnnnnnnnnnnnnnnnnnnnnnnnnnnnnnnnnnnnnnnnnnnnnnnnnnnnnnnnnnnnnnnnnnnnnnnnnnnnnnnnnnnnnnnnnnnnnnnnnnnnnnnnnnnnnnnnnnnnnnnnnnnnnnnnnnnnnnnnnnnnnnnnnnnnnnnnnnnnnnnnnnnnnnnnnnnnnnnnnnnnnnnnnnnnnnnnnnnnnnnnnnnnnnnnnnnnnnnnnnnnnnnnnnnnnnnnnnnnnnnnnnnnnnnnnnnnnnnnnnnnnnnnnnnnnnnnnnnnnnnnnnnnnnnnnnnnnnnnnnnnnnnnnnnnnnnnnnnnnnnnnnnnnnnnnnnnnnnnnnnnnnnnnnnnnnnnnnnnnnnnnnnnnnnnnnnnnnnnnnnnnnnnnnnnnnnnnnnnnnnnnnnnnnnnnnnnnnnnnnnnnnnnnnnnnnnnnnnnnnnnnnnnnnnnnnnnnnnnnnnnnnnnnnnnnnnnnnnnnnnnnnnnnnnnnnnnnnnnnnnnnnnnnnnnnnnnnnnnnnnnnnnnnnnnnnnnnnnnnnnnnnnnnnnnnnnnnnnnnnnnnnnnnnnnnnnnnnnnnnnnnnnnnnnnnnnnnnnnnnnnnnnnnnnnnnnnnnnnnnnnnnnnnnnnnnnnnnnnnnnnnnnnnnnnnnnnnnnnnnnnnnnnnnnnnnnnnnnnnnnnnnnnnnnnnnnnnnnnnnnnnnnnnnnnnnnnnnnnnnnnnnnnnnnnnnnnnnnnnnnnnnnnnnnnnnnnnnnnnnnnnnnnnnnnnnnnnnnnnnnnnnnnnnnnnnnnnnnnnnnnnnnnnnnnnnnnnnnnnnnnnnnnnnnnnnnnnnnnnnnnnnnnnnnnnnnnnnnnnnnnnnnnnnnnnnnnnnnnnnnnnnnnnnnnnnnnnnnnnnnnnnnnnnnnnnnnnnnnnnnnnnnnnnnnnnnnnnnnnnnnnnnnnnnnnnnnnnnnnnnnnnnnnnnnnnnnnnnnnnnnnnnnnnnnnnnnnnnnnnnnnnnnnnnnnnnnnnnnnnnnnnnnnnnnnnnnnnnnnnnnnnnnnnnnnnnnnnnnnnnnnnnnnnnnnnnnnnnnnnnnnnnnnnnnnnnnnnnnnnnnnnnnnnnnnnnnnnnnnnnnnnnnnnnnnnnnnnnnnnnnnnnnnnnnnnnnnnnnnnnnnnnnnnnnnnnnnnnnnnnnnnnnnnnnnnnnnnnnnnnnnnnnnnnnnnnnnnnnnnnnnnnnnnnnnnnnnnnnnnnnnnnnnnnnnnnnnnnnnnnnnnnnnnnnnnnnnnnnnnnnnnnnnnnnnnnnnnnnnnnnnnnnnnnnnnnnnnnnnnnnnnnnnnnnnnnnnnnnnnnnnnnnnnnnnnnnnnnnnnnnnnnnnnnnnnnnnnnnnnnnnnnnnnnnnnnnnnnnnnnnnnnnnnnnnnnnnnnnnnnnnnnnnnnnnnnnnnnnnnnnnnnnnnnnnnnnnnnnnnnnnnnnnnnnnnnnnnnnnnnnnnnnnnnnnnnnnnnnnnnnnnnnnnnnnnnnnnnnnnnnnnnnnnnnnnnnnnnnnnnnnnnnnnnnnnnnnnnnnnnnnnnnnnnnnnnnnnnnnnnnnnnnnnnnnnnnnnnnnnnnnnnnnnnnnnnnnnnnnnnnnnnnnnnnnnnnnnnnnnnnnnnnnnnnnnnnnnnnnnnnnnnnnnnnnnnnnnnnnnnnnnnnnnnnnnnnnnnnnnnnnnnnnnnnnnnnnnnnnnnnnnnnnnnnnnnnnnnnnnnnnnnnnnnnnnnnnnnnnnnnnnnnnnnnnnnnnnnnnnnnnnnnnnnnnnnnnnnnnnnnnnnnnnnnnnnnnnnnnnnnnnnnnnnnnnnnnnnnnnnnnnnnnnnnnnnnnnnnnnnnnnnnnnnnnnnnnnnnnnnnnnnnnnnnnnnnnnnnnnnnnnnnnnnnnnnnnnnnnnnnnnnnnnnnnnnnnnnnnnnnnnnnnnnnnnnnnnnnnnnnnnnnnnnnnnnnnnnnnnnnnnnnnnnnnnnnnnnnnnnnnnnnnnnnnnnnnnnnnnnnnnnnnnnnnnnnnnnnnnnnnnnnnnnnnnnnnnnnnnnnnnnnnnnnnnnnnnnnnnnnnnnnnnnnnnnnnnnnnnnnnnnnnnnnnnnnnnnnnnnnnnnnnnnnnnnnnnnnnnnnnnnnnnnnnnnnnnnnnnnnnnnnnnnnnnnnnnnnnnnnnnnnnnnnnnnnnnnnnnnnnnnnnnnnnnnnnnnnnnnnnnnnnnnnnnnnnnnnnnnnnnnnnnnnnnnnnnnnnnnnnnnnnnnnnnnnnnnnnnnnnnnnnnnnnnnnnnnnnnnnnnnnnnnnnnnnnnnnnnnnnnnnnnnnnnnnnnnnnnnnnnnnnnnnnnnnnnnnnnnnnnnnnnnnnnnnnnnnnnnnnnnnnnnnnnnnnnnnnnnnnnnnnnnnnnnnnnnnnnnnnnnnnnnnnnnnnnnnnnnnnnnnnnnnnnnnnnnnnnnnnnnnnnnnnnnnnnnnnnnnnnnnnnnnnnnnnnnnnnnnnnnnnnnnnnnnnnnnnnnnnnnnnnnnnnnnnnnnnnnnnnnnnnnnnnnnnnnnnnnnnnnnnnnnnnnnnnnnnnnnnnnnnnnnnnnnnnnnnnnnnnnnnnnnnnnnnnnnnnnnnnnnnnnnnnnnnnnnnnnnnnnnnnnnnnnnnnnnnnnnnnnnnnnnnnnnnnnnnnnnnnnnnnnnnnnnnnnnnnnnnnnnnnnnnnnnnnnnnnnnnnnnnnnnnnnnnnnnnnnnnnnnnnnnnnnnnnnnnnnnnnnnnnnnnnnnnnnnnnnnnnnnnnnnnnnnnnnnnnnnnnnnnnnnnnnnnnnnnnnnnnnnnnnnnnnnnnnnnnnnnnnnnnnnnnnnnnnnnnnnnnnnnnnnnnnnnnnnnnnnnnnnnnnnnnnnnnnnnnnnnnnnnnnnnnnnnnnnnnnnnnnnnnnnnnnnnnnnnnnnnnnnnnnnnnnnnnnnnnnnnnnnnnnnnnnnnnnnnnnnnnnnnnnnnnnnnnnnnnnnnnnnnnnnnnnnnnnnnnnnnnnnnnnnnnnnnnnnnnnnnnnnnnnnnnnnnnnnnnnnnnnnnnnnnnnnnnnnnnnnnnnnnnnnnnnnnnnnnnnnnnnnnnnnnnnnnnnnnnnnnnnnnnnnnnnnnnnnnnnnnnnnnnnnnnnnnnnnnnnnnnnnnnnnnnnnnnnnnnnnnnnnnnnnnnnnnnnnnnnnnnnnnnnnnnnnnnnnnnnnnnnnnnnnnnnnnnnnnnnnnnnnnnnnnnnnnnnnnnnnnnnnnnnnnnnnnnnnnnnnnnnnnnnnnnnnnnnnnnnnnnnnnnnnnnnnnnnnnnnnnnnnnnnnnnnnnnnnnnnnnnnnnnnnnnnnnnnnnnnnnnnnnnnnnnnnnnnnnnnnnnnnnnnnnnnnnnnnnnnnnnnnnnnnnnnnnnnnnnnnnnnnnnnnnnnnnnnnnnnnnnnnnnnnnnnnnnnnnnnnnnnnnnnnnnnnnnnnnnnnnnnnnnnnnnnnnnnnnnnnnnnnnnnnnnnnnnnnnnnnnnnnnnnnnnnnnnnnnnnnnnnnnnnnnnnnnnnnnnnnnnnnnnnnnnnnnnnnnnnnnnnnnnnnnnnnnnnnnnnnnnnnnnnnnnnnnnnnnnnnnnnnnnnnnnnnnnnnnnnnnnnnnnnnnnnnnnnnnnnnnnnnnnnnnnnnnnnnnnnnnnnnnnnnnnnnnnnnnnnnnnnnnnnnnnnnnnnnnnnnnnnnnnnnnnnnnnnnnnnnnnnnnnnnnnnnnnnnnnnnnnnnnnnnnnnnnnnnnnnnnnnnnnnnnnnnnnnnnnnnnnnnnnnnnnnnnnnnnnnnnnnnnnnnnnnnnnnnnnnnnnnnnnnnnnnnnnnnnnnnnnnnnnnnnnnnnnnnnnnnnnnnnnnnnnnnnnnnnnnnnnnnnnnnnnnnnnnnnnnnnnnnnnnnnnnnnnnnnnnnnnnnnnnnnnnnnnnnnnnnnnnnnnnnnnnnnnnnnnnnnnnnnnnnnnnnnnnnnnnnnnnnnnnnnnnnnnnnnnnnnnnnnnnnnnnnnnnnnnnnnnnnnnnnnnnnnnnnnnnnnnnnnnnnnnnnnnnnnnnnnnnnnnnnnnnnnnnnnnnnnnnnnnnnnnnnnnnnnnnnnnnnnnnnnnnnnnnnnnnnnnnnnnnnnnnnnnnnnnnnnnnnnnnnnnnnnnnnnnnnnnnnnnnnnnnnnnnnnnnnnnnnnnnnnnnnnnnnnnnnnnnnnnnnnnnnnnnnnnnnnnnnnnnnnnnnnnnnnnnnnnnnnnnnnnnnnnnnnnnnnnnnnnnnnnnnnnnnnnnnnnnnnnnnnnnnnnnnnnnnnnnnnnnnnnnnnnnnnnnnnnnnnnnnnnnnnnnnnnnnnnnnnnnnnnnnnnnnnnnnnnnnnnnnnnnnnnnnnnnnnnnnnnnnnnnnnnnnnnnnnnnnnnnnnnnnnnnnnnnnnnnnnnnnnnnnnnnnnnnnnnnnnnnnnnnnnnnnnnnnnnnnnnnnnnnnnnnnnnnnnnnnnnnnnnnnnnnnnnnnnnnnnnnnnnnnnnnnnnnnnnnnnnnnnnnnnnnnnnnnnnnnnnnnnnnnnnnnnnnnnnnnnnnnnnnnnnnnnnnnnnnnnnnnnnnnnnnnnnnnnnnnnnnnnnnnnnnnnnnnnnnnnnnnnnnnnnnnnnnnnnnnnnnnnnnnnnnnnnnnnnnnnnnnnnnnnnnnnnnnnnnnnnnnnnnnnnnnnnnnnnnnnnnnnnnnnnnnnnnnnnnnnnnnnnnnnnnnnnnnnnnnnnnnnnnnnnnnnnnnnnnnnnnnnnnnnnnnnnnnnnnnnnnnnnnnnnnnnnnnnnnnnnnnnnnnnnnnnnnnnnnnnnnnnnnnnnnnnnnnnnnnnnnnnnnnnnnnnnnnnnnnnnnnnnnnnnnnnnnnnnnnnnnnnnnnnnnnnnnnnnnnnnnnnnnnnnnnnnnnnnnnnnnnnnnnnnnnnnnnnnnnnnnnnnnnnnnnnnnnnnnnnnnnnnnnnnnnnnnnnnnnnnnnnnnnnnnnnnnnnnnnnnnnnnnnnnnnnnnnnnnnnnnnnnnnnnnnnnnnnnnnnnnnnnnnnnnnnnnnnnnnnnnnnnnnnnnnnnnnnnnnnnnnnnnnnnnnnnnnnnnnnnnnnnnnnnnnnnnnnnnnnnnnnnnnnnnnnnnnnnnnnnnnnnnnnnnnnnnnnnnnnnnnnnnnnnnnnnnnnnnnnnnnnnnnnnnnnnnnnnnnnnnnnnnnnnnnnnnnnnnnnnnnnnnnnnnnnnnnnnnnnnnnnnnnnnnnnnnnnnnnnnnnnnnnnnnnnnnnnnnnnnnnnnnnnnnnnnnnnnnnnnnnnnnnnnnnnnnnnnnnnnnnnnnnnnnnnnnnnnnnnnnnnnnnnnnnnnnnnnnnnnnnnnnnnnnnnnnnnnnnnnnnnnnnnnnnnnnnnnnnnnnnnnnnnnnnnnnnnnnnnnnnnnnnnnnnnnnnnnnnnnnnnnnnnnnnnnnnnnnnnnnnnnnnnnnnnnnnnnnnnnnnnnnnnnnnnnnnnnnnnnnnnnnnnnnnnnnnnnnnnnnnnnnnnnnnnnnnnnnnnnnnnnnnnnnnnnnnnnnnnnnnnnnnnnnnnnnnnnnnnnnnnnnnnnnnnnnnnnnnnnnnnnnnnnnnnnnnnnnnnnnnnnnnnnnnnnnnnnnnnnnnnnnnnnnnnnnnnnnnnnnnnnnnnnnnnnnnnnnnnnnnnnnnnnnnnnnnnnnnnnnnnnnnnnnnnnnnnnnnnnnnnnnnnnnnnnnnnnnnnnnnnnnnnnnnnnnnnnnnnnnnnnnnnnnnnnnnnnnnnnnnnnnnnnnnnnnnnnnnnnnnnnnnnnnnnnnnnnnnnnnnnnnnnnnnnnnnnnnnnnnnnnnnnnnnnnnnnnnnnnnnnnnnnnnnnnnnnnnnnnnnnnnnnnnnnnnnnnnnnnnnnnnnnnnnnnnnnnnnnnnnnnnnnnnnnnnnnnnnnnnnnnnnnnnnnnnnnnnnnnnnnnnnnnnnnnnnnnnnnnnnnnnnnnnnnnnnnnnnnnnnnnnnnnnnnnnnnnnnnnnnnnnnnnnnnnnnnnnnnnnnnnnnnnnnnnnnnnnnnnnnnnnnnnnnnnnnnnnnnnnnnnnnnnnnnnnnnnnnnnnnnnnnnnnnnnnnnnnnnnnnnnnnnnnnnnnnnnnnnnnnnnnnnnnnnnnnnnnnnnnnnnnnnnnnnnnnnnnnnnnnnnnnnnnnnnnnnnnnnnnnnnnnnnnnnnnnnnnnnnnnnnnnnnnnnnnnnnnnnnnnnnnnnnnnnnnnnnnnnnnnnnnnnnnnnnnnnnnnnnnnnnnnnnnnnnnnnnnnnnnnnnnnnnnnnnnnnnnnnnnnnnnnnnnnnnnnnnnnnnnnnnnnnnnnnnnnnnnnnnnnnnnnnnnnnnnnnnnnnnnnnnnnnnnnnnnnnnnnnnnnnnnnnnnnnnnnnnnnnnnnnnnnnnnnnnnnnnnnnnnnnnnnnnnnnnnnnnnnnnnnnnnnnnnnnnnnnnnnnnnnnnnnnnnnnnnnnnnnnnnnnnnnnnnnnnnnnnnnnnnnnnnnnnnnnnnnnnnnnnnnnnnnnnnnnnnnnnnnnnnnnnnnnnnnnnnnnnnnnnnnnnnnnnnnnnnnnnnnnnnnnnnnnnnnnnnnnnnnnnnnnnnnnnnnnnnnnnnnnnnnnnnnnnnnnnnnnnnnnnnnnnnnnnnnnnnnnnnnnnnnnnnnnnnnnnnnnnnnnnnnnnnnnnnnnnnnnnnnnnnnnnnnnnnnnnnnnnnnnnnnnnnnnnnnnnnnnnnnnnnnnnnnnnnnnnnnnnnnnnnnnnnnnnnnnnnnnnnnnnnnnnnnnnnnnnnnnnnnnnnnnnnnnnnnnnnnnnnnnnnnnnnnnnnnnnnnnnnnnnnnnnnnnnnnnnnnnnnnnnnnnnnnnnnnnnnnnnnnnnnnnnnnnnnnnnnnnnnnnnnnnnnnnnnnnnnnnnnnnnnnnnnnnnnnnnnnnnnnnnnnnnnnnnnnnnnnnnnnnnnnnnnnnnnnnnnnnnnnnnnnnnnnnnnnnnnnnnnnnnnnnnnnnnnnnnnnnnnnnnnnnnnnnnnnnnnnnnnnnnnnnnnnnnnnnnnnnnnnnnnnnnnnnnnnnnnnnnnnnnnnnnnnnnnnnnnnnnnnnnnnnnnnnnnnnnnnnnnnnnnnnnnnnnnnnnnnnnnnnnnnnnnnnnnnnnnnnnnnnnnnnnnnnnnnnnnnnnnnnnnnnnnnnnnnnnnnnnnnnnnnnnnnnnnnnnnnnnnnnnnnnnnnnnnnnnnnnnnnnnnnnnnnnnnnnnnnnnnnnnnnnnnnnnnnnnnnnnnnnnnnnnnnnnnnnnnnnnnnnnnnnnnnnnnnnnnnnnnnnnnnnnnnnnnnnnnnnnnnnnnnnnnnnnnnnnnnnnnnnnnnnnnnnnnnnnnnnnnnnnnnnnnnnnnnnnnnnnnnnnnnnnnnnnnnnnnnnnnnnnnnnnnnnnnnnnnnnnnnnnnnnnnnnnnnnnnnnnnnnnnnnnnnnnnnnnnnnnnnnnnnnnnnnnnnnnnnnnnnnnnnnnnnnnnnnnnnnnnnnnnnnnnnnnnnnnnnnnnnnnnnnnnnnnnnnnnnnnnnnnnnnnnnnnnnnnnnnnnnnnnnnnnnnnnnnnnnnnnnnnnnnnnnnnnnnnnnnnnnnnnnnnnnnnnnnnnnnnnnnnnnnnnnnnnnnnnnnnnnnnnnnnnnnnnnnnnnnnnnnnnnnnnnnnnnnnnnnnnnnnnnnnnnnnnnnnnnnnnnnnnnnnnnnnnnnnnnnnnnnnnnnnnnnnnnnnnnnnnnnnnnnnnnnnnnnnnnnnnnnnnnnnnnnnnnnnnnnnnnnnnnnnnnnnnnnnnnnnnnnnnnnnnnnnnnnnnnnnnnnnnnnnnnnnnnnnnnnnnnnnnnnnnnnnnnnnnnnnnnnnnnnnnnnnnnnnnnnnnnnnnnnnnnnnnnnnnnnnnnnnnnnnnnnnnnnnnnnnnnnnnnnnnnnnnnnnnnnnnnnnnnnnnnnnnnnnnnnnnnnnnnnnnnnnnnnnnnnnnnnnnnnnnnnnnnnnnnnnnnnnnnnnnnnnnnnnnnnnnnnnnnnnnnnnnnnnnnnnnnnnnnnnnnnnnnnnnnnnnnnnnnnnnnnnnnnnnnnnnnnnnnnnnnnnnnnnnnnnnnnnnnnnnnnnnnnnnnnnnnnnnnnnnnnnnnnnnnnnnnnnnnnnnnnnnnnnnnnnnnnnnnnnnnnnnnnnnnnnnnnnnnnnnnnnnnnnnnnnnnnnnnnnnnnnnnnnnnnnnnnnnnnnnnnnnnnnnnnnnnnnnnnnnnnnnnnnnnnnnnnnnnnnnnnnnnnnnnnnnnnnnnnnnnnnnnnnnnnnnnnnnnnnnnnnnnnnnnnnnnnnnnnnnnnnnnnnnnnnnnnnnnnnnnnnnnnnnnnnnnnnnnnnnnnnnnnnnnnnnnnnnnnnnnnnnnnnnnnnnnnnnnnnnnnnnnnnnnnnnnnnnnnnnnnnnnnnnnnnnnnnnnnnnnnnnnnnnnnnnnnnnnnnnnnnnnnnnnnnnnnnnnnnnnnnnnnnnnnnnnnnnnnnnnnnnnnnnnnnnnnnnnnnnnnnnnnnnnnnnnnnnnnnnnnnnnnnnnnnnnnnnnnnnnnnnnnnnnnnnnnnnnnnnnnnnnnnnnnnnnnnnnnnnnnnnnnnnnnnnnnnnnnnnnnnnnnnnnnnnnnnnnnnnnnnnnnnnnnnnnnnnnnnnnnnnnnnnnnnnnnnnnnnnnnnnnnnnnnnnnnnnnnnnnnnnnnnnnnnnnnnnnnnnnnnnnnnnnnnnnnnnnnnnnnnnnnnnnnnnnnnnnnnnnnnnnnnnnnnnnnnnnnnnnnnnnnnnnnnnnnnnnnnnnnnnnnnnnnnnnnnnnnnnnnnnnnnnnnnnnnnnnnnnnnnnnnnnnnnnnnnnnnnnnnnnnnnnnnnnnnnnnnnnnnnnnnnnnnnnnnnnnnnnnnnnnnnnnnnnnnnnnnnnnnnnnnnnnnnnnnnnnnnnnnnnnnnnnnnnnnnnnnnnnnnnnnnnnnnnnnnnnnnnnnnnnnnnnnnnnnnnnnnnnnnnnnnnnnnnnnnnnnnnnnnnnnnnnnnnnnnnnnnnnnnnnnnnnnnnnnnnnnnnnnnnnnnnnnnnnnnnnnnnnnnnnnnnnnnnnnnnnnnnnnnnnnnnnnnnnnnnnnnnnnnnnnnnnnnnnnnnnnnnnnnnnnnnnnnnnnnnnnnnnnnnnnnnnnnnnnnnnnnnnnnnnnnnnnnnnnnnnnnnnnnnnnnnnnnnnnnnnnnnnnnnnnnnnnnnnnnnnnnnnnnnnnnnnnnnnnnnnnnnnnnnnnnnnnnnnnnnnnnnnnnnnnnnnnnnnnnnnnnnnnnnnnnnnnnnnnnnnnnnnnnnnnnnnnnnnnnnnnnnnnnnnnnnnnnnnnnnnnnnnnnnnnnnnnnnnnnnnnnnnnnnnnnnnnnnnnnnnnnnnnnnnnnnnnnnnnnnnnnnnnnnnnnnnnnnnnnnnnnnnnnnnnnnnnnnnnnnnnnnnnnnnnnnnnnnnnnnnnnnnnnnnnnnnnnnnnnnnnnnnnnnnnnnnnnnnnnnnnnnnnnnnnnnnnnnnnnnnnnnnnnnnnnnnnnnnnnnnnnnnnnnnnnnnnnnnnnnnnnnnnnnnnnnnnnnnnnnnnnnnnnnnnnnnnnnnnnnnnnnnnnnnnnnnnnnnnnnnnnnnnnnnnnnnnnnnnnnnnnnnnnnnnnnnnnnnnnnnnnnnnnnnnnnnnnnnnnnnnnnnnnnnnnnnnnnnnnnnnnnnnnnnnnnnnnnnnnnnnnnnnnnnnnnnnnnnnnnnnnnnnnnnnnnnnnnnnnnnnnnnnnnnnnnnnnnnnnnnnnnnnnnnnnnnnnnnnnnnnnnnnnnnnnnnnnnnnnnnnnnnnnnnnnnnnnnnnnnnnnnnnnnnnnnnnnnnnnnnnnnnnnnnnnnnnnnnnnnnnnnnnnnnnnnnnnnnnnnnnnnnnnnnnnnnnnnnnnnnnnnnnnnnnnnnnnnnnnnnnnnnnnnnnnnnnnnnnnnnnnnnnnnnnnnnnnnnnnnnnnnnnnnnnnnnnnnnnnnnnnnnnnnnnnnnnnnnnnnnnnnnnnnnnnnnnnnnnnnnnnnnnnnnnnnnnnnnnnnnnnnnnnnnnnnnnnnnnnnnnnnnnnnnnnnnnnnnnnnnnnnnnnnnnnnnnnnnnnnnnnnnnnnnnnnnnnnnnnnnnnnnnnnnnnnnnnnnnnnnnnnnnnnnnnnnnnnnnnnnnnnnnnnnnnnnnnnnnnnnnnnnnnnnnnnnnnnnnnnnnnnnnnnnnnnnnnnnnnnnnnnnnnnnnnnnnnnnnnnnnnnnnnnnnnnnnnnnnnnnnnnnnnnnnnnnnnnnnnnnnnnnnnnnnnnnnnnnnnnnnnnnnnnnnnnnnnnnnnnnnnnnnnnnnnnnnnnnnnnnnnnnnnnnnnnnnnnnnnnnnnnnnnnnnnnnnnnnnnnnnnnnnnnnnnnnnnnnnnnnnnnnnnnnnnnnnnnnnnnnnnnnnnnnnnnnnnnnnnnnnnnnnnnnnnnnnnnnnnnnnnnnnnnnnnnnnnnnnnnnnnnnnnnnnnnnnnnnnnnnnnnnnnnnnnnnnnnnnnnnnnnnnnnnnnnnnnnnnnnnnnnnnnnnnnnnnnnnnnnnnnnnnnnnnnnnnnnnnnnnnnnnnnnnnnnnnnnnnnnnnnnnnnnnnnnnnnnnnnnnnnnnnnnnnnnnnnnnnnnnnnnnnnnnnnnnnnnnnnnnnnnnnnnnnnnnnnnnnnnnnnnnnnnnnnnnnnnnnnnnnnnnnnnnnnnnnnnnnnnnnnnnnnnnnnnnnnnnnnnnnnnnnnnnnnnnnnnnnnnnnnnnnnnnnnnnnnnnnnnnnnnnnnnnnnnnnnnnnnnnnnnnnnnnnnnnnnnnnnnnnnnnnnnnnnnnnnnnnnnnnnnnnnnnnnnnnnnnnnnnnnnnnnnnnnnnnnnnnnnnnnnnnnnnnnnnnnnnnnnnnnnnnnnnnnnnnnnnnnnnnnnnnnnnnnnnnnnnnnnnnnnnnnnnnnnnnnnnnnnnnnnnnnnnnnnnnnnnnnnnnnnnnnnnnnnnnnnnnnnnnnnnnnnnnnnnnnnnnnnnnnnnnnnnnnnnnnnnnnnnnnnnnnnnnnnnnnnnnnnnnnnnnnnnnnnnnnnnnnnnnnnnnnnnnnnnnnnnnnnnnnnnnnnnnnnnnnnnnnnnnnnnnnnnnnnnnnnnnnnnnnnnnnnnnnnnnnnnnnnnnnnnnnnnnnnnnnnnnnnnnnnnnnnnnnnnnnnnnnnnnnnnnnnnnnnnnnnnnnnnnnnnnnnnnnnnnnnnnnnnnnnnnnnnnnnnnnnnnnnnnnnnnnnnnnnnnnnnnnnnnnnnnnnnnnnnnnnnnnnnnnnnnnnnnnnnnnnnnnnnnnnnnnnnnnnnnnnnnnnnnnnnnnnnnnnnnnnnnnnnnnnnnnnnnnnnnnnnnnnnnnnnnnnnnnnnnnnnnnnnnnnnnnnnnnnnnnnnnnnnnnnnnnnnnnnnnnnnnnnnnnnnnnnnnnnnnnnnnnnnnnnnnnnnnnnnnnnnnnnnnnnnnnnnnnnnnnnnnnnnnnnnnnnnnnnnnnnnnnnnnnnnnnnnnnnnnnnnnnnnnnnnnnnnnnnnnnnnnnnnnnnnnnnnnnnnnnnnnnnnnnnnnnnnnnnnnnnnnnnnnnnnnnnnnnnnnnnnnnnnnnnnnnnnnnnnnnnnnnnnnnnnnnnnnnnnnnnnnnnnnnnnnnnnnnnnnnnnnnnnnnnnnnnnnnnnnnnnnnnnnnnnnnnnnnnnnnnnnnnnnnnnnnnnnnnnnnnnnnnnnnnnnnnnnnnnnnnnnnnnnnnnnnnnnnnnnnnnnnnnnnnnnnnnnnnnnnnnnnnnnnnnnnnnnnnnnnnnnnnnnnnnnnnnnnnnnnnnnnnnnnnnnnnnnnnnnnnnnnnnnnnnnnnnnnnnnnnnnnnnnnnnnnnnnnnnnnnnnnnnnnnnnnnnnnnnnnnnnnnnnnnnnnnnnnnnnnnnnnnnnnnnnnnnnnnnnnnnnnnnnnnnnnnnnnnnnnnnnnnnnnnnnnnnnnnnnnnnnnnnnnnnnnnnnnnnnnnnnnnnnnnnnnnnnnnnnnnnnnnnnnnnnnnnnnnnnnnnnnnnnnnnnnnnnnnnnnnnnnnnnnnnnnnnnnnnnnnnnnnnnnnnnnnnnnnnnnnnnnnnnnnnnnnnnnnnnnnnnnnnnnnnnnnnnnnnnnnnnnnnnnnnnnnnnnnnnnnnnnnnnnnnnnnnnnnnnnnnnnnnnnnnnnnnnnnnnnnnnnnnnnnnnnnnnnnnnnnnnnnnnnnnnnnnnnnnnnnnnnnnnnnnnnnnnnnnnnnnnnnnnnnnnnnnnnnnnnnnnnnnnnnnnnnnnnnnnnnnnnnnnnnnnnnnnnnnnnnnnnnnnnnnnnnnnnnnnnnnnnnnnnnnnnnnnnnnnnnnnnnnnnnnnnnnnnnnnnnnnnnnnnnnnnnnnnnnnnnnnnnnnnnnnnnnnnnnnnnnnnnnnnnnnnnnnnnnnnnnnnnnnnnnnnnnnnnnnnnnnnnnnnnnnnnnnnnnnnnnnnnnnnnnnnnnnnnnnnnnnnnnnnnnnnnnnnnnnnnnnnnnnnnnnnnnnnnnnnnnnnnnnnnnnnnnnnnnnnnnnnnnnnnnnnnnnnnnnnnnnnnnnnnnnnnnnnnnnnnnnnnnnnnnnnnnnnnnnnnnnnnnnnnnnnnnnnnnnnnnnnnnnnnnnnnnnnnnnnnnnnnnnnnnnnnnnnnnnnnnnnnnnnnnnnnnnnnnnnnnnnnnnnnnnnnnnnnnnnnnnnnnnnnnnnnnnnnnnnnnnnnnnnnnnnnnnnnnnnnnnnnnnnnnnnnnnnnnnnnnnnnnnnnnnnnnnnnnnnnnnnnnnnnnnnnnnnnnnnnnnnnnnnnnnnnnnnnnnnnnnnnnnnnnnnnnnnnnnnnnnnnnnnnnnnnnnnnnnnnnnnnnnnnnnnnnnnnnnnnnnnnnnnnnnnnnnnnnnnnnnnnnnnnnnnnnnnnnnnnnnnnnnnnnnnnnnnnnnnnnnnnnnnnnnnnnnnnnnnnnnnnnnnnnnnnnnnnnnnnnnnnnnnnnnnnnnnnnnnnnnnnnnnnnnnnnnnnnnnnnnnnnnnnnnnnnnnnnnnnnnnnnnnnnnnnnnnnnnnnnnnnnnnnnnnnnnnnnnnnnnnnnnnnnnnnnnnnnnnnnnnnnnnnnnnnnnnnnnnnnnnnnnnnnnnnnnnnnnnnnnnnnnnnnnnnnnnnnnnnnnnnnnnnnnnnnnnnnnnnnnnnnnnnnnnnnnnnnnnnnnnnnnnnnnnnnnnnnnnnnnnnnnnnnnnnnnnnnnnnnnnnnnnnnnnnnnnnnnnnnnnnnnnnnnnnnnnnnnnnnnnnnnnnnnnnnnnnnnnnnnnnnnnnnnnnnnnnnnnnnnnnnnnnnnnnnnnnnnnnnnnnnnnnnnnnnnnnnnnnnnnnnnnnnnnnnnnnnnnnnnnnnnnnnnnnnnnnnnnnnnnnnnnnnnnnnnnnnnnnnnnnnnnnnnnnnnnnnnnnnnnnnnnnnnnnnnnnnnnnnnnnnnnnnnnnnnnnnnnnnnnnnnnnnnnnnnnnnnnnnnnnnnnnnnnnnnnnnnnnnnnnnnnnnnnnnnnnnnnnnnnnnnnnnnnnnnnnnnnnnnnnnnnnnnnnnnnnnnnnnnnnnnnnnnnnnnnnnnnnnnnnnnnnnnnnnnnnnnnnnnnnnnnnnnnnnnnnnnnnnnnnnnnnnnnnnnnnnnnnnnnnnnnnnnnnnnnnnnnnnnnnnnnnnnnnnnnnnnnnnnnnnnnnnnnnnnnnnnnnnnnnnnnnnnnnnnnnnnnnnnnnnnnnnnnnnnnnnnnnnnnnnnnnnnnnnnnnnnnnnnnnnnnnnnnnnnnnnnnnnnnnnnnnnnnnnnnnnnnnnnnnnnnnnnnnnnnnnnnnnnnnnnnnnnnnnnnnnnnnnnnnnnnnnnnnnnnnnnnnnnnnnnnnnnnnnnnnnnnnnnnnnnnnnnnnnnnnnnnnnnnnnnnnnnnnnnnnnnnnnnnnnnnnnnnnnnnnnnnnnnnnnnnnnnnnnnnnnnnnnnnnnnnnnnnnnnnnnnnnnnnnnnnnnnnnnnnnnnnnnnnnnnnnnnnnnnnnnnnnnnnnnnnnnnnnnnnnnnnnnnnnnnnnnnnnnnnnnnnnnnnnnnnnnnnnnnnnnnnnnnnnnnnnnnnnnnnnnnnnnnnnnnnnnnnnnnnnnnnnnnnnnnnnnnnnnnnnnnnnnnnnnnnnnnnnnnnnnnnnnnnnnnnnnnnnnnnnnnnnnnnnnnnnnnnnnnnnnnnnnnnnnnnnnnnnnnnnnnnnnnnnnnnnnnnnnnnnnnnnnnnnnnnnnnnnnnnnnnnnnnnnnnnnnnnnnnnnnnnnnnnnnnnnnnnnnnnnnnnnnnnnnnnnnnnnnnnnnnnnnnnnnnnnnnnnnnnnnnnnnnnnnnnnnnnnnnnnnnnnnnnnnnnnnnnnnnnnnnnnnnnnnnnnnnnnnnnnnnnnnnnnnnnnnnnnnnnnnnnnnnnnnnnnnnnnnnnnnnnnnnnnnnnnnnnnnnnnnnnnnnnnnnnnnnnnnnnnnnnnnnnnnnnnnnnnnnnnnnnnnnnnnnnnnnnnnnnnnnnnnnnnnnnnnnnnnnnnnnnnnnnnnnnnnnnnnnnnnnnnnnnnnnnnnnnnnnnnnnnnnnnnnnnnnnnnnnnnnnnnnnnnnnnnnnnnnnnnnnnnnnnnnnnnnnnnnnnnnnnnnnnnnnnnnnnnnnnnnnnnnnnnnnnnnnnnnnnnnnnnnnnnnnnnnnnnnnnnnnnnnnnnnnnnnnnnnnnnnnnnnnnnnnnnnnnnnnnnnnnnnnnnnnnnnnnnnnnnnnnnnnnnnnnnnnnnnnnnnnnnnnnnnnnnnnnnnnnnnnnnnnnnnnnnnnnnnnnnnnnnnnnnnnnnnnnnnnnnnnnnnnnnnnnnnnnnnnnnnnnnnnnnnnnnnnnnnnnnnnnnnnnnnnnnnnnnnnnnnnnnnnnnnnnnnnnnnnnnnnnnnnnnnnnnnnnnnnnnnnnnnnnnnnnnnnnnnnnnnnnnnnnnnnnnnnnnnnnnnnnnnnnnnnnnnnnnnnnnnnnnnnnnnnnnnnnnnnnnnnnnnnnnnnnnnnnnnnnnnnnnnnnnnnnnnnnnnnnnnnnnnnnnnnnnnnnnnnnnnnnnnnnnnnnnnnnnnnnnnnnnnnnnnnnnnnnnnnnnnnnnnnnnnnnnnnnnnnnnnnnnnnnnnnnnnnnnnnnnnnnnnnnnnnnnnnnnnnnnnnnnnnnnnnnnnnnnnnnnnnnnnnnnnnnnnnnnnnnnnnnnnnnnnnnnnnnnnnnnnnnnnnnnnnnnnnnnnnnnnnnnnnnnnnnnnnnnnnnnnnnnnnnnnnnnnnnnnnnnnnnnnnnnnnnnnnnnnnnnnnnnnnnnnnnnnnnnnnnnnnnnnnnnnnnnnnnnnnnnnnnnnnnnnnnnnnnnnnnnnnnnnnnnnnnnnnnnnnnnnnnnnnnnnnnnnnnnnnnnnnnnnnnnnnnnnnnnnnnnnnnnnnnnnnnnnnnnnnnnnnnnnnnnnnnnnnnnnnnnnnnnnnnnnnnnnnnnnnnnnnnnnnnnnnnnnnnnnnnnnnnnnnnnnnnnnnnnnnnnnnnnnnnnnnnnnnnnnnnnnnnnnnnnnnnnnnnnnnnnnnnnnnnnnnnnnnnnnnnnnnnnnnnnnnnnnnnnnnnnnnnnnnnnnnnnnnnnnnnnnnnnnnnnnnnnnnnnnnnnnnnnnnnnnnnnnnnnnnnnnnnnnnnnnnnnnnnnnnnnnnnnnnnnnnnnnnnnnnnnnnnnnnnnnnnnnnnnnnnnnnnnnnnnnnnnnnnnnnnnnnnnnnnnnnnnnnnnnnnnnnnnnnnnnnnnnnnnnnnnnnnnnnnnnnnnnnnnnnnnnnnnnnnnnnnnnnnnnnnnnnnnnnnnnnnnnnnnnnnnnnnnnnnnnnnnnnnnnnnnnnnnnnnnnnnnnnnnnnnnnnnnnnnnnnnnnnnnnnnnnnnnnnnnnnnnnnnnnnnnnnnnnnnnnnnnnnnnnnnnnnnnnnnnnnnnnnnnnnnnnnnnnnnnnnnnnnnnnnnnnnnnnnnnnnnnnnnnnnnnnnnnnnnnnnnnnnnnnnnnnnnnnnnnnnnnnnnnnnnnnnnnnnnnnnnnnnnnnnnnnnnnnnnnnnnnnnnnnnnnnnnnnnnnnnnnnnnnnnnnnnnnnnnnnnnnnnnnnnnnnnnnnnnnnnnnnnnnnnnnnnnnnnnnnnnnnnnnnnnnnnnnnnnnnnnnnnnnnnnnnnnnnnnnnnnnnnnnnnnnnnnnnnnnnnnnnnnnnnnnnnnnnnnnnnnnnnnnnnnnnnnnnnnnnnnnnnnnnnnnnnnnnnnnnnnnnnnnnnnnnnnnnnnnnnnnnnnnnnnnnnnnnnnnnnnnnnnnnnnnnnnnnnnnnnnnnnnnnnnnnnnnnnnnnnnnnnnnnnnnnnnnnnnnnnnnnnnnnnnnnnnnnnnnnnnnnnnnnnnnnnnnnnnnnnnnnnnnnnnnnnnnnnnnnnnnnnnnnnnnnnnnnnnnnnnnnnnnnnnnnnnnnnnnnnnnnnnnnnnnnnnnnnnnnnnnnnnnnnnnnnnnnnnnnnnnnnnnnnnnnnnnnnnnnnnnnnnnnnnnnnnnnnnnnnnnnnnnnnnnnnnnnnnnnnnnnnnnnnnnnnnnnnnnnnnnnnnnnnnnnnnnnnnnnnnnnnnnnnnnnnnnnnnnnnnnnnnnnnnnnnnnnnnnnnnnnnnnnnnnnnnnnnnnnnnnnnnnnnnnnnnnnnnnnnnnnnnnnnnnnnnnnnnnnnnnnnnnnnnnnnnnnnnnnnnnnnnnnnnnnnnnnnnnnnnnnnnnnnnnnnnnnnnnnnnnnnnnnnnnnnnnnnnnnnnnnnnnnnnnnnnnnnnnnnnnnnnnnnnnnnnnnnnnnnnnnnnnnnnnnnnnnnnnnnnnnnnnnnnnnnnnnnnnnnnnnnnnnnnnnnnnnnnnnnnnnnnnnnnnnnnnnnnnnnnnnnnnnnnnnnnnnnnnnnnnnnnnnnnnnnnnnnnnnnnnnnnnnnnnnnnnnnnnnnnnnnnnnnnnnnnnnnnnnnnnnnnnnnnnnnnnnnnnnnnnnnnnnnnnnnnnnnnnnnnnnnnnnnnnnnnnnnnnnnnnnnnnnnnnnnnnnnnnnnnnnnnnnnnnnnnnnnnnnnnnnnnnnnnnnnnnnnnnnnnnnnnnnnnnnnnnnnnnnnnnnnnnnnnnnnnnnnnnnnnnnnnnnnnnnnnnnnnnnnnnnnnnnnnnnnnnnnnnnnnnnnnnnnnnnnnnnnnnnnnnnnnnnnnnnnnnnnnnnnnnnnnnnnnnnnnnnnnnnnnnnnnnnnnnnnnnnnnnnnnnnnnnnnnnnnnnnnnnnnnnnnnnnnnnnnnnnnnnnnnnnnnnnnnnnnnnnnnnnnnnnnnnnnnnnnnnnnnnnnnnnnnnnnnnnnnnnnnnnnnnnnnnnnnnnnnnnnnnnnnnnnnnnnnnnnnnnnnnnnnnnnnnnnnnnnnnnnnnnnnnnnnnnnnnnnnnnnnnnnnnnnnnnnnnnnnnnnnnnnnnnnnnnnnnnnnnnnnnnnnnnnnnnnnnnnnnnnnnnnnnnnnnnnnnnnnnnnnnnnnnnnnnnnnnnnnnnnnnnnnnnnnnnnnnnnnnnnnnnnnnnnnnnnnnnnnnnnnnnnnnnnnnnnnnnnnnnnnnnnnnnnnnnnnnnnnnnnnnnnnnnnnnnnnnnnnnnnnnnnnnnnnnnnnnnnnnnnnnnnnnnnnnnnnnnnnnnnnnnnnnnnnnnnnnnnnnnnnnnnnnnnnnnnnnnnnnnnnnnnnnnnnnnnnnnnnnnnnnnnnnnnnnnnnnnnnnnnnnnnnnnnnnnnnnnnnnnnnnnnnnnnnnnnnnnnnnnnnnnnnnnnnnnnnnnnnnnnnnnnnnnnnnnnnnnnnnnnnnnnnnnnnnnnnnnnnnnnnnnnnnnnnnnnnnnnnnnnnnnnnnnnnnnnnnnnnnnnnnnnnnnnnnnnnnnnnnnnnnnnnnnnnnnnnnnnnnnnnnnnnnnnnnnnnnnnnnnnnnnnnnnnnnnnnnnnnnnnnnnnnnnnnnnnnnnnnnnnnnnnnnnnnnnnnnnnnnnnnnnnnnnnnnnnnnnnnnnnnnnnnnnnnnnnnnnnnnnnnnnnnnnnnnnnnnnnnnnnnnnnnnnnnnnnnnnnnnnnnnnnnnnnnnnnnnnnnnnnnnnnnnnnnnnnnnnnnnnnnnnnnnnnnnnnnnnnnnnnnnnnnnnnnnnnnnnnnnnnnnnnnnnnnnnnnnnnnnnnnnnnnnnnnnnnnnnnnnnnnnnnnnnnnnnnnnnnnnnnnnnnnnnnnnnnnnnnnnnnnnnnnnnnnnnnnnnnnnnnnnnnnnnnnnnnnnnnnnnnnnnnnnnnnnnnnnnnnnnnnnnnnnnnnnnnnnnnnnnnnnnnnnnnnnnnnnnnnnnnnnnnnnnnnnnnnnnnnnnnnnnnnnnnnnnnnnnnnnnnnnnnnnnnnnnnnnnnnnnnnnnnnnnnnnnnnnnnnnnnnnnnnnnnnnnnnnnnnnnnnnnnnnnnnnnnnnnnnnnnnnnnnnnnnnnnnnnnnnnnnnnnnnnnnnnnnnnnnnnnnnnnnnnnnnnnnnnnnnnnnnnnnnnnnnnnnnnnnnnnnnnnnnnnnnnnnnnnnnnnnnnnnnnnnnnnnnnnnnnnnnnnnnnnnnnnnnnnnnnnnnnnnnnnnnnnnnnnnnnnnnnnnnnnnnnnnnnnnnnnnnnnnnnnnnnnnnnnnnnnnnnnnnnnnnnnnnnnnnnnnnnnnnnnnnnnnnnnnnnnnnnnnnnnnnnnnnnnnnnnnnnnnnnnnnnnnnnnnnnnnnnnnnnnnnnnnnnnnnnnnnnnnnnnnnnnnnnnnnnnnnnnnnnnnnnnnnnnnnnnnnnnnnnnnnnnnnnnnnnnnnnnnnnnnnnnnnnnnnnnnnnnnnnnnnnnnnnnnnnnnnnnnnnnnnnnnnnnnnnnnnnnnnnnnnnnnnnnnnnnnnnnnnnnnnnnnnnnnnnnnnnnnnnnnnnnnnnnnnnnnnnnnnnnnnnnnnnnnnnnnnnnnnnnnnnnnnnnnnnnnnnnnnnnnnnnnnnnnnnnnnnnnnnnnnnnnnnnnnnnnnnnnnnnnnnnnnnnnnnnnnnnnnnnnnnnnnnnnnnnnnnnnnnnnnnnnnnnnnnnnnnnnnnnnnnnnnnnnnnnnnnnnnnnnnnnnnnnnnnnnnnnnnnnnnnnnnnnnnnnnnnnnnnnnnnnnnnnnnnnnnnnnnnnnnnnnnnnnnnnnnnnnnnnnnnnnnnnnnnnnnnnnnnnnnnnnnnnnnnnnnnnnnnnnnnnnnnnnnnnnnnnnnnnnnnnnnnnnnnnnnnnnnnnnnnnnnnnnnnnnnnnnnnnnnnnnnnnnnnnnnnnnnnnnnnnnnnnnnnnnnnnnnnnnnnnnnnnnnnnnnnnnnnnnnnnnnnnnnnnnnnnnnnnnnnnnnnnnnnnnnnnnnnnnnnnnnnnnnnnnnnnnnnnnnnnnnnnnnnnnnnnnnnnnnnnnnnnnnnnnnnnnnnnnnnnnnnnnnnnnnnnnnnnnnnnnnnnnnnnnnnnnnnnnnnnnnnnnnnnnnnnnnnnnnnnnnnnnnnnnnnnnnnnnnnnnnnnnnnnnnnnnnnnnnnnnnnnnnnnnnnnnnnnnnnnnnnnnnnnnnnnnnnnnnnnnnnnnnnnnnnnnnnnnnnnnnnnnnnnnnnnnnnnnnnnnnnnnnnnnnnnnnnnnnnnnnnnnnnnnnnnnnnnnnnnnnnnnnnnnnnnnnnnnnnnnnnnnnnnnnnnnnnnnnnnnnnnnnnnnnnnnnnnnnnnnnnnnnnnnnnnnnnnnnnnnnnnnnnnnnnnnnnnnnnnnnnnnnnnnnnnnnnnnnnnnnnnnnnnnnnnnnnnnnnnnnnnnnnnnnnnnnnnnnnnnnnnnnnnnnnnnnnnnnnnnnnnnnnnnnnnnnnnnnnnnnnnnnnnnnnnnnnnnnnnnnnnnnnnnnnnnnnnnnnnnnnnnnnnnnnnnnnnnnnnnnnnnnnnnnnnnnnnnnnnnnnnnnnnnnnnnnnnnnnnnnnnnnnnnnnnnnnnnnnnnnnnnnnnnnnnnnnnnnnnnnnnnnnnnnnnnnnnnnnnnnnnnnnnnnnnnnnnnnnnnnnnnnnnnnnnnnnnnnnnnnnnnnnnnnnnnnnnnnnnnnnnnnnnnnnnnnnnnnnnnnnnnnnnnnnnnnnnnnnnnnnnnnnnnnnnnnnnnnnnnnnnnnnnnnnnnnnnnnnnnnnnnnnnnnnnnnnnnnnnnnnnnnnnnnnnnnnnnnnnnnnnnnnnnnnnnnnnnnnnnnnnnnnnnnnnnnnnnnnnnnnnnnnnnnnnnnnnnnnnnnnnnnnnnnnnnnnnnnnnnnnnnnnnnnnnnnnnnnnnnnnnnnnnnnnnnnnnnnnnnnnnnnnnnnnnnnnnnnnnnnnnnnnnnnnnnnnnnnnnnnnnnnnnnnnnnnnnnnnnnnnnnnnnnnnnnnnnnnnnnnnnnnnnnnnnnnnnnnnnnnnnnnnnnnnnnnnnnnnnnnnnnnnnnnnnnnnnnnnnnnnnnnnnnnnnnnnnnnnnnnnnnnnnnnnnnnnnnnnnnnnnnnnnnnnnnnnnnnnnnnnnnnnnnnnnnnnnnnnnnnnnnnnnnnnnnnnnnnnnnnnnnnnnnnnnnnnnnnnnnnnnnnnnnnnnnnnnnnnnnnnnnnnnnnnnnnnnnnnnnnnnnnnnnnnnnnnnnnnnnnnnnnnnnnnnnnnnnnnnnnnnnnnnnnnnnnnnnnnnnnnnnnnnnnnnnnnnnnnnnnnnnnnnnnnnnnnnnnnnnnnnnnnnnnnnnnnnnnnnnnnnnnnnnnnnnnnnnnnnnnnnnnnnnnnnnnnnnnnnnnnnnnnnnnnnnnnnnnnnnnnnnnnnnnnnnnnnnnnnnnnnnnnnnnnnnnnnnnnnnnnnnnnnnnnnnnnnnnnnnnnnnnnnnnnnnnnnnnnnnnnnnnnnnnnnnnnnnnnnnnnnnnnnnnnnnnnnnnnnnnnnnnnnnnnnnnnnnnnnnnnnnnnnnnnnnnnnnnnnnnnnnnnnnnnnnnnnnnnnnnnnnnnnnnnnnnnnnnnnnnnnnnnnnnnnnnnnnnnnnnnnnnnnnnnnnnnnnnnnnnnnnnnnnnnnnnnnnnnnnnnnnnnnnnnnnnnnnnnnnnnnnnnnnnnnnnnnnnnnnnnnnnnnnnnnnnnnnnnnnnnnnnnnnnnnnnnnnnnnnnnnnnnnnnnnnnnnnnnnnnnnnnnnnnnnnnnnnnnnnnnnnnnnnnnnnnnnnnnnnnnnnnnnnnnnnnnnnnnnnnnnnnnnnnnnnnnnnnnnnnnnnnnnnnnnnnnnnnnnnnnnnnnnnnnnnnnnnnnnnnnnnnnnnnnnnnnnnnnnnnnnnnnnnnnnnnnnnnnnnnnnnnnnnnnnnnnnnnnnnnnnnnnnnnnnnnnnnnnnnnnnnnnnnnnnnnnnnnnnnnnnnnnnnnnnnnnnnnnnnnnnnnnnnnnnnnnnnnnnnnnnnnnnnnnnnnnnnnnnnnnnnnnnnnnnnnnnnnnnnnnnnnnnnnnnnnnnnnnnnnnnnnnnnnnnnnnnnnnnnnnnnnnnnnnnnnnnnnnnnnnnnnnnnnnnnnnnnnnnnnnnnnnnnnnnnnnnnnnnnnnnnnnnnnnnnnnnnnnnnnnnnnnnnnnnnnnnnnnnnnnnnnnnnnnnnnnnnnnnnnnnnnnnnnnnnnnnnnnnnnnnnnnnnnnnnnnnnnnnnnnnnnnnnnnnnnnnnnnnnnnnnnnnnnnnnnnnnnnnnnnnnnnnnnnnnnnnnnnnnnnnnnnnnnnnnnnnnnnnnnnnnnnnnnnnnnnnnnnnnnnnnnnnnnnnnnnnnnnnnnnnnnnnnnnnnnnnnnnnnnnnnnnnnnnnnnnnnnnnnnnnnnnnnnnnnnnnnnnnnnnnnnnnnnnnnnnnnnnnnnnnnnnnnnnnnnnnnnnnnnnnnnnnnnnnnnnnnnnnnnnnnnnnnnnnnnnnnnnnnnnnnnnnnnnnnnnnnnnnnnnnnnnnnnnnnnnnnnnnnnnnnnnnnnnnnnnnnnnnnnnnnnnnnnnnnnnnnnnnnnnnnnnnnnnnnnnnnnnnnnnnnnnnnnnnnnnnnnnnnnnnnnnnnnnnnnnnnnnnnnnnnnnnnnnnnnnnnnnnnnnnnnnnnnnnnnnnnnnnnnnnnnnnnnnnnnnnnnnnnnnnnnnnnnnnnnnnnnnnnnnnnnnnnnnnnnnnnnnnnnnnnnnnnnnnnnnnnnnnnnnnnnnnnnnnnnnnnnnnnnnnnnnnnnnnnnnnnnnnnnnnnnnnnnnnnnnnnnnnnnnnnnnnnnnnnnnnnnnnnnnnnnnnnnnnnnnnnnnnnnnnnnnnnnnnnnnnnnnnnnnnnnnnnnnnnnnnnnnnnnnnnnnnnnnnnnnnnnnnnnnnnnnnnnnnnnnnnnnnnnnnnnnnnnnnnnnnnnnnnnnnnnnnnnnnnnnnnnnnnnnnnnnnnnnnnnnnnnnnnnnnnnnnnnnnnnnnnnnnnnnnnnnnnnnnnnnnnnnnnnnnnnnnnnnnnnnnnnnnnnnnnnnnnnnnnnnnnnnnnnnnnnnnnnnnnnnnnnnnnnnnnnnnnnnnnnnnnnnnnnnnnnnnnnnnnnnnnnnnnnnnnnnnnnnnnnnnnnnnnnnnnnnnnnnnnnnnnnnnnnnnnnnnnnnnnnnnnnnnnnnnnnnnnnnnnnnnnnnnnnnnnnnnnnnnnnnnnnnnnnnnnnnnnnnnnnnnnnnnnnnnnnnnnnnnnnnnnnnnnnnnnnnnnnnnnnnnnnnnnnnnnnnnnnnnnnnnnnnnnnnnnnnnnnnnnnnnnnnnnnnnnnnnnnnnnnnnnnnnnnnnnnnnnnnnnnnnnnnnnnnnnnnnnnnnnnnnnnnnnnnnnnnnnnnnnnnnnnnnnnnnnnnnnnnnnnnnnnnnnnnnnnnnnnnnnnnnnnnnnnnnnnnnnnnnnnnnnnnnnnnnnnnnnnnnnnnnnnnnnnnnnnnnnnnnnnnnnnnnnnnnnnnnnnnnnnnnnnnnnnnnnnnnnnnnnnnnnnnnnnnnnnnnnnnnnnnnnnnnnnnnnnnnnnnnnnnnnnnnnnnnnnnnnnnnnnnnnnnnnnnnnnnnnnnnnnnnnnnnnnnnnnnnnnnnnnnnnnnnnnnnnnnnnnnnnnnnnnnnnnnnnnnnnnnnnnnnnnnnnnnnnnnnnnnnnnnnnnnnnnnnnnnnnnnnnnnnnnnnnnnnnnnnnnnnnnnnnnnnnnnnnnnnnnnnnnnnnnnnnnnnnnnnnnnnnnnnnnnnnnnnnnnnnnnnnnnnnnnnnnnnnnnnnnnnnnnnnnnnnnnnnnnnnnnnnnnnnnnnnnnnnnnnnnnnnnnnnnnnnnnnnnnnnnnnnnnnnnnnnnnnnnnnnnnnnnnnnnnnnnnnnnnnnnnnnnnnnnnnnnnnnnnnnnnnnnnnnnnnnnnnnnnnnnnnnnnnnnnnnnnnnnnnnnnnnnnnnnnnnnnnnnnnnnnnnnnnnnnnnnnnnnnnnnnnnnnnnnnnnnnnnnnnnnnnnnnnnnnnnnnnnnnnnnnnnnnnnnnnnnnnnnnnnnnnnnnnnnnnnnnnnnnnnnnnnnnnnnnnnnnnnnnnnnnnnnnnnnnnnnnnnnnnnnnnnnnnnnnnnnnnnnnnnnnnnnnnnnnnnnnnnnnnnnnnnnnnnnnnnnnnnnnnnnnnnnnnnnnnnnnnnnnnnnnnnnnnnnnnnnnnnnnnnnnnnnnnnnnnnnnnnnnnnnnnnnnnnnnnnnnnnnnnnnnnnnnnnnnnnnnnnnnnnnnnnnnnnnnnnnnnnnnnnnnnnnnnnnnnnnnnnnnnnnnnnnnnnnnnnnnnnnnnnnnnnnnnnnnnnnnnnnnnnnnnnnnnnnnnnnnnnnnnnnnnnnnnnnnnnnnnnnnnnnnnnnnnnnnnnnnnnnnnnnnnnnnnnnnnnnnnnnnnnnnnnnnnnnnnnnnnnnnnnnnnnnnnnnnnnnnnnnnnnnnnnnnnnnnnnnnnnnnnnnnnnnnnnnnnnnnnnnnnnnnnnnnnnnnnnnnnnnnnnnnnnnnnnnnnnnnnnnnnnnnnnnnnnnnnnnnnnnnnnnnnnnnnnnnnnnnnnnnnnnnnnnnnnnnnnnnnnnnnnnnnnnnnnnnnnnnnnnnnnnnnnnnnnnnnnnnnnnnnnnnnnnnnnnnnnnnnnnnnnnnnnnnnnnnnnnnnnnnnnnnnnnnnnnnnnnnnnnnnnnnnnnnnnnnnnnnnnnnnnnnnnnnnnnnnnnnnnnnnnnnnnnnnnnnnnnnnnnnnnnnnnnnnnnnnnnnnnnnnnnnnnnnnnnnnnnnnnnnnnnnnnnnnnnnnnnnnnnnnnnnnnnnnnnnnnnnnnnnnnnnnnnnnnnnnnnnnnnnnnnnnnnnnnnnnnnnnnnnnnnnnnnnnnnnnnnnnnnnnnnnnnnnnnnnnnnnnnnnnnnnnnnnnnnnnnnnnnnnnnnnnnnnnnnnnnnnnnnnnnnnnnnnnnnnnnnnnnnnnnnnnnnnnnnnnnnnnnnnnnnnnnnnnnnnnnnnnnnnnnnnnnnnnnnnnnnnnnnnnnnnnnnnnnnnnnnnnnnnnnnnnnnnnnnnnnnnnnnnnnnnnnnnnnnnnnnnnnnnnnnnnnnnnnnnnnnnnnnnnnnnnnnnnnnnnnnnnnnnnnnnnnnnnnnnnnnnnnnnnnnnnnnnnnnnnnnnnnnnnnnnnnnnnnnnnnnnnnnnnnnnnnnnnnnnnnnnnnnnnnnnnnnnnnnnnnnnnnnnnnnnnnnnnnnnnnnnnnnnnnnnnnnnnnnnnnnnnnnnnnnnnnnnnnnnnnnnnnnnnnnnnnnnnnnnnnnnnnnnnnnnnnnnnnnnnnnnnnnnnnnnnnnnnnnnnnnnnnnnnnnnnnnnnnnnnnnnnnnnnnnnnnnnnnnnnnnnnnnnnnnnnnnnnnnnnnnnnnnnnnnnnnnnnnnnnnnnnnnnnnnnnnnnnnnnnnnnnnnnnnnnnnnnnnnnnnnnnnnnnnnnnnnnnnnnnnnnnnnnnnnnnnnnnnnnnnnnnnnnnnnnnnnnnnnnnnnnnnnnnnnnnnnnnnnnnnnnnnnnnnnnnnnnnnnnnnnnnnnnnnnnnnnnnnnnnnnnnnnnnnnnnnnnnnnnnnnnnnnnnnnnnnnnnnnnnnnnnnnnnnnnnnnnnnnnnnnnnnnnnnnnnnnnnnnnnnnnnnnnnnnnnnnnnnnnnnnnnnnnnnnnnnnnnnnnnnnnnnnnnnnnnnnnnnnnnnnnnnnnnnnnnnnnnnnnnnnnnnnnnnnnnnnnnnnnnnnnnnnnnnnnnnnnnnnnnnnnnnnnnnnnnnnnnnnnnnnnnnnnnnnnnnnnnnnnnnnnnnnnnnnnnnnnnnnnnnnnnnnnnnnnnnnnnnnnnnnnnnnnnnnnnnnnnnnnnnnnnnnnnnnnnnnnnnnnnnnnnnnnnnnnnnnnnnnnnnnnnnnnnnnnnnnnnnnnnnnnnnnnnnnnnnnnnnnnnnnnnnnnnnnnnnnnnnnnnnnnnnnnnnnnnnnnnnnnnnnnnnnnnnnnnnnnnnnnnnnnnnnnnnnnnnnnnnnnnnnnnnnnnnnnnnnnnnnnnnnnnnnnnnnnnnnnnnnnnnnnnnnnnnnnnnnnnnnnnnnnnnnnnnnnnnnnnnnnnnnnnnnnnnnnnnnnnnnnnnnnnnnnnnnnnnnnnnnnnnnnnnnnnnnnnnnnnnnnnnnnnnnnnnnnnnnnnnnnnnnnnnnnnnnnnnnnnnnnnnnnnnnnnnnnnnnnnnnnnnnnnnnnnnnnnnnnnnnnnnnnnnnnnnnnnnnnnnnnnnnnnnnnnnnnnnnnnnnnnnnnnnnnnnnnnnnnnnnnnnnnnnnnnnnnnnnnnnnnnnnnnnnnnnnnnnnnnnnnnnnnnnnnnnnnnnnnnnnnnnnnnnnnnnnnnnnnnnnnnnnnnnnnnnnnnnnnnnnnnnnnnnnnnnnnnnnnnnnnnnnnnnnnnnnnnnnnnnnnnnnnnnnnnnnnnnnnnnnnnnnnnnnnnnnnnnnnnnnnnnnnnnnnnnnnnnnnnnnnnnnnnnnnnnnnnnnnnnnnnnnnnnnnnnnnnnnnnnnnnnnnnnnnnnnnnnnnnnnnnnnnnnnnnnnnnnnnnnnnnnnnnnnnnnnnnnnnnnnnnnnnnnnnnnnnnnnnnnnnnnnnnnnnnnnnnnnnnnnnnnnnnnnnnnnnnnnnnnnnnnnnnnnnnnnnnnnnnnnnnnnnnnnnnnnnnnnnnnnnnnnnnnnnnnnnnnnnnnnnnnnnnnnnnnnnnnnnnnnnnnnnnnnnnnnnnnnnnnnnnnnnnnnnnnnnnnnnnnnnnnnnnnnnnnnnnnnnnnnnnnnnnnnnnnnnnnnnnnnnnnnnnnnnnnnnnnnnnnnnnnnnnnnnnnnnnnnnnnnnnnnnnnnnnnnnnnnnnnnnnnnnnnnnnnnnnnnnnnnnnnnnnnnnnnnnnnnnnnnnnnnnnnnnnnnnnnnnnnnnnnnnnnnnnnnnnnnnnnnnnnnnnnnnnnnnnnnnnnnnnnnnnnnnnnnnnnnnnnnnnnnnnnnnnnnnnnnnnnnnnnnnnnnnnnnnnnnnnnnnnnnnnnnnnnnnnnnnnnnnnnnnnnnnnnnnnnnnnnnnnnnnnnnnnnnnnnnnnnnnnnnnnnnnnnnnnnnnnnnnnnnnnnnnnnnnnnnnnnnnnnnnnnnnnnnnnnnnnnnnnnnnnnnnnnnnnnnnnnnnnnnnnnnnnnnnnnnnnnnnnnnnnnnnnnnnnnnnnnnnnnnnnnnnnnnnnnnnnnnnnnnnnnnnnnnnnnnnnnnnnnnnnnnnnnnnnnnnnnnnnnnnnnnnnnnnnnnnnnnnnnnnnnnnnnnnnnnnnnnnnnnnnnnnnnnnnnnnnnnnnnnnnnnnnnnnnnnnnnnnnnnnnnnnnnnnnnnnnnnnnnnnnnnnnnnnnnnnnnnnnnnnnnnnnnnnnnnnnnnnnnnnnnnnnnnnnnnnnnnnnnnnnnnnnnnnnnnnnnnnnnnnnnnnnnnnnnnnnnnnnnnnnnnnnnnnnnnnnnnnnnnnnnnnnnnnnnnnnnnnnnnnnnnnnnnnnnnnnnnnnnnnnnnnnnnnnnnnnnnnnnnnnnnnnnnnnnnnnnnnnnnnnnnnnnnnnnnnnnnnnnnnnnnnnnnnnnnnnnnnnnnnnnnnnnnnnnnnnnnnnnnnnnnnnnnnnnnnnnnnnnnnnnnnnnnnnnnnnnnnnnnnnnnnnnnnnnnnnnnnnnnnnnnnnnnnnnnnnnnnnnnnnnnnnnnnnnnnnnnnnnnnnnnnnnnnnnnnnnnnnnnnnnnnnnnnnnnnnnnnnnnnnnnnnnnnnnnnnnnnnnnnnnnnnnnnnnnnnnnnnnnnnnnnnnnnnnnnnnnnnnnnnnnnnnnnnnnnnnnnnnnnnnnnnnnnnnnnnnnnnnnnnnnnnnnnnnnnnnnnnnnnnnnnnnnnnnnnnnnnnnnnnnnnnnnnnnnnnnnnnnnnnnnnnnnnnnnnnnnnnnnnnnnnnnnnnnnnnnnnnnnnnnnnnnnnnnnnnnnnnnnnnnnnnnnnnnnnnnnnnnnnnnnnnnnnnnnnnnnnnnnnnnnnnnnnnnnnnnnnnnnnnnnnnnnnnnnnnnnnnnnnnnnnnnnnnnnnnnnnnnnnnnnnnnnnnnnnnnnnnnnnnnnnnnnnnnnnnnnnnnnnnnnnnnnnnnnnnnnnnnnnnnnnnnnnnnnnnnnnnnnnnnnnnnnnnnnnnnnnnnnnnnnnnnnnnnnnnnnnnnnnnnnnnnnnnnnnnnnnnnnnnnnnnnnnnnnnnnnnnnnnnnnnnnnnnnnnnnnnnnnnnnnnnnnnnnnnnnnnnnnnnnnnnnnnnnnnnnnnnnnnnnnnnnnnnnnnnnnnnnnnnnnnnnnnnnnnnnnnnnnnnnnnnnnnnnnnnnnnnnnnnnnnnnnnnnnnnnnnnnnnnnnnnnnnnnnnnnnnnnnnnnnnnnnnnnnnnnnnnnnnnnnnnnnnnnnnnnnnnnnnnnnnnnnnnnnnnnnnnnnnnnnnnnnnnnnnnnnnnnnnnnnnnnnnnnnnnnnnnnnnnnnnnnnnnnnnnnnnnnnnnnnnnnnnnnnnnnnnnnnnnnnnnnnnnnnnnnnnnnnnnnnnnnnnnnnnnnnnnnnnnnnnnnnnnnnnnnnnnnnnnnnnnnnnnnnnnnnnnnnnnnnnnnnnnnnnnnnnnnnnnnnnnnnnnnnnnnnnnnnnnnnnnnnnnnnnnnnnnnnnnnnnnnnnnnnnnnnnnnnnnnnnnnnnnnnnnnnnnnnnnnnnnnnnnnnnnnnnnnnnnnnnnnnnnnnnnnnnnnnnnnnnnnnnnnnnnnnnnnnnnnnnnnnnnnnnnnnnnnnnnnnnnnnnnnnnnnnnnnnnnnnnnnnnnnnnnnnnnnnnnnnnnnnnnnnnnnnnnnnnnnnnnnnnnnnnnnnnnnnnnnnnnnnnnnnnnnnnnnnnnnnnnnnnnnnnnnnnnnnnnnnnnnnnnnnnnnnnnnnnnnnnnnnnnnnnnnnnnnnnnnnnnnnnnnnnnnnnnnnnnnnnnnnnnnnnnnnnnnnnnnnnnnnnnnnnnnnnnnnnnnnnnnnnnnnnnnnnnnnnnnnnnnnnnnnnnnnnnnnnnnnnnnnnnnnnnnnnnnnnnnnnnnnnnnnnnnnnnnnnnnnnnnnnnnnnnnnnnnnnnnnnnnnnnnnnnnnnnnnnnnnnnnnnnnnnnnnnnnnnnnnnnnnnnnnnnnnnnnnnnnnnnnnnnnnnnnnnnnnnnnnnnnnnnnnnnnnnnnnnnnnnnnnnnnnnnnnnnnnnnnnnnnnnnnnnnnnnnnnnnnnnnnnnnnnnnnnnnnnnnnnnnnnnnnnnnnnnnnnnnnnnnnnnnnnnnnnnnnnnnnnnnnnnnnnnnnnnnnnnnnnnnnnnnnnnnnnnnnnnnnnnnnnnnnnnnnnnnnnnnnnnnnnnnnnnnnnnnnnnnnnnnnnnnnnnnnnnnnnnnnnnnnnnnnnnnnnnnnnnnnnnnnnnnnnnnnnnnnnnnnnnnnnnnnnnnnnnnnnnnnnnnnnnnnnnnnnnnnnnnnnnnnnnnnnnnnnnnnnnnnnnnnnnnnnnnnnnnnnnnnnnnnnnnnnnnnnnnnnnnnnnnnnnnnnnnnnnnnnnnnnnnnnnnnnnnnnnnnnnnnnnnnnnnnnnnnnnnnnnnnnnnnnnnnnnnnnnnnnnnnnnnnnnnnnnnnnnnnnnnnnnnnnnnnnnnnnnnnnnnnnnnnnnnnnnnnnnnnnnnnnnnnnnnnnnnnnnnnnnnnnnnnnnnnnnnnnnnnnnnnnnnnnnnnnnnnnnnnnnnnnnnnnnnnnnnnnnnnnnnnnnnnnnnnnnnnnnnnnnnnnnnnnnnnnnnnnnnnnnnnnnnnnnnnnnnnnnnnnnnnnnnnnnnnnnnnnnnnnnnnnnnnnnnnnnnnnnnnnnnnnnnnnnnnnnnnnnnnnnnnnnnnnnnnnnnnnnnnnnnnnnnnnnnnnnnnnnnnnnnnnnnnnnnnnnnnnnnnnnnnnnnnnnnnnnnnnnnnnnnnnnnnnnnnnnnnnnnnnnnnnnnnnnnnnnnnnnnnnnnnnnnnnnnnnnnnnnnnnnnnnnnnnnnnnnnnnnnnnnnnnnnnnnnnnnnnnnnnnnnnnnnnnnnnnnnnnnnnnnnnnnnnnnnnnnnnnnnnnnnnnnnnnnnnnnnnnnnnnnnnnnnnnnnnnnnnnnnnnnnnnnnnnnnnnnnnnnnnnnnnnnnnnnnnnnnnnnnnnnnnnnnnnnnnnnnnnnnnnnnnnnnnnnnnnnnnnnnnnnnnnnnnnnnnnnnnnnnnnnnnnnnnnnnnnnnnnnnnnnnnnnnnnnnnnnnnnnnnnnnnnnnnnnnnnnnnnnnnnnnnnnnnnnnnnnnnnnnnnnnnnnnnnnnnnnnnnnnnnnnnnnnnnnnnnnnnnnnnnnnnnnnnnnnnnnnnnnnnnnnnnnnnnnnnnnnnnnnnnnnnnnnnnnnnnnnnnnnnnnnnnnnnnnnnnnnnnnnnnnnnnnnnnnnnnnnnnnnnnnnnnnnnnnnnnnnnnnnnnnnnnnnnnnnnnnnnnnnnnnnnnnnnnnnnnnnnnnnnnnnnnnnnnnnnnnnnnnnnnnnnnnnnnnnnnnnnnnnnnnnnnnnnnnnnnnnnnnnnnnnnnnnnnnnnnnnnnnnnnnnnnnnnnnnnnnnnnnnnnnnnnnnnnnnnnnnnnnnnnnnnnnnnnnnnnnnnnnnnnnnnnnnnnnnnnnnnnnnnnnnnnnnnnnnnnnnnnnnnnnnnnnnnnnnnnnnnnnnnnnnnnnnnnnnnnnnnnnnnnnnnnnnnnnnnnnnnnnnnnnnnnnnnnnnnnnnnnnnnnnnnnnnnnnnnnnnnnnnnnnnnnnnnnnnnnnnnnnnnnnnnnnnnnnnnnnnnnnnnnnnnnnnnnnnnnnnnnnnnnnnnnnnnnnnnnnnnnnnnnnnnnnnnnnnnnnnnnnnnnnnnnnnnnnnnnnnnnnnnnnnnnnnnnnnnnnnnnnnnnnnnnnnnnnnnnnnnnnnnnnnnnnnnnnnnnnnnnnnnnnnnnnnnnnnnnnnnnnnnnnnnnnnnnnnnnnnnnnnnnnnnnnnnnnnnnnnnnnnnnnnnnnnnnnnnnnnnnnnnnnnnnnnnnnnnnnnnnnnnnnnnnnnnnnnnnnnnnnnnnnnnnnnnnnnnnnnnnnnnnnnnnnnnnnnnnnnnnnnnnnnnnnnnnnnnnnnnnnnnnnnnnnnnnnnnnnnnnnnnnnnnnnnnnnnnnnnnnnnnnnnnnnnnnnnnnnnnnnnnnnnnnnnnnnnnnnnnnnnnnnnnnnnnnnnnnnnnnnnnnnnnnnnnnnnnnnnnnnnnnnnnnnnnnnnnnnnnnnnnnnnnnnnnnnnnnnnnnnnnnnnnnnnnnnnnnnnnnnnnnnnnnnnnnnnnnnnnnnnnnnnnnnnnnnnnnnnnnnnnnnnnnnnnnnnnnnnnnnnnnnnnnnnnnnnnnnnnnnnnnnnnnnnnnnnnnnnnnnnnnnnnnnnnnnnnnnnnnnnnnnnnnnnnnnnnnnnnnnnnnnnnnnnnnnnnnnnnnnnnnnnnnnnnnnnnnnnnnnnnnnnnnnnnnnnnnnnnnnnnnnnnnnnnnnnnnnnnnnnnnnnnnnnnnnnnnnnnnnnnnnnnnnnnnnnnnnnnnnnnnnnnnnnnnnnnnnnnnnnnnnnnnnnnnnnnnnnnnnnnnnnnnnnnnnnnnnnnnnnnnnnnnnnnnnnnnnnnnnnnnnnnnnnnnnnnnnnnnnnnnnnnnnnnnnnnnnnnnnnnnnnnnnnnnnnnnnnnnnnnnnnnnnnnnnnnnnnnnnnnnnnnnnnnnnnnnnnnnnnnnnnnnnnnnnnnnnnnnnnnnnnnnnnnnnnnnnnnnnnnnnnnnnnnnnnnnnnnnnnnnnnnnnnnnnnnnnnnnnnnnnnnnnnnnnnnnnnnnnnnnnnnnnnnnnnnnnnnnnnnnnnnnnnnnnnnnnnnnnnnnnnnnnnnnnnnnnnnnnnnnnnnnnnnnnnnnnnnnnnnnnnnnnnnnnnnnnnnnnnnnnnnnnnnnnnnnnnnnnnnnnnnnnnnnnnnnnnnnnnnnnnnnnnnnnnnnnnnnnnnnnnnnnnnnnnnnnnnnnnnnnnnnnnnnnnnnnnnnnnnnnnnnnnnnnnnnnnnnnnnnnnnnnnnnnnnnnnnnnnnnnnnnnnnnnnnnnnnnnnnnnnnnnnnnnnnnnnnnnnnnnnnnnnnnnnnnnnnnnnnnnnnnnnnnnnnnnnnnnnnnnnnnnnnnnnnnnnnnnnnnnnnnnnnnnnnnnnnnnnnnnnnnnnnnnnnnnnnnnnnnnnnnnnnnnnnnnnnnnnnnnnnnnnnnnnnnnnnnnnnnnnnnnnnnnnnnnnnnnnnnnnnnnnnnnnnnnnnnnnnnnnnnnnnnnnnnnnnnnnnnnnnnnnnnnnnnnnnnnnnnnnnnnnnnnnnnnnnnnnnnnnnnnnnnnnnnnnnnnnnnnnnnnnnnnnnnnnnnnnnnnnnnnnnnnnnnnnnnnnnnnnnnnnnnnnnnnnnnnnnnnnnnnnnnnnnnnnnnnnnnnnnnnnnnnnnnnnnnnnnnnnnnnnnnnnnnnnnnnnnnnnnnnnnnnnnnnnnnnnnnnnnnnnnnnnnnnnnnnnnnnnnnnnnnnnnnnnnnnnnnnnnnnnnnnnnnnnnnnnnnnnnnnnnnnnnnnnnnnnnnnnnnnnnnnnnnnnnnnnnnnnnnnnnnnnnnnnnnnnnnnnnnnnnnnnnnnnnnnnnnnnnnnnnnnnnnnnnnnnnnnnnnnnnnnnnnnnnnnnnnnnnnnnnnnnnnnnnnnnnnnnnnnnnnnnnnnnnnnnnnnnnnnnnnnnnnnnnnnnnnnnnnnnnnnnnnnnnnnnnnnnnnnnnnnnnnnnnnnnnnnnnnnnnnnnnnnnnnnnnnnnnnnnnnnnnnnnnnnnnnnnnnnnnnnnnnnnnnnnnnnnnnnnnnnnnnnnnnnnnnnnnnnnnnnnnnnnnnnnnnnnnnnnnnnnnnnnnnnnnnnnnnnnnnnnnnnnnnnnnnnnnnnnnnnnnnnnnnnnnnnnnnnnnnnnnnnnnnnnnnnnnnnnnnnnnnnnnnnnnnnnnnnnnnnnnnnnnnnnnnnnnnnnnnnnnnnnnnnnnnnnnnnnnnnnnnnnnnnnnnnnnnnnnnnnnnnnnnnnnnnnnnnnnnnnnnnnnnnnnnnnnnnnnnnnnnnnnnnnnnnnnnnnnnnnnnnnnnnnnnnnnnnnnnnnnnnnnnnnnnnnnnnnnnnnnnnnnnnnnnnnnnnnnnnnnnnnnnnnnnnnnnnnnnnnnnnnnnnnnnnnnnnnnnnnnnnnnnnnnnnnnnnnnnnnnnnnnnnnnnnnnnnnnnnnnnnnnnnnnnnnnnnnnnnnnnnnnnnnnnnnnnnnnnnnnnnnnnnnnnnnnnnnnnnnnnnnnnnnnnnnnnnnnnnnnnnnnnnnnnnnnnnnnnnnnnnnnnnnnnnnnnnnnnnnnnnnnnnnnnnnnnnnnnnnnnnnnnnnnnnnnnnnnnnnnnnnnnnnnnnnnnnnnnnnnnnnnnnnnnnnnnnnnnnnnnnnnnnnnnnnnnnnnnnnnnnnnnnnnnnnnnnnnnnnnnnnnnnnnnnnnnnnnnnnnnnnnnnnnnnnnnnnnnnnnnnnnnnnnnnnnnnnnnnnnnnnnnnnnnnnnnnnnnnnnnnnnnnnnnnnnnnnnnnnnnnnnnnnnnnnnnnnnnnnnnnnnnnnnnnnnnnnnnnnnnnnnnnnnnnnnnnnnnnnnnnnnnnnnnnnnnnnnnnnnnnnnnnnnnnnnnnnnnnnnnnnnnnnnnnnnnnnnnnnnnnnnnnnnnnnnnnnnnnnnnnnnnnnnnnnnnnnnnnnnnnnnnnnnnnnnnnnnnnnnnnnnnnnnnnnnnnnnnnnnnnnnnnnnnnnnnnnnnnnnnnnnnnnnnnnnnnnnnnnnnnnnnnnnnnnnnnnnnnnnnnnnnnnnnnnnnnnnnnnnnnnnnnnnnnnnnnnnnnnnnnnnnnnnnnnnnnnnnnnnnnnnnnnnnnnnnnnnnnnnnnnnnnnnnnnnnnnnnnnnnnnnnnnnnnnnnnnnnnnnnnnnnnnnnnnnnnnnnnnnnnnnnnnnnnnnnnnnnnnnnnnnnnnnnnnnnnnnnnnnnnnnnnnnnnnnnnnnnnnnnnnnnnnnnnnnnnnnnnnnnnnnnnnnnnnnnnnnnnnnnnnnnnnnnnnnnnnnnnnnnnnnnnnnnnnnnnnnnnnnnnnnnnnnnnnnnnnnnnnnnnnnnnnnnnnnnnnnnnnnnnnnnnnnnnnnnnnnnnnnnnnnnnnnnnnnnnnnnnnnnnnnnnnnnnnnnnnnnnnnnnnnnnnnnnnnnnnnnnnnnnnnnnnnnnnnnnnnnnnnnnnnnnnnnnnnnnnnnnnnnnnnnnnnnnnnnnnnnnnnnnnnnnnnnnnnnnnnnnnnnnnnnnnnnnnnnnnnnnnnnnnnnnnnnnnnnnnnnnnnnnnnnnnnnnnnnnnnnnnnnnnnnnnnnnnnnnnnnnnnnnnnnnnnnnnnnnnnnnnnnnnnnnnnnnnnnnnnnnnnnnnnnnnnnnnnnnnnnnnnnnnnnnnnnnnnnnnnnnnnnnnnnnnnnnnnnnnnnnnnnnnnnnnnnnnnnnnnnnnnnnnnnnnnnnnnnnnnnnnnnnnnnnnnnnnnnnnnnnnnnnnnnnnnnnnnnnnnnnnnnnnnnnnnnnnnnnnnnnnnnnnnnnnnnnnnnnnnnnnnnnnnnnnnnnnnnnnnnnnnnnnnnnnnnnnnnnnnnnnnnnnnnnnnnnnnnnnnnnnnnnnnnnnnnnnnnnnnnnnnnnnnnnnnnnnnnnnnnnnnnnnnnnnnnnnnnnnnnnnnnnnnnnnnnnnnnnnnnnnnnnnnnnnnnnnnnnnnnnnnnnnnnnnnnnnnnnnnnnnnnnnnnnnnnnnnnnnnnnnnnnnnnnnnnnnnnnnnnnnnnnnnnnnnnnnnnnnnnnnnnnnnnnnnnnnnnnnnnnnnnnnnnnnnnnnnnnnnnnnnnnnnnnnnnnnnnnnnnnnnnnnnnnnnnnnnnnnnnnnnnnnnnnnnnnnnnnnnnnnnnnnnnnnnnnnnnnnnnnnnnnnnnnnnnnnnnnnnnnnnnnnnnnnnnnnnnnnnnnnnnnnnnnnnnnnnnnnnnnnnnnnnnnnnnnnnnnnnnnnnnnnnnnnnnnnnnnnnnnnnnnnnnnnnnnnnnnnnnnnnnnnnnnnnnnnnnnnnnnnnnnnnnnnnnnnnnnnnnnnnnnnnnnnnnnnnnnnnnnnnnnnnnnnnnnnnnnnnnnnnnnnnnnnnnnnnnnnnnnnnnnnnnnnnnnnnnnnnnnnnnnnnnnnnnnnnnnnnnnnnnnnnnnnnnnnnnnnnnnnnnnnnnnnnnnnnnnnnnnnnnnnnnnnnnnnnnnnnnnnnnnnnnnnnnnnnnnnnnnnnnnnnnnnnnnnnnnnnnnnnnnnnnnnnnnnnnnnnnnnnnnnnnnnnnnnnnnnnnnnnnnnnnnnnnnnnnnnnnnnnnnnnnnnnnnnnnnnnnnnnnnnnnnnnnnnnnnnnnnnnnnnnnnnnnnnnnnnnnnnnnnnnnnnnnnnnnnnnnnnnnnnnnnnnnnnnnnnnnnnnnnnnnnnnnnnnnnnnnnnnnnnnnnnnnnnnnnnnnnnnnnnnnnnnnnnnnnnnnnnnnnnnnnnnnnnnnnnnnnnnnnnnnnnnnnnnnnnnnnnnnnnnnnnnnnnnnnnnnnnnnnnnnnnnnnnnnnnnnnnnnnnnnnnnnnnnnnnnnnnnnnnnnnnnnnnnnnnnnnnnnnnnnnnnnnnnnnnnnnnnnnnnnnnnnnnnnnnnnnnnnnnnnnnnnnnnnnnnnnnnnnnnnnnnnnnnnnnnnnnnnnnnnnnnnnnnnnnnnnnnnnnnnnnnnnnnnnnnnnnnnnnnnnnnnnnnnnnnnnnnnnnnnnnnnnnnnnnnnnnnnnnnnnnnnnnnnnnnnnnnnnnnnnnnnnnnnnnnnnnnnnnnnnnnnnnnnnnnnnnnnnnnnnnnnnnnnnnnnnnnnnnnnnnnnnnnnnnnnnnnnnnnnnnnnnnnnnnnnnnnnnnnnnnnnnnnnnnnnnnnnnnnnnnnnnnnnnnnnnnnnnnnnnnnnnnnnnnnnnnnnnnnnnnnnnnnnnnnnnnnnnnnnnnnnnnnnnnnnnnnnnnnnnnnnnnnnnnnnnnnnnnnnnnnnnnnnnnnnnnnnnnnnnnnnnnnnnnnnnnnnnnnnnnnnnnnnnnnnnnnnnnnnnnnnnnnnnnnnnnnnnnnnnnnnnnnnnnnnnnnnnnnnnnnnnnnnnnnnnnnnnnnnnnnnnnnnnnnnnnnnnnnnnnnnnnnnnnnnnnnnnnnnnnnnnnnnnnnnnnnnnnnnnnnnnnnnnnnnnnnnnnnnnnnnnnnnnnnnnnnnnnnnnnnnnnnnnnnnnnnnnnnnnnnnnnnnnnnnnnnnnnnnnnnnnnnnnnnnnnnnnnnnnnnnnnnnnnnnnnnnnnnnnnnnnnnnnnnnnnnnnnnnnnnnnnnnnnnnnnnnnnnnnnnnnnnnnnnnnnnnnnnnnnnnnnnnnnnnnnnnnnnnnnnnnnnnnnnnnnnnnnnnnnnnnnnnnnnnnnnnnnnnnnnnnnnnnnnnnnnnnnnnnnnnnnnnnnnnnnnnnnnnnnnnnnnnnnnnnnnnnnnnnnnnnnnnnnnnnnnnnnnnnnnnnnnnnnnnnnnnnnnnnnnnnnnnnnnnnnnnnnnnnnnnnnnnnnnnnnnnnnnnnnnnnnnnnnnnnnnnnnnnnnnnnnnnnnnnnnnnnnnnnnnnnnnnnnnnnnnnnnnnnnnnnnnnnnnnnnnnnnnnnnnnnnnnnnnnnnnnnnnnnnnnnnnnnnnnnnnnnnnnnnnnnnnnnnnnnnnnnnnnnnnnnnnnnnnnnnnnnnnnnnnnnnnnnnnnnnnnnnnnnnnnnnnnnnnnnnnnnnnnnnnnnnnnnnnnnnnnnnnnnnnnnnnnnnnnnnnnnnnnnnnnnnnnnnnnnnnnnnnnnnnnnnnnnnnnnnnnnnnnnnnnnnnnnnnnnnnnnnnnnnnnnnnnnnnnnnnnnnnnnnnnnnnnnnnnnnnnnnnnnnnnnnnnnnnnnnnnnnnnnnnnnnnnnnnnnnnnnnnnnnnnnnnnnnnnnnnnnnnnnnnnnnnnnnnnnnnnnnnnnnnnnnnnnnnnnnnnnnnnnnnnnnnnnnnnnnnnnnnnnnnnnnnnnnnnnnnnnnnnnnnnnnnnnnnnnnnnnnnnnnnnnnnnnnnnnnnnnnnnnnnnnnnnnnnnnnnnnnnnnnnnnnnnnnnnnnnnnnnnnnnnnnnnnnnnnnnnnnnnnnnnnnnnnnnnnnnnnnnnnnnnnnnnnnnnnnnnnnnnnnnnnnnnnnnnnnnnnnnnnnnnnnnnnnnnnnnnnnnnnnnnnnnnnnnnnnnnnnnnnnnnnnnnnnnnnnnnnnnnnnnnnnnnnnnnnnnnnnnnnnnnnnnnnnnnnnnnnnnnnnnnnnnnnnnnnnnnnnnnnnnnnnnnnnnnnnnnnnnnnnnnnnnnnnnnnnnnnnnnnnnnnnnnnnnnnnnnnnnnnnnnnnnnnnnnnnnnnnnnnnnnnnnnnnnnnnnnnnnnnnnnnnnnnnnnnnnnnnnnnnnnnnnnnnnnnnnnnnnnnnnnnnnnnnnnnnnnnnnnnnnnnnnnnnnnnnnnnnnnnnnnnnnnnnnnnnnnnnnnnnnnnnnnnnnnnnnnnnnnnnnnnnnnnnnnnnnnnnnnnnnnnnnnnnnnnnnnnnnnnnnnnnnnnnnnnnnnnnnnnnnnnnnnnnnnnnnnnnnnnnnnnnnnnnnnnnnnnnnnnnnnnnnnnnnnnnnnnnnnnnnnnnnnnnnnnnnnnnnnnnnnnnnnnnnnnnnnnnnnnnnnnnnnnnnnnnnnnnnnnnnnnnnnnnnnnnnnnnnnnnnnnnnnnnnnnnnnnnnnnnnnnnnnnnnnnnnnnnnnnnnnnnnnnnnnnnnnnnnnnnnnnnnnnnnnnnnnnnnnnnnnnnnnnnnnnnnnnnnnnnnnnnnnnnnnnnnnnnnnnnnnnnnnnnnnnnnnnnnnnnnnnnnnnnnnnnnnnnnnnnnnnnnnnnnnnnnnnnnnnnnnnnnnnnnnnnnnnnnnnnnnnnnnnnnnnnnnnnnnnnnnnnnnnnnnnnnnnnnnnnnnnnnnnnnnnnnnnnnnnnnnnnnnnnnnnnnnnnnnnnnnnnnnnnnnnnnnnnnnnnnnnnnnnnnnnnnnnnnnnnnnnnnnnnnnnnnnnnnnnnnnnnnnnnnnnnnnnnnnnnnnnnnnnnnnnnnnnnnnnnnnnnnnnnnnnnnnnnnnnnnnnnnnnnnnnnnnnnnnnnnnnnnnnnnnnnnnnnnnnnnnnnnnnnnnnnnnnnnnnnnnnnnnnnnnnnnnnnnnnnnnnnnnnnnnnnnnnnnnnnnnnnnnnnnnnnnnnnnnnnnnnnnnnnnnnnnnnnnnnnnnnnnnnnnnnnnnnnnnnnnnnnnnnnnnnnnnnnnnnnnnnnnnnnnnnnnnnnnnnnnnnnnnnnnnnnnnnnnnnnnnnnnnnnnnnnnnnnnnnnnnnnnnnnnnnnnnnnnnnnnnnnnnnnnnnnnnnnnnnnnnnnnnnnnnnnnnnnnnnnnnnnnnnnnnnnnnnnnnnnnnnnnnnnnnnnnnnnnnnnnnnnnnnnnnnnnnnnnnnnnnnnnnnnnnnnnnnnnnnnnnnnnnnnnnnnnnnnnnnnnnnnnnnnnnnnnnnnnnnnnnnnnnnnnnnnnnnnnnnnnnnnnnnnnnnnnnnnnnnnnnnnnnnnnnnnnnnnnnnnnnnnnnnnnnnnnnnnnnnnnnnnnnnnnnnnnnnnnnnnnnnnnnnnnnnnnnnnnnnnnnnnnnnnnnnnnnnnnnnnnnnnnnnnnnnnnnnnnnnnnnnnnnnnnnnnnnnnnnnnnnnnnnnnnnnnnnnnnnnnnnnnnnnnnnnnnnnnnnnnnnnnnnnnnnnnnnnnnnnnnnnnnnnnnnnnnnnnnnnnnnnnnnnnnnnnnnnnnnnnnnnnnnnnnnnnnnnnnnnnnnnnnnnnnnnnnnnnnnnnnnnnnnnnnnnnnnnnnnnnnnnnnnnnnnnnnnnnnnnnnnnnnnnnnnnnnnnnnnnnnnnnnnnnnnnnnnnnnnnnnnnnnnnnnnnnnnnnnnnnnnnnnnnnnnnnnnnnnnnnnnnnnnnnnnnnnnnnnnnnnnnnnnnnnnnnnnnnnnnnnnnnnnnnnnnnnnnnnnnnnnnnnnnnnnnnnnnnnnnnnnnnnnnnnnnnnnnnnnnnnnnnnnnnnnnnnnnnnnnnnnnnnnnnnnnnnnnnnnnnnnnnnnnnnnnnnnnnnnnnnnnnnnnnnnnnnnnnnnnnnnnnnnnnnnnnnnnnnnnnnnnnnnnnnnnnnnnnnnnnnnnnnnnnnnnnnnnnnnnnnnnnnnnnnnnnnnnnnnnnnnnnnnnnnnnnnnnnnnnnnnnnnnnnnnnnnnnnnnnnnnnnnnnnnnnnnnnnnnnnnnnnnnnnnnnnnnnnnnnnnnnnnnnnnnnnnnnnnnnnnnnnnnnnnnnnnnnnnnnnnnnnnnnnnnnnnnnnnnnnnnnnnnnnnnnnnnnnnnnnnnnnnnnnnnnnnnnnnnnnnnnnnnnnnnnnnnnnnnnnnnnnnnnnnnnnnnnnnnnnnnnnnnnnnnnnnnnnnnnnnnnnnnnnnnnnnnnnnnnnnnnnnnnnnnnnnnnnnnnnnnnnnnnnnnnnnnnnnnnnnnnnnnnnnnnnnnnnnnnnnnnnnnnnnnnnnnnnnnnnnnnnnnnnnnnnnnnnnnnnnnnnnnnnnnnnnnnnnnnnnnnnnnnnnnnnnnnnnnnnnnnnnnnnnnnnnnnnnnnnnnnnnnnnnnnnnnnnnnnnnnnnnnnnnnnnnnnnnnnnnnnnnnnnnnnnnnnnnnnnnnnnnnnnnnnnnnnnnnnnnnnnnnnnnnnnnnnnnnnnnnnnnnnnnnnnnnnnnnnnnnnnnnnnnnnnnnnnnnnnnnnnnnnnnnnnnnnnnnnnnnnnnnnnnnnnnnnnnnnnnnnnnnnnnnnnnnnnnnnnnnnnnnnnnnnnnnnnnnnnnnnnnnnnnnnnnnnnnnnnnnnnnnnnnnnnnnnnnnnnnnnnnnnnnnnnnnnnnnnnnnnnnnnnnnnnnnnnnnnnnnnnnnnnnnnnnnnnnnnnnnnnnnnnnnnnnnnnnnnnnnnnnnnnnnnnnnnnnnnnnnnnnnnnnnnnnnnnnnnnnnnnnnnnnnnnnnnnnnnnnnnnnnnnnnnnnnnnnnnnnnnnnnnnnnnnnnnnnnnnnnnnnnnnnnnnnnnnnnnnnnnnnnnnnnnnnnnnnnnnnnnnnnnnnnnnnnnnnnnnnnnnnnnnnnnnnnnnnnnnnnnnnnnnnnnnnnnnnnnnnnnnnnnnnnnnnnnnnnnnnnnnnnnnnnnnnnnnnnnnnnnnnnnnnnnnnnnnnnnnnnnnnnnnnnnnnnnnnnnnnnnnnnnnnnnnnnnnnnnnnnnnnnnnnnnnnnnnnnnnnnnnnnnnnnnnnnnnnnnnnnnnnnnnnnnnnnnnnnnnnnnnnnnnnnnnnnnnnnnnnnnnnnnnnnnnnnnnnnnnnnnnnnnnnnnnnnnnnnnnnnnnnnnnnnnnnnnnnnnnnnnnnnnnnnnnnnnnnnnnnnnnnnnnnnnnnnnnnnnnnnnnnnnnnnnnnnnnnnnnnnnnnnnnnnnnnnnnnnnnnnnnnnnnnnnnnnnnnnnnnnnnnnnnnnnnnnnnnnnnnnnnnnnnnnnnnnnnnnnnnnnnnnnnnnnnnnnnnnnnnnnnnnnnnnnnnnnnnnnnnnnnnnnnnnnnnnnnnnnnnnnnnnnnnnnnnnnnnnnnnnnnnnnnnnnnnnnnnnnnnnnnnnnnnnnnnnnnnnnnnnnnnnnnnnnnnnnnnnnnnnnnnnnnnnnnnnnnnnnnnnnnnnnnnnnnnnnnnnnnnnnnnnnnnnnnnnnnnnnnnnnnnnnnnnnnnnnnnnnnnnnnnnnnnnnnnnnnnnnnnnnnnnnnnnnnnnnnnnnnnnnnnnnnnnnnnnnnnnnnnnnnnnnnnnnnnnnnnnnnnnnnnnnnnnnnnnnnnnnnnnnnnnnnnnnnnnnnnnnnnnnnnnnnnnnnnnnnnnnnnnnnnnnnnnnnnnnnnnnnnnnnnnnnnnnnnnnnnnnnnnnnnnnnnnnnnnnnnnnnnnnnnnnnnnnnnnnnnnnnnnnnnnnnnnnnnnnnnnnnnnnnnnnnnnnnnnnnnnnnnnnnnnnnnnnnnnnnnnnnnnnnnnnnnnnnnnnnnnnnnnnnnnnnnnnnnnnnnnnnnnnnnnnnnnnnnnnnnnnnnnnnnnnnnnnnnnnnnnnnnnnnnnnnnnnnnnnnnnnnnnnnnnnnnnnnnnnnnnnnnnnnnnnnnnnnnnnnnnnnnnnnnnnnnnnnnnnnnnnnnnnnnnnnnnnnnnnnnnnnnnnnnnnnnnnnnnnnnnnnnnnnnnnnnnnnnnnnnnnnnnnnnnnnnnnnnnnnnnnnnnnnnnnnnnnnnnnnnnnnnnnnnnnnnnnnnnnnnnnnnnnnnnnnnnnnnnnnnnnnnnnnnnnnnnnnnnnnnnnnnnnnnnnnnnnnnnnnnnnnnnnnnnnnnnnnnnnnnnnnnnnnnnnnnnnnnnnnnnnnnnnnnnnnnnnnnnnnnnnnnnnnnnnnnnnnnnnnnnnnnnnnnnnnnnnnnnnnnnnnnnnnnnnnnnnnnnnnnnnnnnnnnnnnnnnnnnnnnnnnnnnnnnnnnnnnnnnnnnnnnnnnnnnnnnnnnnnnnnnnnnnnnnnnnnnnnnnnnnnnnnnnnnnnnnnnnnnnnnnnnnnnnnnnnnnnnnnnnnnnnnnnnnnnnnnnnnnnnnnnnnnnnnnnnnnnnnnnnnnnnnnnnnnnnnnnnnnnnnnnnnnnnnnnnnnnnnnnnnnnnnnnnnnnnnnnnnnnnnnnnnnnnnnnnnnnnnnnnnnnnnnnnnnnnnnnnnnnnnnnnnnnnnnnnnnnnnnnnnnnnnnnnnnnnnnnnnnnnnnnnnnnnnnnnnnnnnnnnnnnnnnnnnnnnnnnnnnnnnnnnnnnnnnnnnnnnnnnnnnnnnnnnnnnnnnnnnnnnnnnnnnnnnnnnnnnnnnnnnnnnnnnnnnnnnnnnnnnnnnnnnnnnnnnnnnnnnnnnnnnnnnnnnnnnnnnnnnnnnnnnnnnnnnnnnnnnnnnnnnnnnnnnnnnnnnnnnnnnnnnnnnnnnnnnnnnnnnnnnnnnnnnnnnnnnnnnnnnnnnnnnnnnnnnnnnnnnnnnnnnnnnnnnnnnnnnnnnnnnnnnnnnnnnnnnnnnnnnnnnnnnnnnnnnnnnnnnnnnnnnnnnnnnnnnnnnnnnnnnnnnnnnnnnnnnnnnnnnnnnnnnnnnnnnnnnnnnnnnnnnnnnnnnnnnnnnnnnnnnnnnnnnnnnnnnnnnnnnnnnnnnnnnnnnnnnnnnnnnnnnnnnnnnnnnnnnnnnnnnnnnnnnnnnnnnnnnnnnnnnnnnnnnnnnnnnnnnnnnnnnnnnnnnnnnnnnnnnnnnnnnnnnnnnnnnnnnnnnnnnnnnnnnnnnnnnnnnnnnnnnnnnnnnnnnnnnnnnnnnnnnnnnnnnnnnnnnnnnnnnnnnnnnnnnnnnnnnnnnnnnnnnnnnnnnnnnnnnnnnnnnnnnnnnnnnnnnnnnnnnnnnnnnnnnnnnnnnnnnnnnnnnnnnnnnnnnnnnnnnnnnnnnnnnnnnnnnnnnnnnnnnnnnnnnnnnnnnnnnnnnnnnnnnnnnnnnnnnnnnnnnnnnnnnnnnnnnnnnnnnnnnnnnnnnnnnnnnnnnnnnnnnnnnnnnnnnnnnnnnnnnnnnnnnnnnnnnnnnnnnnnnnnnnnnnnnnnnnnnnnnnnnnnnnnnnnnnnnnnnnnnnnnnnnnnnnnnnnnnnnnnnnnnnnnnnnnnnnnnnnnnnnnnnnnnnnnnnnnnnnnnnnnnnnnnnnnnnnnnnnnnnnnnnnnnnnnnnnnnnnnnnnnnnnnnnnnnnnnnnnnnnnnnnnnnnnnnnnnnnnnnnnnnnnnnnnnnnnnnnnnnnnnnnnnnnnnnnnnnnnnnnnnnnnnnnnnnnnnnnnnnnnnnnnnnnnnnnnnnnnnnnnnnnnnnnnnnnnnnnnnnnnnnnnnnnnnnnnnnnnnnnnnnnnnnnnnnnnnnnnnnnnnnnnnnnnnnnnnnnnnnnnnnnnnnnnnnnnnnnnnnnnnnnnnnnnnnnnnnnnnnnnnnnnnnnnnnnnnnnnnnnnnnnnnnnnnnnnnnnnnnnnnnnnnnnnnnnnnnnnnnnnnnnnnnnnnnnnnnnnnnnnnnnnnnnnnnnnnnnnnnnnnnnnnnnnnnnnnnnnnnnnnnnnnnnnnnnnnnnnnnnnnnnnnnnnnnnnnnnnnnnnnnnnnnnnnnnnnnnnnnnnnnnnnnnnnnnnnnnnnnnnnnnnnnnnnnnnnnnnnnnnnnnnnnnnnnnnnnnnnnnnnnnnnnnnnnnnnnnnnnnnnnnnnnnnnnnnnnnnnnnnnnnnnnnnnnnnnnnnnnnnnnnnnnnnnnnnnnnnnnnnnnnnnnnnnnnnnnnnnnnnnnnnnnnnnnnnnnnnnnnnnnnnnnnnnnnnnnnnnnnnnnnnnnnnnnnnnnnnnnnnnnnnnnnnnnnnnnnnnnnnnnnnnnnnnnnnnnnnnnnnnnnnnnnnnnnnnnnnnnnnnnnnnnnnnnnnnnnnnnnnagggcgcgcgatcgtagccagggcattcatgccctgctggccaacgcgccccgaaaccgcccgcccggagggcggacgagggttagtgcgacaaggttgggggcgcctgtttttcaggacaggaccgttgcttgttgtcaatgagtcaggttcgaatcgcgtccgtagccccgaaggagcgacgggttttagccacgggtgcagaccccggaggggtcaaacccgtggcaaccaaagcgccggaacggacggagccccggcaggggcgaaggagcggcgagtctgcgtcaggtcggatcgggaggcgggccggagagaccggcacatccctggctggtctgacgtgcggcttctcggaggtgcgcctcactagacttcttgggttgccggacttgttgcgaatgagtcaagttttcgagtcgcgtccgcagccccgtaggggccacggcatttagccgcgggtgcagaccccggaggggtccaacccgtggacatcgggcaccagacgaaggtagccccgaaggggcgaaggaaaggcgagtccgtgtcagatcaacttccgggaggcgtcgcagggcttccgccgccccttttggggctgatggggttgacgggcattgccatccacgggcttgaccccgctggggtttgcgcccgtggctacaacccttgggccctgcggggccgttggatttccgcgcgcgactggttggtctgaggcgcagcctcgctagaattcccagacagcaaacactcgccggcagcgatgtcggcggtacgacgtgatcgaccccgtactcatcaccgcagacgacaagcatcgggccgccccggtacgcctgttctcgccgcagtatcgccggctgctcgggttcctgtggccccaccggcgcgccctggtcatcggggcgatcgcctcggtcctgcacgccctgctgaacacggccgggatcagcgtcgtgctgccgatcaccacgatcctgctcgaagagcagggactgcacggctgggtctaccgctcgatggccgagcggcggctcggggccgatctcgacacgatctcacggccgcaacccgatggaaacgtctcgatccatcgcgtgcagatcctcaaggttcgacggggttcgccactcgacgcggccgatgtcagcccggcctccgagaccgacacgctggacggcgagcagctcgcacccatcgaatggttccggcgcgtcgcgctcacaccgcaagacgcgaccgtcacgttgggcgtcatgccatccgggtcggccgatggcagccctgtttcggcctcggttcggctgcgcgacgcacccgcgcactggcgggccgcggcatcggccgtcggactccttccattcggccagccgctgcgcgcgttgctggccgtgatgggcgtgctggtggtcgtggcgatcgccagcaacatcttccgattcttgtccgagtatctggtctcgaccgcgatcctgcgctcgctgatggatctgcggcgaaagttgtacgccaaggtcctgcggctgccgatggccttcttcgcccgcgacgtcggcgataccgtctcgcgcttcgttcaggacgtgcacgacgtgcagcgcggcctgatggccctgttcggcaacatgatccgcgagccgctcaaggccctggccatcttcacttgggccttgttcctcgactggcgcatcacgctgacgctgctgctggtcggaccgctggccatcctgctcttctggcggatcggcgagagcgtcaagaaggccagcacccggctgctgcgcggctacggaatgatcatcggcgccctgtcggcctcgctgcacacggccaacatcgtcaaggcctacacggccgaaaacaccgagcggcgccgcttctggcgcatcgaccgcaagatgctggcccagcagaagaagatggtccggctcgacgcgctgctcagcccatcgctcgaggtcatcgccgtcgcctcgatctgcgggctgaccatctggctgggcgcccaggtcatcggcggcacgctcgaccagccgcgcttcgtggccctgatcgtcacgctggccatgatgttcgacccgatccgcaaggtggccgacgtctacacccgcgtgcagcgctcggccgccggcgcgtcgcgcatcttcgacgtgtatgaccggcccgacgaaacgtcgcaaaacggcaccgcgcccaagctggccccgctggccgagcgcatcgagttccgcgacgtcaccttcgtctatccgcacgccgatcggccggccctcgaccacgtcagcctcagcgtgcacaagggcgagaccgtggccatcgtcggccccaacggctcgggcaagaccacgctgatgagcatgctgctgcgcttctacgacccgctggaaggcgccgtccgcttcgacggcgtcgatctgcgcaacgtgagcctgcgcagcctgcgccgccagatcagcctggtaacgcaggaggcagtcgtcttcgccgcgccgatcgccgagaacatcgcctatggcgcccgcggcgcgacccgcgaacagatcatcgacgccgctggccgcgcctacgccgccgacttcatcaatcgcctgcccaagggttacgatactgtcgtcggtgagcgcggcgcgacgctctcgggcggtgagcgtcagcgtttggccatcgcccgcgccatcctgcgcgacgccccgatcctgatcttcgacgaagccaccagtcaggtcgattccgagagcgagcagaagatccaggccgccctgcgcgagctggtggctgaccgcaccacgctgatcgtcgcccaccgcctcagcaccatcaagttcgccagccgcatcgtcgtcatggacgccggccgcatcatcgacacaggttcccacgagcagttgctggcccgctgccccttctaccacggcctgtgcgaaacccaactcgtccactagccgccgttccgatcagaaccccggccgccaaggccgcgggcccggatcggatcagaaccccggccgccaaggccgcgggcccggatcggattagaaccccggccgccaaggccgcgggcccggatcggattagaaccccggccgccaaggccgcgggcccggatcggatcagaaccccggccgccaaggccgcgggcccggatgccggtagcgcttcgagttcggaccgagcgtactcctcggaggggctgcagactgctcgtgttgattcgcggcgcgtcccggacgaccgtcacggagcttcactacagccaccggacccctgacccctcgcttgcggtcagaagggccacggatcaacccggacgaacaccggcgcccgttccggctcccggccttcagctttcagctttcagctttcgctaccgatcaacaccggccggcctccaggcaaccctcaagcgcgccacgccctcccccagcccgtgattggttcgccttgcgtcaatcgcccgcccgtgcataatgtccgcgcggtccggtcggaggatggatcaagtttcacgcgtacgctgatcaacaccgcctttcgcccctcagtgcctgctcgagtgacgatccaggcgcgtcgcgctctcgcgtgaagaaggacgcacgggtgaccgatgactttcaatttgctcgttgaaccgtggattcccgtcctccgtacaaatggacgccctgcgcgagtaggcgtccgggaagcgctaacgactgcgggcgccatccgacagatcgccgcgtcgaacccaatggataacgtcgctctgctccggtttttgctggccgtgctcatgtggtgcaagccgcgtctaagtgacgaagaacgcacacagctcgacgtcgcgaagggcgtcccagaagagtggctggccgaacgactcggcggtgcaagtacgccgtgcgaggagttcaacctgctcggtgacggcaaccggttcttccaggatcgatctaccccaaataacgcgcgccccatcggcgacctgctcgttgagtttccgacagaaaccaagatcgcgcgcttccgccacgtccgagacacgcagtacggcttctgtccggcctgcagcgcgctcggcgttgtgcggttctgcgctttcgccaacgcgtacggcggcggtcgctacacatccgcccttaacgggcctacgcccgcatatgtgatctcgcaccgccccacgctagttggcactctgctgctacactggcctatgaacaatccggtcaaacgatcgccgccgtggctttgtgctgatccgccgtccgaaagcgacctagaccttcccacggccttcgcctggcgctcgcgccgcatttggctaaacgatcccgatgccgacggggattgcgcatactgtggtcaccgaagcacactcattcgacaactcgcgttcaccggggcgtggaagccgccatttgaaaccaaggggcaggagaagaggttctgggagaaggatccgcatctgatcgtcgtggagaaggaccgcgaggcgccagcggaggagacggcagccgatgacagtgacgacgcgccccaccgtgacgccaagagcagcgagcgccgccgcacgagaacaacgctcggtttcccttccccggggtcgcgagtcgcggcacattcgaggttctggcgcagagcccttcgcgctaggatcgggcacgccagtggcaaaaacgcggacgatgcaaccgctgtgatcgttgcgggacccgctgccaacaaagggctttatcaggatgctagcgaagtccgcttgccgcgtctttctaacgatgacggcaccgccgcgtcgattgatgctctggcgaaggcggttgatgctctgagcgccgtgttgaagtgctccacacgcaacccggagcgtcagcaccccgagcacaaggccgcgctcgattcgttggcaccttcgctagaactgggttttcgcgaggatactcaagcgttactgatcccgagcttctcaatcgatcacgcgacagagcgactcttacccgtagtgaataccgtccttcgcgccacgtccgcaggctcgccgctgcgccggcgcgagggagaggcgcgcgcacgcgaggcgttgaatcgcgttctccactcggtcgctgccgcgagcggttcgcccgcgaaatatcaaaatgagcccagcgcgggcgaacaaagggcccgtgaacacaagcgcacgcgcgcgacagagtctaggagaaccaacgcgtgagtgcgacggagacctacatcgcgcggctgctggccttgcaagaggccaagtgctcgctgctgcgcggcctcgcgggacgccggctcgatgattcgctcgcggggttcgatctcttcaccggactgtggtggccgttgcgtgccgctagcccggccgtgccccggcgcgagccgagttggctcgtggccaaactccatggcgccgcgcgtgtcccgcacgtgcggccggagcggggattaggccccttgcttccggccgtcctggccgtttgcgagccgtcggacccgccggaatacaaggcccgggaccgcttccgcaagcgcttcgacgccctgctctcctcgccgctggccgctttggagccgcacctgcgctgggcgctcgcagaggttggccgggcggttcacggccgagttccagaggcccgccgcgtacagggcatcgactgggcccgcttgttggacgagctgtcaatttgggaccgcggcgcccaacaccgattcgaccgcgatattcgggatatctgggccgaggcgtaccttaaggcggccgacgcgcggcgcgcctgagagaaggagcaacgcatgctgatcgaaatccacatgatccagaaccacagcccgtcaaacctcaatcgcgacgacttaggggcacccaagacctgcctcttcggcggcgttacccgcgcacgaatctcgagccagtgcctcaaacgcagcatccgacgcagcgcggagtttcagcgcgctttggagaaaggcggcggggtccggacgcggcgcttggtcgcaattctgtcggagcgcgcgcacggctcgccctccgcaccccacgacttgatcgagctggtgactaaggcgttcgaaaagggtggggtgaagaaggatcccacgaaggacgacccgcacgcaacgaacattttgttgttcgtgccagaggggacggtagtcgcgatggcgaaagcggtcaaggctgagtacggcaagcccgcggctcaacggacggccgatggcttggctgagacactgacggaactcttcggtcagaaggcgtcagtgccagacattgcgctttgcggacgcatgaccgaacttgactcagacggcctgtttcgcaagatcgactttcgcgttgaggcggcgcttgcagcggctcacgccatctcaacgcacgaggccatcaacgaggtcgattacttcacggctgtcgatgaccaggcggtcgggaccggtgccgggcatgtcaacgaggccatgttcgcatcggcctgcttctacaaacacttctgcatcgactggaaccaacttctcgacaacctcggcggtgacgagccgctggcgagtacgaccgtgtgccagttcctgcgcgctgcggccatgaatgtgccgagcgggaagcaaaagagctttgcggccttcaatccgccggacggcattctagttgaagtcaagcacgaacaccgcctgcccattagctacgcgaacgcgttcgctgatcccgtcccgctcaagactctgcgcggactgattggcgaaagcatcgcgcgcctggggcagcatgttcacgacattacggccgggtacggagtcaaagcgaagcggttctggttttctccggccgggcgccaccggctgacgtggattgaccgaacggctaaggagggtgaaaaggagaagctggccatagacggcgaagatggcacttttgattcgttcgacaaattcgtcagcgccgtaatgcaggaactgggaaggaccgcctcgtgactggaagtaccgttttcatacggctggaagggccactacaatcgtggggcgacacgtcgaagttcgtgattcgccgaagcatggaggccccgacgaaatccggcgtccttgggctgatctgttgcgccatgggtctttcgcgagaggccgcgcgcgaggtgctcacagacctgaataccttggttatgggcgtccgtatcgatcgggcgggcatgcgttggtgggactttcacaccgtcggtgccaaggtcggcattctgaatgcaaagggccacgtgaagaagacggccagtacgggcgagtatgaaacactcatcacccggcgcgagtatctcgccgacgcgagctttctcgttgcactgcaaggcgacgatgagctgactaagatcgtgcacgctgcgctcgagtcgcccaagtggccgattttccttggccgcaagtgctgcgcgccaagcgtgccgctactcgctcctccgtcggacggcgaatcctggacgaacccgcaggtacacggcagcttgagcgctgccctcgccgccgtatcctggcgccctcgatacgattccgaatcgccgcccatacctacgacgcgcgacggaagggcggagcttgattgcttgatggagtggcgggccctaagcgacagcgacgtcgcgcccgatgcggccgaggtatggtacgatgtaccggtctgtttcgatccccccgtccacgagccgcggatcgtcacgcgaagcactacggtagtcccgatcgcgcgagcgctccaacaacacactccgccgccgccgcggccgcgcgctgattacaccagcagagagtacaagaagcaacgcgcggcccgtcttgaggctgatggcggtgtgtgcgtcttctgcaaatcgcccgccagcaccgtccagcacgtaagctaccgtcgcgcgggcggcgctgagacgcaggacgacctccgggcgctttgccggctgtgtcacgatgccgtcacgatgatcgaatacggcctgggcatgggcctcgaccggatcgacccgtgccaaccccgttggcgccaagacattctgcgtactcgggccgaaatcgtgcgtttccgcgcgcttcaagtacggcgccgacgccttagccccgacgaggtcgaatgaccatgtttctatcgtcgctcctgatcgacaccggcgaaaaccccgaccggccgcgtcccggacgactgtggctgcgcaacatgtaccgcgtacaccagcgactttgcatggcgtttccgactgcagcgcgcagcgaaaacgatccgcagttcgtacaaccctaccagcgggacgacttcattcacgtgcacggatgtcgcacgaacgatcaggcttttctctttcgtgttgattctctcgccggcggcagagtagttgttctgatccagtcggcgatcaagccggattgggattacggattccataatgcgcagcaccttctcgccgcgccacccgccatcaagttgtttgatccgcagctcgcggccgggcaacgcgctcgatttcggctgcaggccaatcctaccaaacgcctgcgccgcgaatcgccaaacgctagcggtgatccgacaccgcaacagtgggtgggcaagcgcgtcgccgtgcccgctgacaagctccaggactggctcgcgcgccgcgcagagagctacggattccacttgcgcgaattgacggagttgtgtccgggatacgtgtacgttagtcgcactccagagtccgccggcggtctacggctgcgatctgtcaggtacgagggtctgctggaagtcactgactccgagtcgctggagcgtgccatcatccgtggcatcggccccgccaaagccttcggcttcggcttgctctcgctggcgccggtccggtaacgatgcttccccccgcacggcgccgcgcggaactcagcgcagccccgcggcgggccgatctttgacaagtgaataggcgagaatcccggccggaggcgcgccatggacgatctgcgctcgctgccccgcttcgacgatagcctcagctatctctatctcgagcatgcccgcatcgagcaggacgacaaggccatcgccttctacgacaaggccggcctcacgcccgtgcccatcgcggcgctggcgctgctgatgctgggccccggcaccaccatcacgcacgcggccatcaaggctctggccgacaacaactgcaccgtcgcctgggtcggcgaggacggcttgcgcttctacgccgccggcaccggcggcacgcgcggcagtgccgccctcctgcgccaggcccggctgatgagccatccgcagttgcgcctggcggtcgtgatgcgcatgtaccgaaagcgcttccccggcggactcgacccgaacctgacgttgcaacagatccgcggcatggagggcatccgcgtccgcgaggcttacgccgccgccagcaaggctaccggcgtgccctggaccgggcggaactacaagcgtggcgactgggccgctgccgaccccgtgaaccgcgcactgtcgaccggcaacgcttgcctttacggcctggttcaggccgccctcctgtcggccggctactcgcccgccctcggcttcatccacaccggcaagcagctctcgttcgtctacgacatcgccgacctgtacaaggccgacctggtcgtgccggccgccttcgaaaccgccggctggcaatgcccgtccgtcgaacgccagatgcgcatcgcctgccgcgccaagttcaaggacgctcgcctcatgcagcgcattctgcccgacatcgccgagctcctcgcgctcgagggcttgcccagcgtcgccgacgacccggcctgggacgttgaatcggccgcgcccggcgcgctctgggacccggacggccgcctcgaagggggcctcaactatggtactgatgttgcttgaacgcgtcgccccttctgtgcgcggcgaactcacccgctggctcatccagcctcgcaccggcgtcttcgtcgggaccgtctccgccctcgtccgcgacaagctttgggacaaggtcgtacactccctacaggctgccaaaccccgaaaaagcggaaagcgcgccggcgcgattatggtctataccaccaataccgagcagggcttcgacatccgcgtcttcggccaaaccgatcgatccatcgaagacttcgagggcctcatccttgcaaaaaccatcgcccaaccctaaatacgcagcgttgtccccacgcacgtgggggtgaaccgccaaacatgccgccctgccctcgtatagcccggttgtccccacgcacgtgggggtgaaccgagtctcctggctcgccgggcgcgctgtccgatgttgtccccacgcacgtgggggtgaaccgaagattcgggggttattttagaaataactgagaagttgtccccacgcacgtgggggtgaaccgctagacttgggtagtattgttacgcagggtgcagttgtccccacgcacgtgggggtgaaccgactcatgggcacacaccgcgctatcccgatttgttgtccccacgcacgtgggggtgaaccgcaaagcaattaaattgccaatctttaatttttcgttgtccccacgcacgtgggggtgaaccgcggtgctgaccaggtggtgcatgacgagtcgcgttgtccccacgcacgtgggggtgaaccgttgtgaactgtgcctgctcgcagtcagtaacgagttgtccccacgcacgtgggggtgaaccgataaattattggcatcaacgcatccatatgtaacgttgtccccacgcacgtgggggtgaaccgatgctcgtcgaaccggcccacggtgctacgaagttgtccccacgcacgtgggggtgaaccgctcaaagtgcgactcaccgtgcaaggcggcccgttgtccccacgcacgtgggggtgaaccaagatacactattgatagctcccgcccccacatccgttgtccccacgcacgtgggggtgaaccgcaataagctaagttctccgccggaattttagcgttgtccccacgcacgtgggggtgaaccgaattctgggaaatagctaagagaaatctttagttgtccccacgcacgtgggggtgaaccgtggatagcctcggactgggcgatgttcttggcgttgtccccacgcacgtgggggtgaaccgagtattgggccaagagagagctccggaataggcgttgtccccacgcacgtgggggtgaaccgagtattgggccaagagagagctccggaataggcgttgtccccacgcacgtgggggtgaaccgacctgcatcatgtgcgtctgcgatgcgtccggcgttgtccccacgcacgtgggggtgaatgtaaccgatcgggattgtgtgcggcttgtttcgagttgtccccacgcacgtgggggtgaaccgaaactgacggatgaggagaaggcgcagaaagaagttgtccccacgcacgtgggggtgaaccggcgctgcttgcgattgccgcagcggctcgcaagcgttgtccccacgcacgtgggggtgaaccggctacttggccggccggaagccgccccgcaatcgttgtccccacgcacgtgggggtgaaccggtaatcaacccacccacacgcccagtgcgaaaagttgtccccacgcacgtgggggtgaaccgtccagtacgtcgtacgagacgaacatggccgctgttgtccccacgcacgtgggggtgaaccgaaaaacaatcgcttgcactccgggcgatagatagttgtccccacgcacgtgggggtgaaccgcgtaacggtttgcagaccgcgcgtggttgcaaccgttgtccccacgcacgtgggggtgaaccgatagattaagggcatcgaaatatcaatttaagcgttgtccccacgcacgtgggggtgaaccgtcctcggtccccttgacgacggccggcttgacggttgtccccacgcacgtgggggtgaaccgtcctctgagtccggccgcagacgccagccggccgttgtccccacgcacgtgggggtgaaccgttgctcgcactcgggaccgactcacaactggccgttgtccccacgcacgtgggggtgaaccgagccagtttcgcctgttggtccgtcaatgcagcgttgtccccacgcacgtgggggtgaaccggccagcactgcgacgtatccgggcagggctgggttgtccccacgcacgtgggggtgaaccgagcagggtgagcagagttcagagatcagagttcgttgtccccacgcacgtgggggtgaacccggcttcgggcgtgttcccatatcgctgcgcctcgttgtccccacgcacgtgggggtgaaccggatctctcaaaatgagaaaaacaatggatgcagttgtccccacgcacgtgggggtgaaccggaggacgtccgcgacctcgaggacatcagggcgttgtccccacgcacgtgggggtgaaccggcgtgtgcgctagaagccgtctgcgcgtggcgttgtccccacgcacgtgggggtgaaccggactctccggcattttttcgagatttttttgccgttgtccccacgcacgtgggggtgaacccagggctatcgcatctaaaccgcggttagtcttgccggacggtcgcgttcgggttacactggcaaactgagcgtgtgaggcctcacggagtttcttgaacaaacccg
